(19) United States
(12) Patent Application Publication
(10) Pub. No.: US 2009/0075829 A1
(43) Pub. Date: Mar. 19, 2009

(54) Plant polymorphic markers and uses thereof

(76) Inventors: David F. Bush, Chicago, IL (US); Steven D. Rounsley, Boylston, MA (US); Roger C. Wiegand, Wayland, MA (US)

Correspondence Address: ARNOLD & PORTER LLP, 555 TWELFTH STREET, N.W., ATTN: IP DOCKETING, WASHINGTON, DC, 20004, US

(21) Appl. No.: 12/213,776

(22) Filed: Jun. 24, 2008

Related U.S. Application Data
(62) Division of application No. 10/746,294, filed on Dec. 29, 2003.
Application No. 10/746,294 is a continuation-in-part of application No. 09/692,412, filed on Oct. 20, 2000, now abandoned.
Application No. 09/692,412 is a continuation-in-part of application No. 09/534,859, filed on Mar. 29, 2000, now abandoned.
Application No. 09/534,859 is a continuation-in-part of application No. 09/803,736, filed on Mar. 12, 2001, now abandoned.

(51) Int. Cl. C40B 30/00

(52) U.S. Cl. 506/7

(57) ABSTRACT

The present invention is in the field of plant genetics. More specifically, the invention relates to nucleic acid markers associated with Arabidopsis thaliana ecotypes. The invention also relates to methods for detecting polymorphisms. The invention further relates to methods of using nucleic acid markers, for example, for genome mapping, gene identification, gene isolation and gene analysis.

### CROSS REFERENCE TO RELATED APPLICATION

[0001] This application is a division of application Ser. No. 10/746,294, filed Dec. 29, 2003, which is a continuation-in-part of application Ser. No. 09/692,412 filed Oct. 20, 2000, and a continuation in part of application Ser. No. 09/534,859, filed Mar. 29, 2000, and a continuation in part of application Ser. No. 09/803,736, filed Mar. 12, 2001, all of which are herein incorporated by reference in their entirety.

### INCORPORATION OF SEQUENCE LISTING

[0002] This application contains a sequence listing, which is contained on three identical CD-Rs: two copies of a sequence listing (Seq. listing: Copy 1 and Seq. listing: Copy 2) and a sequence listing Computer Readable Form (CRF), all of which are herein incorporated by reference. All three CD-Rs each contain one file called “P02435US05SeqList.txt” which is 13,491 kilobytes in size (measured in Windows XP) and was created on Jun. 24, 2008.

### Incorporation of Table A

[0003] Two copies each of Table A on CD-Rs, each containing two files: (1) TableA1.doc which is 640 kilobytes (measured in Windows XP) created on Jun. 24, 2008; and (2) Table A2.doc which is 734 kilobytes (measured in Windows XP) created on Jun. 24, 2008, are herein incorporated by reference.

### FIELD OF THE INVENTION

[0004] The present invention is in the field of plant genetics. More specifically, the invention relates to nucleic acid markers associated with Arabidopsis thaliana ecotypes. The invention also relates to methods for detecting polymorphisms and using polymorphic markers, for genotyping applications, e.g. identifying and isolating regions of DNA associated with phenotypic traits.

### BACKGROUND OF THE INVENTION

[0005] I. Arabidopsis thaliana

[0006] The identification in Arabidopsis thaliana of polymorphic markers is important in the development of nutritionally enhanced or agriculturally enhanced crops. Such polymorphic markers are useful in, for example, genetic mapping or linkage analysis, marker assisted breeding, physical genome mapping, transgenic crop production, crop monitoring diagnostics, and gene identification and isolation.

[0007] Arabidopsis thaliana is widely used as a model organism for basic and applied research in the biology of flowering plants. Arabidopsis thaliana is a model system for plant genomic research in part due to its small and characterized genome, which is estimated to be comprised of approximately 20,000 to 25,000 genes. The genome is estimated to have a haploid content of around 100 Mb, present on five chromosomes. Reported partial sequence analysis has provided information on genome features such as gene density and gene structure (Settles and Byrne, Genome Research 8:83-85 (1998), the entirety of which is herein incorporated by reference). Based on reports from the European Union Sequencing Consortium, the average gene density is one gene every approximately 4.8 kb.

[0008] Other important characteristics that make Arabidopsis thaliana a useful test system include its rapid life-cycle, small size, which allows for controlled growth in restricted space, its prolific seed production, the availability of characterized and uncharacterized mutants and the existence of a reliable transformation system.

[0009] Molecular genetics is often used in the analysis of plant genes and is particularly useful in the analysis of complex biological processes such as developmental regulation. In one approach the use of mutant plants, e.g. Arabidopsis thaliana mutants, in molecular genetic research requires the location of the mutation. Molecular markers are a useful way to locate such mutations.

[0010] Identification of target loci and the isolation of associated genes using molecular markers has been reported (Liu et al., Proc. Natl. Acad. Sci. USA, 96:6535-6540 (1999); Muramoto et al., The Plant Cell, 11:335-347 (1999); Bowman and Smyth, Development, 126:2387-2396 (1999); Michaels and Amasino, The Plant Cell, 11:949-956 (1999); Ha et al., The Plant Cell, 11:1153-1163 (1999); Walker et al., The Plant Cell, 11:1337-1349 (1999); Sedbrook et al., Proc. Natl. Acad. Sci. USA, 96:1140-1145 (1999); Kiyosue et al., Proc. Natl. Acad. Sci. USA, 96:4186-4191 (1999); and Davis et al., Proc. Natl. Acad. Sci. USA, 96:6541-6546 (1999), all of which are herein incorporated by reference in their entirety). The use of markers to isolate a genomic region of interest is often referred to as map based cloning, chromosome walking or positional cloning. Many of the Arabidopsis thaliana markers that have been used in map based cloning are anchored to genetic maps such as the Lister & Dean map (See e.g. genome-www3.stanford.edu/cgi-bin/AtDB/RIintromap).

[0011] Physical or partial physical maps of the Arabidopsis thaliana genome have also been reported (See e.g. genome-www3.stanford.edu/atdb_welcome.html). A physical map of Arabidopsis thaliana, Columbia based on a collection of bacterial artificial chromosomes (BACs) is available (Marra et al., Nat. Genet., 22(3):265-270 (1999); Mozo et al., Nat. Genet., 22(e):271-275 (1999), both of which are herein incorporated by reference in their entirety). An overlapping series of BACs representing the Arabidopsis thaliana, Columbia genome is available from AIMS, Arabidopsis Biological Resource Center, 309 B&Z Building, 1735 Neil Avenue, Columbus, Ohio 43210, USA.

[0012] Cho et al. reported a low density biallelic polymorphic map based on a comparison of Arabidopsis thaliana, Columbia and Arabidopsis thaliana, Landsberg erecta ecotypes by screening approximately 0.5% of the genome for such polymorphisms (Cho et al., Nature Genetics 23:203-207 (1999), the entirety of which is herein incorporated by reference). In this survey 487 single nucleotide polymorphisms (SNPs) were reported. Cho et al. also reported the use of oligonucleotide arrays to detect Arabidopsis thaliana SNPs.

[0013] The present invention provides polymorphic nucleic acid markers whose physical location is known within the Arabidopsis thaliana genome. Moreover, the physical location of such markers is further known within a particular BAC and the position of that BAC relative to other BACs in the genome is also known.

[0014] Successful isolation of a region of Arabidopsis thaliana DNA associated with a trait of interest requires a nucleic acid marker to be sufficiently close to the trait. As the present invention provides a collection of nucleic acid markers in the Arabidopsis thaliana genome which allows for the efficient isolation of regions of Arabidopsis thaliana DNA associated with traits of interest. Moreover, the association of a collection of nucleic acid markers with a trait of interest may be simultaneously investigated.

### SUMMARY OF THE INVENTION

[0015] The present invention provides a collection of nucleic acid molecules capable of detecting a set of polymorphisms as shown in Table A.

[0016] The present invention also includes and provides a method of isolating a region of genomic DNA associated with a phenotype of interest comprising: (A) identifying an Arabidopsis plant of a first ecotype with a phenotype of interest; (B) crossing said Arabidopsis plant with an Arabidopsis plant of a second ecotype lacking said phenotype; (C) propagating and self pollinating seeds from said cross; (D) selecting progeny of self pollinated seeds with said phenotype; (E) screening progeny of self pollinated seeds with said phenotype with a collection of nucleic acid molecules, said collection of nucleic acid molecules capable of detecting a set of polymorphisms where the polymorphisms are distributed throughout the genome of said self pollinated seeds with said phenotype at an average density of more than one polymorphism per about 100 kb, wherein at least one of the polymorphisms is selected from Table A; (F) calculating the linkage of each of said polymorphisms to said phenotype; and (G) isolating said region of genomic DNA associated with said phenotype based on its linkage to one or more of said nucleic acid molecules.

[0017] The present invention also provides a method of identifying a region of genomic DNA associated with a phenotypic trait of interest comprising: (A) screening a mapping population of Arabidopsis plants to determine the linkage of the phenotypic trait with a collection of nucleic acid molecules, wherein the nucleic acid molecules are capable of detecting a set of polymorphisms, where the polymorphisms are distributed throughout the genome of the mapping population of Arabidopsis plants at an average density of more than one polymorphism per about 100 kb, wherein at least on eof the polymorphisms is selected from Table A; (B) calculating the linkage of each of the polymorphisms to the phenotypic trait; and (C) identifying the genomic DNA region associated with said phenotypic trait based on its linkage to one or more of said nucleic acid molecules.

[0018] The present invention also provides a method of identifying a nucleic acid molecule associated with a phenotypic trait of interest comprising: (A) screening a mapping population of Arabidopsis plants to determine the linkage of said phenotypic trait with a collection of polymorphisms, wherein said polymorphisms are distributed throughout the genome of said mapping population of Arabidopsis plants at an average density of more than one polymorphism per about 100 kb, wherein at least one of the polymorphisms is selected from Table A; (B) calculating the linkage of each of said polymorphisms to said phenotypic trait; and (C) isolating said nucleic acid molecule associated with said phenotypic trait based on its linkage to one or more of said polymorphisms.

[0019] The present invention also provides a method of isolating a nucleic acid molecule associated with a phenotypic trait comprising: (A) screening a mapping population of Arabidopsis plants to determine the linkage of said phenotypic trait with a collection of polymorphisms, wherein at least one polymorphism is selected form Table A; and (B) isolating said nucleic acid molecule associated with said phenotypic trait based on its linkage to one or more of said polymorphisms.

[0020] The present invention further provides a collection of non-identical nucleic acid molecules capable of detecting polymorphisms present in an Arabidopsis mapping population, wherein said collection of non-identical nucleic acid molecules is capable of detecting at least 25 polymorphisms selected from the group consisting of Table A. Such a collection may also be recorded on a computer readable medium having recorded thereon at least 100 of the polymorphisms set forth in Table A. Such a collection may also be deposited on a substrate.

[0021] The present invention also provides a method of introgressing a trait of interest into a plant comprising using a nucleic acid marker for marker assisted selection of said plant, said nucleic acid marker capable of detecting a polymorphism selected from Table A, and introgressing said trait into said plant.

[0022] The present invention further provides a method for identifying transposons in the DNA of an organism comprising identifying INDELs in said DNA and comparing the sequence of said INDELs to the sequence of one or more known transposons.

[0023] The present invention also provides a method of identifying a nucleic acid molecule associated with a phenotypic trait comprising: (A) screening a mapping population of Arabidopsis plants to determine the linkage of said phenotypic trait with a collection of polymorphisms, where the polymorphisms are distributed throughout the genome of said mapping population of Arabidopsis plants at an average density of more than one polymorphism per about 100 kb; and (B) identifying said nucleic acid molecule associated with said phenotypic trait based on its linkage to one or more of said polymorphisms.

[0024] Also provided is a method of identifying a nucleic acid molecule associated with a phenotypic trait of interest comprising: (A) screening a mapping population of Arabidopsis plants to determine the linkage of said phenotypic trait with a collection of polymorphisms, wherein said polymorphisms are distributed throughout the genome of said mapping population of Arabidopsis plants wherein at least one of the polymorphisms is selected from Table A; (B) calculating the linkage of each of said polymorphisms to said phenotypic trait; and, (C) isolating said nucleic acid molecule associated with said phenotypic trait based on its linkage to one or more of said polymorphisms, and wherein said collection of polymorphisms is designed from features of polymorphisms listed in Table A. Such a method may also be recorded on computer readable medium.

[0025] The present invention also provides a computer readable medium having recorded thereon polymorphisms selected from the group consisting of Single Nucleotide Polymorphisms 466799, 471736, 459697, 459698, 459699, 459700, 459701, 445015, 459702, 459703, 445016, 445017, 461062, 447523, 461063, 447524, 447525, 461064, 461065, 447526, 461066, 450823, 450824, 450825, 450826, 428620, 450827, 462117, 450828, 462118, 428621, 428622, 428623, 450829, 462119, 428624, 428625, 428626, 450830, 450831, 450832, 450833, 448562, 424491, 424492, 424493, 424494, 424495, 424496, 424497, 448563, 448564, 424498, 424499, 448565, 461975, 424500, 424501, 424502, 424503, 448566, 448567, 448568, 448569, 448570, 424504, 424505, 424506, 424507, 424508, 424509, 424510, 424511, 448571, 424512, 424513, 424514, 424515, 448572, 426007, 426008, 426009, 426010, 449396, 462027, 449397, 449398, 426011, 426012, 449399, 449400, 462028, 449401, 462029, 449402, 426013, 426014, 426015, 426016, and 426017.

[0026] Also provided are a collection of non-identical nucleic acid molecules capable of detecting polymorphisms in an Arabidopsis thaliana mapping population, wherein said collection of non-identical nucleic acid molecules is capable of detecting polymorphisms selected from the group consisting of Single Nucleotide Polymorphisms 466799, 471736, 459697, 459698, 459699, 459700, 459701, 445015, 459702, 459703, 445016, 445017, 461062, 447523, 461063, 447524, 447525, 461064, 461065, 447526, 461066, 450823, 450824, 450825, and 450826.

[0027] The present invention also provides a computer readable medium having recorded thereon Single Nucleotide Polymorphisms 466799 or 471736.

[0028] The present invention further provides a computer readable medium having recorded thereon a set of polymorphisms wherein said polymorphisms are distributed throughout the genome of Arabidopsis at an average density of more than one polymorphism per about 100 kb.

### DETAILED DESCRIPTION OF THE INVENTION

[0029] The genomes of animals and plants naturally undergo spontaneous mutation in the course of their continuing evolution (Gusella, Ann. Rev. Biochem. 55:831-854 (1986), the entirety of which is herein incorporated by reference). A “polymorphism” is a variation or difference in the sequence of a genetic region that arises in some of the members of a species. Variant sequences can be defined with reference to an arbitrary or non-arbitrary standard sequence for the species. A polymorphism is thus said to be “allelic,” in that, due to the existence of the polymorphism, some members of a species may have the “standard” sequence (i.e. the standard “allele”) whereas other members may have a variant sequence (i.e., a variant “allele”). Thus, as used herein, an allele is one of two or more alternative versions of a gene or other genetic region at a particular location on a chromosome. In the simplest case, only one variant sequence may exist, and the polymorphism is thus said to be bi-allelic. In other cases, the species' population may contain multiple alleles, and the polymorphism is termed tri-allelic, etc.

[0030] A single gene or genetic region may have multiple different unrelated polymorphisms. For example, it may have a one bi-allelic polymorphism at one site, another bi-allelic polymorphism at another site and a multi-allelic polymorphism at another site. When all the sequences for a group of alleles at a chromosomal locus in a plant are the same, the alleles are said to be “homozygous” at that locus. When the sequence of any allele at a particular locus in a plant is different, the population of alleles is said to be “heterozygous” at that locus.

[0031] Phenotypic traits can vary due to environmental and/or genetic factors. For example, polymorphisms at a particular chromosomal locus can affect the phenotypic trait associated with that locus.

[0032] As used herein, a phenotypic trait of interest may be any trait exhibited by a plant, whether naturally occurring or otherwise, that is capable of being inherited. Moreover, the phenotypic trait of interest may, for example, be transient, permanent or only present when the plant or part thereof is subjected to environmental stimuli or challenge. A phenotypic trait of interest may be a desired trait. In other cases the phenotypic trait of interest may be an undesired trait. Furthermore, phenotypic traits are not limited to visible traits. While the phenotypic trait may be any trait, preferred, traits of interest are those that have agricultural significance. Examples of agricultural traits include those that affect a component of yield, those that provide disease or chemical resistance, and those that affect developmental traits such as pollen or ovule production, etc., and those that affect composition of plants or plant parts, including seed proteins or oils, starch or sugar composition, nutrient content and the like.

[0033] Many phenotypic traits are the result of multiple genes or genetic factors, for example, a phenotypic trait that is the result of a quantitative trait allele. An allele of a quantitative trait locus (QTL) can, of course, comprise multiple genes or other genetic factors even within a contiguous genomic region or linkage group. As used herein, an allele of a quantitative trait locus can therefore encompass more than one gene or other genetic factor where each individual gene or genetic component is also capable of exhibiting allelic variation and where each gene or genetic factor also has a phenotypic affect on the quantitative trait in question.

[0034] As used herein, a “marker” is an indicator for the presence of at least one polymorphism. A marker is preferably a nucleic acid molecule. It is understood that a marker can, for example, be an oligonucleotide probe or primer.

[0035] A “nucleic acid marker” as used herein means a nucleic acid molecule that is capable of being a marker for detecting a polymorphism.

[0036] The term “oligonucleotide” as used herein refers to short nucleic acid molecules useful, e.g. for hybridizing probes, nucleotide array elements or amplification primers. Oligonucleotide molecules are comprised of two or more nucleotides, i.e. deoxyribonucleotides or ribonucleotides, preferably more than five and up to 30 or more. The exact size will depend on many factors, which in turn depend on the ultimate function or use of the oligonucleotide. Oligonucleotides can comprise ligated natural nucleic acid molecules or synthesized nucleic acid molecules and comprise between 10 to 150 nucleotides or between about 12 and about 100 nucleotides which have a nucleotide sequence which can hybridize to a strand of polymorphic DNA, e.g. to permit detection of a polymorphism. Such oligonucleotides may be nucleic acid elements for use on solid arrays (e.g. synthesized or spotted). In preferred aspects of the invention such oligonucleotides can comprise as few as 12 hybridizing nucleotides, e.g. for assays where the oligonucleotide also comprises a detectable label. In other preferred aspects of the invention the oligonucleotide can comprise as few as about 15 hybridizing nucleotides, e.g. for single base extension assays.

[0037] Such oligonucleotides may also be primers for use in polymerase chain reaction (PCR) or other reactions. The term “primer” as used herein refers to a nucleic acid molecule, preferably an oligonucleotide whether derived from a naturally occurring molecule such as one isolated from a restriction digest or one produced synthetically, which is capable of acting as a point of initiation of synthesis when placed under conditions in which synthesis of a primer extension product which is complementary to a nucleic acid strand is induced, i.e., in the presence of nucleotides and an agent for polymerization such as DNA polymerase and at a suitable temperature and pH. The primer is preferably single stranded for maximum efficiency in amplification, but may alternatively be double stranded. If double stranded, the primer is first treated to separate its strands before being used to prepare extension products. Preferably, the primer is an oligodeoxyribonucleotide. The primer must be sufficiently long to prime the synthesis of extension products in the presence of the agent for polymerization. The exact lengths of the primers will depend on many factors, including temperature and source of primer. For example, depending on the complexity of the target sequence, the oligonucleotide primer typically contains at least 15, more preferably 18 nucleotides, which are identical or complementary to the template and optionally a tail of variable length which need not match the template. The length of the tail should not be so long that it interferes with the recognition of the template. Short primer molecules generally require cooler temperatures to form sufficiently stable hybrid complexes with the template.

[0038] The primers herein are selected to be “substantially” complementary to the different strands of each specific sequence to be amplified. This means that the primers must be sufficiently complementary to hybridize with their respective strands. Therefore, the primer sequence need not reflect the exact sequence of the template. For example, a non-complementary nucleotide fragment may be attached to the 5′ end of the primer, with the remainder of the primer sequence being complementary to the strand. Alternatively, non-complementary bases or longer sequences can be interspersed into the primer, provided that the primer sequence has sufficient complementarity with the sequence of the strand to be amplified to hybridize therewith and thereby form a template for synthesis of the extension product of the other primer. Computer generated searches using programs such as Primer3 (www-genome.wi.mit.edu/cgi-bin/primer/primer3.cgi), STSPipeline (www-genome.wi.mit.edu/cgi-bin/www-STS_Pipeline), or GeneUp (Pesole et al., BioTechniques 25:112-123 (1998), the entirety of which is herein incorporated by reference), for example, can be used to identify potential PCR primers. Exemplary primers include primers that are 18 to 50 bases long, where at least between 18 to 25 bases are identical or complementary to at least 18 to 25 bases of a segment of the template sequence.

[0039] This invention also contemplates and provides primer pairs for amplification of nucleic acid molecules in order to detect polymorphisms. As used herein “primer pair” means a set of two oligonucleotide primers based on two separated sequence segments of a target nucleic acid sequence. One primer of the pair is a “forward primer” or “5′primer” having a sequence which is identical to the more 5′ of the separated sequence segments (+ strand). The other primer of the pair is a “reverse primer” or “3′primer” having a sequence which is the reverse complement of the more 3′ of the separated sequence segments (+ strand). A primer pair allows for amplification of the nucleic acid sequence between and including the separated sequence segments. Optionally, each primer pair can comprise additional sequences, e.g. universal primer sequences or restriction endonuclease sites, at the 5′ end of each primer, e.g. to facilitate cloning, DNA sequencing, or reamplification of the target nucleic acid sequence.

[0040] As used herein, a “mapping population” is a collection of plants capable of being used with markers to map the genetic position of traits.

[0041] As used herein, a “polymorphic marker” is a marker capable of detecting one or more polymorphisms.

[0042] The present invention provides nucleic acid molecules which are markers, i.e. capable of detecting polymorphisms that are distributed throughout the genome of a mapping population.

[0043] As used herein, a “characterized polymorphism” is a polymorphism whose physical position on a genome is known. In a preferred embodiment, the physical position of a characterized polymorphism on an isolated nucleic acid molecule, such as a bacterial artificial chromosome comprising Arabidopsis thaliana genomic DNA, is known. Thus the present invention also provides nucleic acid molecules capable of detecting characterized polymorphisms throughout a genome.

[0044] In a further preferred embodiment, a characterized polymorphism is any polymorphism where the nucleic acid sequences of at least two of the polymorphisms present in an Arabidopsis mapping population are known (sequenced characterized polymorphism). In a particularly preferred embodiment, a characterized polymorphism is a polymorphism from Table A. In another particularly preferred embodiment, a characterized polymorphism from Table A is part of a collection of polymorphisms, where preferably over 25%, more preferably over 50% and even more preferably over 75% of the polymorphisms are selected from the polymorphisms in Table A.

[0045] The present invention provides nucleic acid molecules capable of detecting insertion/deletion polymorphisms (INDELs) in Arabidopsis at an average density of one INDEL per 8.4 kb. The present invention also provides nucleic acid molecules capable of detecting single nucleotide polymorphisms (SNPs) at an average density of one SNP per 3.9 kb. The present invention also provides nucleic acid molecules capable of detecting polymorphisms at an average density of one polymorphism per 2.7 kb.

[0046] As used herein, an “INDEL” is any insertion/deletion polymorphism characterized by additional nucleotides in at least one allele as compared to a reference allele. As used herein, a “SNP” is any polymorphism characterized by a different single nucleotide at a particular physical position in at least one allele.

[0047] The polymorphisms capable of detection by nucleic acid molecules of the present invention are distributed throughout the genome of the mapping population in a manner that allows the efficient identification of a genomic region associated with a phenotypic trait. In a preferred embodiment, the polymorphisms are distributed throughout the genome where 60%, preferably 70%, more preferably 80%, even more preferably 90%, 95% or 100% of the genome has a characterized polymorphism at a density of higher than one polymorphism per 100 kb, more preferably higher than one polymorphism per 50 kb, and even more preferably higher than one polymorphism per 25 kb, 10 kb, 7 kb, 5 kb or 3 kb. In another preferred embodiment, the polymorphisms are distributed throughout the genome where 60%, preferably 70%, more preferably 80%, even more preferably 90%, 95% or 100% of genome has a characterized polymorphism at a density of higher than one polymorphism per 3.5 cM, more preferably higher than one polymorphism per 3.25 cM, and even more preferably higher than one polymorphism per 3.0 cM, 2.75 cM, 2.5 cM, 2.0 cM, 1.5 cM, 1.0 cM or 0.5 cM.

[0048] In a preferred embodiment of the present invention, the efficient identification of a genomic region associated with a phenotypic trait, e.g. a QTL or a single gene, is provided, where the genomic region is less than 100 kb, more preferably less than 50 kb, and even more preferably less than 25 kb, 10 kb, 7 kb, 5 kb or 3 kb from a characterized polymorphism. In another preferred embodiment of the present invention the efficient identification of a genomic region associated with a phenotypic trait where the genomic region is less than 3.5 cM, more preferably less than 3.25 cM, and even more preferably less than 3 cM, 2.75 cM, 2.5 cM, 2.0 cM, 1.5 cM, 1.0 cM or 0.5 cM from a characterized polymorphism.

[0049] It is understood that the distribution of polymorphisms need not be uniform in a genome as certain regions will exhibit a higher average density of polymorphisms (e.g. non-centromeric regions) and certain regions will exhibit a lower average density of polymorphisms (e.g. centromeric regions).

[0050] In a preferred embodiment, the efficient identification of a genomic region associated with a phenotypic trait of interest will be obtained by a simultaneous screening for the presence of 25 or more, more preferably 50 or more, even more preferably 75 or more, 100 or more, 150 or more, 200 or more, 250 or more, 300 or more, 400 or more or 500 or more, 1,000 or more, 2,000 or more, 3,000 or more, 4,000 or more polymorphisms. When high throughput assays are employed, e.g. with microarrays, it may be feasible to screen for the presence of 5,000 or more polymorphisms, e.g. at least 10,000 or even 15,000 polymorphisms. In an even more preferred embodiment, the efficient identification of a genomic region associated with a phenotypic trait of interest will be obtained by a simultaneously screening for the presence of 25 or more, more preferably 50 or more, even more preferably (where appropriate) 100 or more, or 250 or more etc. of the polymorphisms in Table A.

[0051] In another preferred embodiment, the efficient identification of a genomic region associated with a phenotypic trait of interest will be obtained by screening for the presence of 25 or more, more preferably 50 or more, even more preferably 75 or more, 100 or more, 150 or more, 200 or more, 250 or more, 300 or more, 400 or more or 500 or more, 1,000 or more, 2,000 or more, 3,000 or more, 4,000 or more polymorphisms during a single assay. In an even more preferred embodiment the efficient identification of a genomic region associated with a phenotypic trait of interest will be obtained by screening for the presence of 25 or more, more preferably 50 or more, even more preferably (where appropriate) 100 or more or 250 or more etc. of the polymorphisms in Table A during a single assay. A single assay can comprise many steps. One or more of these steps can occur sequentially.

[0052] In an embodiment of the present invention, the assay is carried out using a high throughput system. A particularly preferred high throughput system involves a solid phase array. A particularly preferred solid phase array is a microarray.

[0053] In the assays below, a collection of markers for polymorphisms can comprise from a few up to millions of different nucleic acid molecules. For example, using simple dot-blot hybridization methods, membranes with many nucleic acid molecules can be generated for screening. The solid-phase techniques described below and known in the art can be adapted for high-throughput monitoring of polymorphisms. In such methods different immobilized nucleic acid molecule probes can be placed on a solid support at microarray densities of up to millions of nucleic acid molecules per square inch. Similarly, very large sets of nucleic acid molecules can be immobilized for simultaneous screening against one or more probes.

[0054] Several methods have been described for fabricating microarrays of nucleic acid molecules and using such microarrays in detecting nucleic acid sequences. For instance, microarrays of markers for polymorphisms can be fabricated by spotting nucleic acid molecules, e.g. oligonucleotides, onto substrates or fabricating oligonucleotide sequences in situ on a substrate. Spotted or fabricated nucleic acid molecules can be applied in a high density matrix pattern of up to about 30 non-identical nucleic acid molecules per square centimeter or higher, e.g. up to about 100 or even 1,000 per square centimeter or higher. Useful substrates for arrays include nylon, glass and silicon. See, for instance, U.S. Pat. Nos. 5,202,231; 5,242,974; 5,384,261; 5,405,783; 5,412,087; 5,424,186; 5,429,807; 5,436,327; 5,445,934; 5,472,672; 5,525,464; 5,527,681; 5,529,756; 5,532,128; 5,545,531; 5,554,501; 5,556,752; 5,561,071; 5,571,639; 5,593,839; 5,599,695; 5,624,711; 5,658,734; 5,700,637; 5,744,305; 5,800,992; 5,807,522; 6,004,755 and 6,087,102 the disclosures of all of which are incorporated herein by reference in their entireties.

[0055] Sequences can be efficiently analyzed by hybridization or primer extension. See, for instance, U.S. Pat. Nos. 5,202,231; 5,445,934; 5,492,806; 5,525,464; 5,695,940; 5,700,637; 5,744,305; 5,800,992; 5,807,522; and 5,830,645, all of which are incorporated herein by reference in their entirety. Nucleic acid molecule microarrays may be screened with molecules or fragments thereof to determine nucleic acid molecules that specifically bind molecules or fragments thereof.

[0056] In a preferred embodiment, a microarray of the present invention comprises at least 10 nucleic acid molecules that specifically hybridize under high stringency to at least 10 polymorphic nucleic acid sequences characterized by this invention. In a more preferred embodiment, a microarray of the present invention comprises at least 100 nucleic acid molecules that specifically hybridize under high stringency to at least 100 characterized polymorphic nucleic acid sequences; more preferably at least 1,000 or 2,500 marker nucleic acid molecules that specifically hybridize under high stringency to at least 1,000 or 2,500 characterized polymorphic nucleic acid sequences; even more preferably at least at least 4,000 or more marker nucleic acid molecules that specifically hybridize under high stringency to at least 4,000 or more characterized polymorphic nucleic acid sequences.

[0057] In a preferred embodiment, a microarray of the present invention comprises at least 10 nucleic acid molecules capable of detecting or characterizing by primer extension to at least 10 polymorphic nucleic acid sequences characterized by this invention. In a more preferred embodiment, a microarray of the present invention comprises at least 100 nucleic acid molecules capable of detecting or characterizing by primer extension to at least 100 characterized polymorphic nucleic acid sequences; even more preferably at least 1,000 or 2,500 nucleic acid molecules capable of detecting or characterizing by primer extension to at least 1,000 or 2,500 characterized polymorphic nucleic acid sequences; even more preferably at least 4,000 or more nucleic acid molecules capable of detecting or characterizing by primer extension to at least 4,000 or more characterized polymorphic nucleic acid sequences.

[0058] In a preferred embodiment, the microarray is a variant detector array (VDA)(Cho et al., Nature Genetics 23:203-207 (1999); Wang et al., Science 280: 1077-1082 (1998), the entirety of which is herein incorporated by reference; Winzeler et al., Curr. Opin. Genet. Dev. 4: 602-608 (1997), the entirety of which is herein incorporated by reference). For example, each detection block can consist of four variant detector arrays (VDAs) corresponding to the alternative alleles: two for the forward strand sequence and two for the reverse strand sequence (See e.g. Cho et al., Nature Genetics 23:203-207 (1999)). For each of the interrogated positions (for example, −5 to +5 relative to the polymorphic position), a set of four suitable length oligonucleotides per SNP or other polymorphism (e.g. 25-mers are prepared where the oligonucleotides are complementary to the SNP or other polymorphic region except at the interrogated position). Hybridization of the oligonucleotides with the matching allele results in a strong signal.

[0059] The detection or screening of polymorphisms in a sample of DNA may be facilitated, for example, through including the use of nucleic acid amplification methods. Such methods specifically increase the concentration of polynucleotides that span the polymorphic site, or include that site and sequences located either distal or proximal to it. Such amplified molecules can be readily detected by gel electrophoresis or other means. For instance, polymorphisms in DNA sequences can be detected by a variety of effective methods well known in the art including those disclosed in U.S. Pat. Nos. 5,468,613 and 5,217,863; 5,210,015; 5,876,930; 6,030,787 6,004,744; 6,013,431; 5,595,890; 5,762,876; 5,945,283; 5,468,613; 6,090,558; 5,800,944 and 5,616,464, all of which are incorporated herein by reference in their entireties. In particular, polymorphisms in DNA sequences can be detected by hybridization to allele-specific oligonucleotide (ASO) probes as disclosed in U.S. Pat. Nos. 5,468,613 and 5,217,863. The nucleotide sequence of an ASO probe is designed to form either a perfectly matched hybrid or to contain a mismatched base pair at the site of the variable nucleotide residues. The distinction between a matched and a mismatched hybrid is based on differences in the thermal stability of the hybrids in the conditions used during hybridization or washing, differences in the stability of the hybrids analyzed by denaturing gradient electrophoresis or chemical cleavage at the site of the mismatch.

[0060] If a polymorphism creates or destroys a restriction endonuclease cleavage site, or if it results in the loss or insertion of DNA (e.g., a Variable Number of Tandem Repeats (VNTR) polymorphism), it will alter the size or profile of the DNA fragments that are generated by digestion with that restriction endonuclease. As such, individuals that possess a variant sequence can be distinguished from those having the original sequence by restriction fragment analysis. Polymorphisms that can be identified in this manner are termed “restriction fragment length polymorphisms” (“RFLPs”). RFLPs have been widely used in human and plant genetic analyses (Glassberg, UK Patent Application 2135774; Skolnick et al., Cytogen. Cell Genet. 32:58-67 (1982); Botstein et al., Ann. J. Hum. Genet. 32:314-331 (1980); Fischer et al., PCT Application WO 90/13668; Uhlen, PCT Application WO 90/11369, all of which are herein incorporated by reference in their entirety).

[0061] An alternative method of determining polymorphisms is based on cleaved amplified polymorphic sequences (CAPS) (Konieczny, A. and F. M. Ausubel, Plant J. 4:403-410 (1993); Lyamichev et al., Science 260:778-783 (1993), the entireties of which are herein incorporated by reference). One advantage of this method is the large amount of target DNA that is generated by amplification which eliminates the requirement for radiolabeling for detection of the polymorphism.

[0062] Polymorphisms can also be identified by single strand conformation polymorphism (SSCP) analysis. The SSCP technique is a method capable of identifying most sequence variations in a single strand of DNA, typically between 150 and 250 nucleotides in length (Elles, Methods in Molecular Medicine: Molecular Diagnosis of Genetic Diseases, Humana Press (1996), the entirety of which is herein incorporated by reference; Orita et al., Genomics 5:874-879 (1989), the entirety of which is herein incorporated by reference). Under denaturing conditions a single strand of DNA will adopt a conformation that is uniquely dependent on its sequence. This conformation usually will be different even if only a single base is changed. Most conformations have been reported to alter the physical configuration or size sufficiently to be detectable by electrophoresis. A number of protocols have been described for SSCP including, but not limited to Lee et al., Anal. Biochem. 205:289-293 (1992); the entirety of which is herein incorporated by reference; Suzuki et al., Anal. Biochem. 192:82-84 (1991), the entirety of which is herein incorporated by reference; Lo et al., Nucleic Acids Research 20:1005-1009 (1992), the entirety of which is herein incorporated by reference; Sarkar et al., Genomics 13:441-443 (1992), the entirety of which is herein incorporated by reference).

[0063] Polymorphisms may also be detected using a DNA fingerprinting technique called amplified fragment length polymorphism (AFLP), which is based on the selective PCR amplification of restriction fragments from a total digest of genomic DNA to profile that DNA. Vos et al., Nucleic Acids Res. 23:4407-4414 (1995), the entirety of which is herein incorporated by reference. This method allows for the specific co-amplification of many restriction fragments, which can be analyzed without knowledge of the nucleic acid sequence. AFLP employs basically three steps. Initially, a sample of genomic DNA is cut with restriction enzymes and oligonucleotide adapters are ligated to the restriction fragments of the DNA. The restriction fragments are then amplified using PCR by using the adapter and restriction sequence as target sites for primer annealing. The selective amplification is achieved by the use of primers that extend into the restriction fragments, amplifying only those fragments in which the primer extensions match the nucleotide flanking the restriction sites. These amplified fragments are then visualized on a denaturing polyacrylamide gel (Beismann et al., Mol. Ecol. 6:989-993 (1997); Janssen et al., Int. J. Syst. Bacteriol 47:1179-1187 (1997); Huys et al., Int. J. Syst. Bacteriol. 47:1165-1171 (1997); McCouch et al., Plant Mol. Biol. 35:89-99 (1997); Nandi et al., Mol. Gen. Genet. 255:1-8 (1997); Cho et al. Genome 39:373-378 (1996); Simons et al., Genomics 44:61-70 (1997); Cnops et al., Mol. Gen. Genet. 253:32-41 (1996); Thomas et al., Plant J. 8:785-794 (1995), all of which are herein incorporated by reference in their entirety).

[0064] Polymorphisms may also be detected using random amplified polymorphic DNA (RAPD) (Williams et al., Nucl. Acids Res. 18:6531-6535 (1990), the entirety of which is herein incorporated by reference).

[0065] SNPs and insertion/deletions can be detected by methods as disclosed in U.S. Pat. Nos. 5,210,015; 5,876,930 and 6,030,787 in which an oligonucleotide probe having reporter and quencher molecules is hybridized to a target polynucleotide. The probe is degraded by 5′→3′ exonuclease activity of a nucleic acid polymerase. A useful assay is available from AB Biosystems as the Taqman® assay.

[0066] Specific nucleotide variations such as SNPs and insertion/deletions can also be detected by labeled base extension methods as disclosed in U.S. Pat. Nos. 6,004,744; 6,013,431; 5,595,890; 5,762,876; and 5,945,283. These methods are based on primer extension and incorporation of detectable nucleoside triphosphates. The primer is designed to anneal to the sequence immediately adjacent to the variable nucleotide which can be can be detected after incorporation of as few as one labeled nucleoside triphosphate. U.S. Pat. No. 5,468,613 discloses allele specific oligonucleotide hybridizations where single or multiple nucleotide variations in nucleic acid sequence can be detected in nucleic acids by a process in which the sequence containing the nucleotide variation is amplified, spotted on a membrane and treated with a labeled sequence-specific oligonucleotide probe.

[0067] SNPs generally occur at greater frequency than other polymorphic markers and are spaced with a greater uniformity throughout a genome than other reported forms of polymorphism. The greater frequency and uniformity of SNPs means that there is greater probability that such a polymorphism will be found near or in a genetic locus of interest than would be the case for other polymorphisms. SNPs are located in protein-coding regions and noncoding regions of a genome. Some of these SNPs may result in defective or variant protein expression (e.g., as a result of mutations or defective splicing). Analysis (genotyping) of characterized SNPs can require only a plus/minus assay rather than a lengthy measurement, permitting easier automation.

[0068] Other methods for identifying and detecting SNPs include the direct or indirect sequencing of the site, the use of restriction enzymes (Botstein et al., Am. J. Hum. Genet. 32:314-331 (1980); and Konieczny and Ausubel, Plant J. 4:403-410 (1993)), enzymatic and chemical mismatch assays (Myers et al., Nature 313:495-498 (1985)), allele-specific PCR (Newton et al., Nucl. Acids Res. 17:2503-2516 (1989); and Wu et al., Proc. Natl. Acad. Sci. USA 86:2757-2760 (1989)), ligase chain reaction (Barany, Proc. Natl. Acad. Sci. USA 88:189-193 (1991)), single-strand conformation polymorphism analysis (Labrune et al., Am. J. Hum. Genet. 48: 1115-1120 (1991)), single base primer extension (Kuppuswamy et al., Proc. Natl. Acad. Sci. USA 88:1143-1147 (1991); and Goelet, U.S. Pat. Nos. 6,004,744 and 5,888,819 both of which are incorporated herein by reference), solid-phase ELISA-based oligonucleotide ligation assays (Nikiforov et al., Nucl. Acids Res. 22:4167-4175 (1994)), dideoxy fingerprinting (Sarkar et al., Genomics 13:441-443 (1992)), oligonucleotide fluorescence-quenching assays (Livak et al., PCR Methods Appl. 4:357-362 (1995)), 5′-nuclease allele-specific hybridization TaqMan™ assay (Livak et al., Nature Genet. 9:341-342 (1995)), template-directed dye-terminator incorporation (TDI) assay (Chen and Kwok, Nucl. Acids Res. 25:347-353 (1997)), allele-specific molecular beacon assay (Tyagi et al., Nature Biotech. 16: 49-53 (1998)), PinPoint assay (Haff and Smirnov, Genome Res. 7: 378-388 (1997)), dCAPS analysis (Neff et al., Plant J. 14:387-392 (1998)), pyrosequencing (Ronaghi et al, Analytical Biochemistry 267:65-71 (1999); Ronaghi et al PCT application WO 98/13523; and Nyren et al PCT application WO 98/28440), using mass spectrometry e.g., the Masscode™ system (Howbert et al WO 99/05319; Howber et al WO 97/27331), mass spectroscopy (U.S. Pat. No. 5,965,363, incorporated herein by reference), invasive cleavage of oligonucleotide probes (Lyamichev et al Nature Biotechnology 17:292-296), and using high density oligonucleotide arrays (Hacia et al Nature Genetics 22:164-167).

[0069] INDELs are identified by comparing sequence of Arabidopsis thaliana ecotypes Columbia and Landsberg erecta. Certain INDELs are believed to have resulted from insertion or excision of transposable elements. Thus, INDEL sequences can be used to identify candidate sequences for active transposons by comparing INDEL sequences to the sequence of known transposons. For instance, certain INDEL sequences of greater than 100 bp were found to exhibit similarity to the sequence of MuDR transposable element from maize.

[0070] Polymorphisms may also be detected using allele-specific oligonucleotides (ASO), which, can be for example, used in combination with hybridization based technology including southern, northern, and dot blot hybridizations, reverse dot blot hybridizations and hybridizations performed on microarray and related technology.

[0071] The stringency of hybridization for polymorphism detection is highly dependent upon a variety of factors, including length of the allele-specific oligonucleotide, sequence composition, degree of complementarity (i.e. presence or absence of base mismatches), concentration of salts and other factors such as formamide, and temperature. These factors are important both during the hybridization itself and during subsequent washes performed to remove target polynucleotide that is not specifically hybridized. In practice, the conditions of the final, most stringent wash are most critical. In addition, the amount of target polynucleotide that is able to hybridize to the allele-specific oligonucleotide is also governed by such factors as the concentration of both the ASO and the target polynucleotide, the presence and concentration of factors that act to “tie up” water molecules, so as to effectively concentrate the reagents (e.g., PEG, dextran, dextran sulfate, etc.), whether the nucleic acids are immobilized or in solution, and the duration of hybridization and washing steps.

[0072] Hybridizations are preferably performed below the melting temperature (Tₘ) of the ASO. The closer the hybridization and/or washing step is to the Tₘ, the higher the stringency. Tₘ for an oligonucleotide may be approximated, for example, according to the following formula: Tₘ=81.5+16.6×(log 10[Na+])+0.41*(% G+C)−675/n; where [Na+] is the molar salt concentration of Na+ or any other suitable cation and n=number of bases in the oligonucleotide. Other formulas for approximating Tₘ are available and are known to those of ordinary skill in the art.

[0073] Stringency is preferably adjusted so as to allow a given ASO to differentially hybridize to a target polynucleotide of the correct allele and a target polynucleotide of the incorrect allele. Preferably, there will be at least a two-fold differential between the signal produced by the ASO hybridizing to a target polynucleotide of the correct allele and the level of the signal produced by the ASO cross-hybridizing to a target polynucleotide of the incorrect allele (e.g., an ASO specific for a mutant allele cross-hybridizing to a wild-type allele). In more preferred embodiments of the present invention, there is at least a five-fold signal differential. In highly preferred embodiments of the present invention, there is at least an order of magnitude signal differential between the ASO hybridizing to a target polynucleotide of the correct allele and the level of the signal produced by the ASO cross-hybridizing to a target polynucleotide of the incorrect allele.

[0074] While certain methods for detecting polymorphisms are described herein, other detection methodologies may be utilized. For example, additional methodologies are known and set forth, in Birren et al., Genome Analysis, 4:135-186, A Laboratory Manual. Mapping Genomes, Cold Spring Harbor Laboratory Press, Cold Spring Harbor, N.Y. (1999); Maliga et al., Methods in Plant Molecular Biology. A Laboratory Course Manual, Cold Spring Harbor Laboratory Press, Cold Spring Harbor, N.Y. (1995); Paterson, Biotechnology Intelligence Unit: Genome Mapping in Plants, R. G. Landes Co., Georgetown, Tex., and Academic Press, San Diego, Calif. (1996); The Maize Handbook, Freeling and Walbot, eds., Springer-Verlag, New York, N.Y. (1994); Methods in Molecular Medicine Molecular Diagnosis of Genetic Diseases, Elles, ed., Humana Press, Totowa, N.J. (1996); Clark, ed., Plant Molecular Biology: A Laboratory Manual, Clark, ed., Springer-Verlag, Berlin, Germany (1997), all of which are herein incorporated by reference in their entirety.

[0075] Detection of one or more of the polymorphisms, preferably one or more of the characterized polymorphisms, may be carried out using a collection of nucleic acid markers.

[0076] Preferred aspects of this invention comprise collections of nucleic acid markers comprising nucleic acid molecules where the collections range in size from about 10 non-identical members or more, to at least about 100 or 200 or higher, more preferably at least about 300 or 350, most preferably at least 400 or 500 or higher, up to about 1,000, or 2000 or even higher, say about 4,000 or greater, or more non-identical members. High density collections of 5,000 or more polymorphism, e.g. at least 10,000 or even 15,000 polymorphisms may be useful for high throughput assays, e.g. with microarrays. As used herein a non-identical member is a member that differs in nucleic acid or amino acid sequence. For example, a non-identical nucleic acid molecule is a nucleic acid molecule that differs in nucleic acid sequence from the nucleic acid molecule to which it is being compared. For example a nucleic acid molecule having the sequence 5′ CCC 3′ is not identical—i.e. is non-identical—to a nucleic acid molecule having the sequence 5′ CCG 3′. In one limited aspect a collection may comprise all of the nucleic acid markers identified by this invention. Collections of nucleic acid markers can be located or organized in a variety of forms, e.g. on microarrays, in solutions, in bacterial clone libraries, etc. As used herein, an “organized” collection is a collection where the nucleic acid or amino acid sequence of a member of such a collection can be determined based on its physical location.

[0077] In order to simultaneously screen for multiple polymorphisms, the nucleic acid markers can be designed for simultaneous use known as multiplexing. Examples of design approaches for multiplexing are set forth in Cho et al., Nature Genetics 23:203-207 (1999); Wang et al., Science 280: 1077-1082 (1998), the entirety of which is herein incorporated by reference; Winzeler et al., Curr. Opin. Genet. Dev. 4: 602-608 (1997), the entirety of which is herein incorporated by reference. Examples of nucleic acid markers that have been optimized for multiplexing are the primers set forth in Table B. Multiplex parameters often require the selection of loci with similar amplification efficiencies, minimizing the concentration of the primers used, and an increased magnesium concentration (Cho et al., Nature Genetics 23:203-207 (1999)).

[0078] In a preferred embodiment, the polymorphism is present and screened for in a mapping population, e.g. a collection of plants capable of being used with markers such as polymorphic markers to map genetic position of traits. The choice of appropriate mapping population often depends on the type of marker systems employed (Tanksley et al., J. P. Gustafson and R. Appels (eds.). Plenum Press, New York, pp. 157-173 (1988), the entirety of which is herein incorporated by reference). Consideration must be given to the source of parents (adapted vs. exotic) used in the mapping population. Chromosome pairing and recombination rates can be severely disturbed (suppressed) in wide crosses (adapted×exotic) and generally yield greatly reduced linkage distances. Wide crosses will usually provide segregating populations with a relatively large number of polymorphisms when compared to progeny in a narrow cross (adapted×adapted).

[0079] An F₂ population is the first generation of selfing (self-pollinating) after the hybrid seed is produced. Usually a single F₁ plant is selfed to generate a population segregating for all the genes in Mendelian (1:2:1) pattern. Maximum genetic information is obtained from a completely classified F₂ population using a codominant marker system (Mather, Measurement of Linkage in Heredity: Methuen and Co., (1938), the entirety of which is herein incorporated by reference). In the case of dominant markers, progeny tests (e.g., F₃, BCF₂) are required to identify the heterozygotes, in order to classify the population. However, this procedure is often prohibitive because of the cost and time involved in progeny testing. Progeny testing of F₂ individuals is often used in map construction where phenotypes do not consistently reflect genotype (e.g. disease resistance) or where trait expression is controlled by a QTL. Segregation data from progeny test populations e.g. F₃ or BCF₂) can be used in map construction. Marker-assisted selection can then be applied to cross progeny based on marker-trait map associations (F₂, F₃), where linkage groups have not been completely disassociated by recombination events (i.e., maximum disequilibrium).

[0080] Recombinant inbred lines (RIL) (genetically related lines; usually >F₅, developed from continuously selfing F₂ lines towards homozygosity) can be used as a mapping population. Information obtained from dominant markers can be maximized by using RIL because all loci are homozygous or nearly so. Under conditions of tight linkage (i.e., about <10% recombination), dominant and co-dominant markers evaluated in RIL populations provide more information per individual than either marker type in backcross populations (Reiter. Proc. Natl. Acad. Sci. (U.S.A.) 89:1477-1481 (1992), the entirety of which is herein incorporated by reference). However, as the distance between markers becomes larger (i.e., loci become more independent), the information in RIL populations decreases dramatically when compared to codominant markers.

[0081] Backcross populations (e.g., generated from a cross between a successful variety (recurrent parent) and another variety (donor parent) carrying a trait not present in the former) can be utilized as a mapping population. A series of backcrosses to the recurrent parent can be made to recover most of its desirable traits. Thus a population is created consisting of individuals nearly like the recurrent parent but each individual carries varying amounts or mosaic of genomic regions from the donor parent. Backcross populations can be useful for mapping dominant markers if all loci in the recurrent parent are homozygous and the donor and recurrent parent have contrasting polymorphic marker alleles (Reiter et al., Proc. Natl. Acad. Sci. (U.S.A.) 89:1477-1481 (1992), the entirety of which is herein incorporated by reference). Information obtained from backcross populations using either codominant or dominant markers is less than that obtained from F₂ populations because one, rather than two, recombinant gamete is sampled per plant. Backcross populations, however, are more informative (at low marker saturation) when compared to RILs as the distance between linked loci increases in RIL populations (i.e. about 0.15% recombination). Increased recombination can be beneficial for resolution of tight linkages, but may be undesirable in the construction of maps with low marker saturation.

[0082] Near-isogenic lines (NIL) (created by many backcrosses to produce a collection of individuals that is nearly identical in genetic composition except for the trait or genomic region under interrogation) can be used as a mapping population. In mapping with NILs, only a portion of the polymorphic loci is expected to map to a selected region.

[0083] Bulk segregant analysis (BSA) is a method developed for the rapid identification of linkage between markers and traits of interest (Michelmore et al., Proc. Natl. Acad. Sci. U.S.A. 88:9828-9832 (1991), the entirety of which is herein incorporated by reference). In BSA, two bulked DNA samples are drawn from a segregating population originating from a single cross. These bulks contain individuals that are identical for a particular trait (resistant or susceptible to particular disease) or genomic region but arbitrary at unlinked regions (i.e. heterozygous). Regions unlinked to the target region will not differ between the bulked samples of many individuals in BSA.

[0084] While any appropriate mapping population may be used in conjunction with this invention, in a preferred embodiment the mapping population is an Arabidopsis population, where the population was created, at least in part, by crossing two different Arabidopsis ecotypes, where one of the ecotypes has a phenotype of interest. In an even more preferred embodiment the ecotypes are Arabidopsi, thaliana, Columbia and Arabidopsis thaliana, Landsberg erecta. In another preferred embodiment, the mapping population is an Arabidopsis population, where the population was created, at least in part, by crossing two different Arabidopsis ecotypes, where one of the ecotypes has a phenotype of interest, propagating and self pollinating seeds from such a cross and selecting a collection of plants with the phenotype of interest to be the mapping population.

[0085] Classical mapping studies often utilize easily observable, visible traits instead of molecular markers. These visible traits are also known as naked eye polymorphisms. These traits can be morphological like plant height, fruit size, shape and color or physiological like disease response, photoperiod sensitivity and crop maturity. Visible traits are useful and are still in use because they represent actual phenotypes and are easy to score without any specialized lab equipment. By contrast, many nucleic acid markers are arbitrary loci for use in linkage mapping and often not associated with specific plant phenotypes (Young, Encyclopedia of Agricultural Science, Vol. 3, pp. 275-282 (1994), the entirety of which is herein incorporated by reference). Many morphological markers cause such large effects on phenotype that they are undesirable in breeding programs. Many other visible traits have the disadvantage of being developmentally regulated (i.e., expressed only at certain stages; or in specific tissue and organs). Oftentimes, visible traits mask the effects of linked minor genes making it nearly impossible to identify desirable linkages for selection (Tanksley et al., Biotech. 7:257-264 (1989), the entirety of which is herein incorporated by reference).

[0086] Although a number of important agronomic characteristics are controlled by loci having major effects on phenotype, many economically important traits, such as yield and some forms of disease resistance, are quantitative in nature. This type of phenotypic variation in a trait is typically characterized by continuous, normal distribution of phenotypic values in a particular population (polygenic traits) (Beckmann and Soller, Oxford Surveys of Plant Molecular Biology, Miffen. (ed.), Vol. 3, Oxford University Press, UK., pp. 196-250 (1986), the entirety of which is herein incorporated by reference). Loci contributing to such genetic variation are often termed minor genes, as opposed to major genes with large effects that follow a Mendelian pattern of inheritance. Polygenic traits are also predicted to follow a Mendelian type of inheritance, however the contribution of each locus is expressed as an increase or decrease in the final trait value. The nucleic acid markers of the present invention can be used to identify and isolate nucleic acid regions or molecules associated with desired polygenic or single gene traits.

[0087] In one embodiment, the nucleic acid markers of the present invention are used to isolate or identify an allele of a quantitative trait locus or Mendelian locus.

[0088] Nucleic acid markers of the present invention capable of detecting one or more of the polymorphisms may be employed in genetic or physical studies using linkage analysis. Mapping marker genetic locations is based on the observation that two markers located near each other on the same chromosome will tend to be passed together from parent to offspring. During gamete production, DNA strands occasionally break and rejoin in different places on the same chromosome or on the homologous chromosome. The closer the markers are to each other, the more tightly linked and the less likely a recombination event will fall between and separate them. Recombination frequency thus provides an estimate of the distance between two markers.

[0089] Linkage analysis is based on the level at which markers and genes are co-inherited (Rothwell, Understanding Genetics. 4^{th} Ed. Oxford University Press, New York, p. 703 (1988), the entirety of which is herein incorporated by reference). Statistical tests like chi-square analysis can be used to test the randomness of segregation or linkage (Kochert, The Rockefeller Foundation International Program on Rice Biotechnology, University of Georgia Athens, Ga., pp. 1-14 (1989), the entirety of which is herein incorporated by reference). In linkage mapping, the proportion of recombinant individuals out of the total mapping population provides the information for determining the genetic distance between the loci (Young, Encyclopedia of Agricultural Science, Vol. 3, pp. 275-282 (1994), the entirety of which is herein incorporated by reference). Any statistical analysis that establishes linkage may be used. An example of a suitable linkage approach is Intermap as set forth in Cho et al., Nature Genetics 23: 203-207 (1999). Example 6 sets forth another exemplary linkage approach.

[0090] In segregating populations, target genes have been reported to have been placed within an interval of 5-10 cM with a high degree of certainty (Tanksley et al., Trends in Genetics 11(2):63-68 (1995), the entirety of which is herein incorporated by reference). The markers defining this interval are used to screen a larger segregating population to identify individuals derived from one or more gametes containing a crossover in the given interval. Such individuals are useful in orienting other markers closer to the target gene. Once identified, these individuals can be analyzed in relation to all molecular markers within the region to identify those closest to the target.

[0091] Markers of the present invention can be employed to locate genes. The genetic linkage of additional marker molecules can be established by a genetic mapping model such as, without limitation, the flanking marker model reported by Lander and Botstein, Genetics 121:185-199 (1989), the entirety of which is herein incorporated by reference, and the interval mapping, based on maximum likelihood methods described by Lander and Botstein, Genetics 121:185-199 (1989), the entirety of which is herein incorporated by reference and implemented in the software package MAPMAKER/QTL (Lincoln and Lander, Mapping Genes Controlling Quantitative Traits Using MAPMAKER/QTL, Whitehead Institute for Biomedical Research, Massachusetts, (1990), the entirety of which is herein incorporated by reference). Additional software includes Qgene, Version 2.23 (Department of Plant Breeding and Biometry, 266 Emerson Hall, Cornell University, Ithaca, N.Y. (1996), the manual of which is herein incorporated by reference in its entirety).

[0092] The LOD score essentially indicates how much more likely the data are to have arisen assuming the presence of an allele than in its absence. The LOD threshold value for avoiding a false positive with a given confidence, say 95%, depends on the number of markers and the length of the genome. Graphs indicating LOD thresholds are set forth in Lander and Botstein, Genetics 121:185-199 (1989), the entirety of which is herein incorporated by reference and further described by Arús and Moreno-González, Plant Breeding, Hayward, Bosemark, Romagosa (eds.) Chapman & Hall, London, pp. 314-331 (1993), the entirety of which is herein incorporated by reference.

[0093] In a preferred embodiment of the present invention the nucleic acid marker exhibits a LOD score of greater than 2.0, more preferably 2.5, even more preferably greater than 3.0 or 4.0 with the trait or phenotype of interest.

[0094] Additional models can be used. Many modifications and alternative approaches to interval mapping have been reported, including the use of non-parametric methods (Kruglyak and Lander, Genetics, 139:1421-1428 (1995), the entirety of which is herein incorporated by reference). Multiple regression methods or models can be also used, in which the trait is regressed on a large number of markers (Jansen, Biometrics in Plant Breed, van Oijen, Jansen (eds.) Proceedings of the Ninth Meeting of the Eucarpia Section Biometrics in Plant Breeding, The Netherlands, pp. 116-124 (1994); Weber and Wricke, Advances in Plant Breeding, Blackwell, Berlin, 16 (1994), the entirety of which is herein incorporated by reference). Procedures combining interval mapping with regression analysis, whereby the phenotype is regressed onto a single putative QTL at a given interval, and at the same time onto a number of polymorphisms that serve as ‘cofactors,’ have been reported by Jansen and Stam, Genetics, 136:1447-1455 (1994), the entirety of which is herein incorporated by reference and Zeng, Genetics, 136:1457-1468 (1994), the entirety of which is herein incorporated by reference. Generally, the use of cofactors reduces the bias and sampling error of the estimated QTL positions (Utz and Melchinger, Biometrics in Plant Breeding, van Oijen, Jansen (eds.) Proceedings of the Ninth Meeting of the Eucarpia Section Biometrics in Plant Breeding, The Netherlands, pp. 195-204 (1994)), thereby improving the precision and efficiency of QTL mapping (Zeng, Genetics, 136:1457-1468 (1994), the entirety of which is herein incorporated by reference). These models can be extended to multi-environment experiments to analyze genotype-environment interactions (Jansen et al., Theo. Appl. Genet. 91:33-37 (1995), the entirety of which is herein incorporated by reference).

[0095] The nucleic acid markers of the present invention may be used to isolate an allele, a region of genomic DNA associated with a phenotype, etc. Once the genomic region associated with the phenotype of interest is defined relative to at least one nucleic acid marker, preferably at least two nucleic acid markers capable of detecting different polymorphisms, the genomic region associated with the phenotype may be further characterized. One approach is to select additional nucleic acid markers from the genomic region associated with the trait and localize the genomic region associated with the phenotype to a smaller genomic region by a technique such as fine mapping.

[0096] For example, in a preferred embodiment a method for identifying or isolating a genomic region associated with a phenotypic trait that comprises (A) screening a mapping population of Arabidopsis plants to determine the linkage of the phenotypic trait with a first collection of polymorphisms, wherein the first collection of polymorphisms is distributed throughout the genome of the mapping population of Arabidopsis plants at an average density of more than one polymorphism per about 500 kb-100 kb; (B) calculating the linkage of each of the first collection of polymorphisms to the phenotypic trait; (C) identifying a genomic region most closely associated with the phenotypic trait; (D) selecting a second collection of polymorphisms from the genomic region; and (E) screening the mapping population of Arabidopsis plants to determine the linkage of the phenotypic trait with the second collection of polymorphisms from the genomic region, wherein the second collection of polymorphisms have an average density of more than one polymorphism per about 50 kb-1 kb.

[0097] In an embodiment of the present invention, for a fine mapping step of the present invention the collection of marker nucleic acids is capable of detecting a characterized polymorphism at a density of greater than one polymorphism per 50 kb, more preferably at a density greater than one polymorphism per 25 kb, even more preferably at a density greater than one polymorphism per 10 kb or 5 kb. It is understood, that the fine mapping using such a collection of markers may be carried out, for example, in a single assay or simultaneously.

[0098] Once the genomic region associated with the phenotype is identified, the genomic region may be isolated. Alternatively, or in conjunction, such a region may be further defined or characterized. Many approaches are known in the art and may be undertaken (Sambrook et al., Molecular Cloning 1: A Laboratory Manual, 2d ed., Ford et al., eds., Cold Spring Harbor Laboratory Press, Cold Spring Harbor, N.Y. (1989); Sambrook et al., Molecular Cloning 2: A Laboratory Manual, 2d ed., Ford et al., eds., Cold Spring Harbor Laboratory Press, Cold Spring Harbor, N.Y. (1989); Sambrook et al., Molecular Cloning 3: A Laboratory Manual, 2d ed., Ford et al., eds., Cold Spring Harbor Laboratory Press, Cold Spring Harbor, N.Y. (1989); Maliga et al., Methods in Plant Molecular Biology: A Laboratory Course Manual, Cold Spring Harbor Laboratory Press, Cold Spring Harbor, N.Y. (1995); and Birren et al., Genome Analysis: A Laboratory Manual. Volume 2: Detecting Genes, Cold Spring Harbor Laboratory Press, Cold Spring Harbor, N.Y. (1998), all of which are herein incorporated by reference in their entirety). For example, once identified, the sequence of the genomic region associated with the phenotype may be determined and subjected to bioinformatic analysis (Coulson, Trends in Biotechnology 12:76-80 (1994); Birren et al., Genome Analysis 1, Cold Spring Harbor Laboratory Press, Cold Spring Harbor, N.Y. 543-559 (1997); Huang, et al., Genomics 46:37-45 (1997), all of which are herein incorporated by reference in their entirety). Such bioinformatic approaches can provide, for example, information on the location of putative open reading frames, promoters, and a variety of nucleotide motifs. Moreover, also using bioinformatic approaches, the nucleic acid sequence of the genomic region can be compared with other nucleic acid sequences. Such comparisons can facilitate the isolation of Arabidopsis homologs to known genes or genomic regions. Examples of such bioinformation tools are BLAST, GeneScan, GeneMark and AAT.

[0099] Other methods can be utilized to further isolate, define, or characterize the genomic region associated with the phenotype. The expression profiles of mRNA and proteins derived from genes that are located within the genetic region associated with the phenotype can be analyzed. Such analysis, will in certain circumstances, allow the gene or genes associated with the phenotype to be determined.

[0100] A genomic region or sub-region thereof may be isolated using any of the many techniques in the art. In addition to those procedures and methods set forth herein, practitioners are familiar with the standard resource materials which describe specific conditions and procedures for the construction, manipulation and isolation of macromolecules (e.g., DNA molecules, plasmids, etc.), generation of recombinant organisms and the screening and isolating of clones, (see, for example, Sambrook et al., Molecular Cloning: A Laboratory Manual, Cold Spring Harbor Press (1989); Mailga et al., Methods in Plant Molecular Biology, Cold Spring Harbor Press (1995); Birren et al., Genome Analysis Analyzing DNA, 1, Cold Spring Harbor, N.Y., all of which are herein incorporated by reference in their entirety).

[0101] The biological function of a genomic region or subregion thereof such as a gene or open reading frame, can be further investigated using a mutant complementation approach or other reverse genetics approach. For example, a gene or genes identified within the genomic region associated with the phenotype may be isolated from the organism exhibiting the non-mutant phenotype (often referred to as the wild type). Such a gene or genes may be introduced into an appropriate organism that lacks the phenotype (often referred to as mutant) either by crosses or by molecular genetic techniques such as transformation or transfection. Organisms having the introduced genetic material may be screened to determine whether the introduced gene or genes complements, i.e. restores the phenotype of the mutant (Pan, FEBS Lett. 459(3): 405-410 (1999); Kerckhoffs et al., Mol. Gen. Genet. 6: 901-907 (1999); Lizotte et al., Gene 234(1): 35-44 (1999); Berna et al., Genetics 152: 729-742 (1999); Liu et al., Proc. Natl. Acad. Sci. (USA) 96(11): 6535-6540 (1999); Pia et al., Plant Physiol. 119(4): 1527-1534 (1999); Loulergue et al., Gene 225(1-2): 47-57 (1998); Jouannic et al., Eur. J. Bioche. 258(2): 402-410 (1998), all of which are herein incorporated by reference in their entirety). While gene or genes etc. may be introduced into any organism, preferred organisms are plants, yeasts, and bacteria particularly E. coli. In a more preferred embodiment the organism is Arabidopsis.

[0102] The nucleic acid markers of the present invention may be used for chromosomal walking. Such walking, in conjunction with linkage analysis, can enable the isolation of genes. Once a nucleic acid marker is linked to a region of interest, the chromosome walking technique can be used to find the genes via overlapping clones. For chromosome walking, random molecular markers or established molecular linkage maps are used to conduct a search to localize the gene adjacent to one or more markers capable of detecting a polymorphism. A chromosome walk (Bukanov and Berg, Mo. Microbiol. 11:509-523 (1994), the entirety of which is herein incorporated by reference; Birkenbihl and Vielmetter, Nucleic Acids Res. 17:5057-5069 (1989), the entirety of which is herein incorporated by reference; Wenzel and Herrmann, Nucleic Acids Res. 16:8323-8336, (1988), the entirety of which is herein incorporated by reference) is then initiated from the closest linked marker. Starting from the selected clones, labeled probes specific for the ends of the insert DNA are synthesized and used as probes in hybridizations against a representative library. Clones hybridizing with one of the probes are picked and serve as templates for the synthesis of new probes; by subsequent analysis, contigs are produced.

[0103] The degree of overlap of the hybridizing clones used to produce a contig can be determined by comparative restriction analysis. Comparative restriction analysis can be carried out in different ways all of which exploit the same principle; two clones of a library are very likely to overlap if they contain a limited number of restriction sites for one or more restriction endonucleases located at the same distance from each other. The most frequently used procedures are, fingerprinting (Coulson et al., Proc. Natl. Acad. Sci. (U.S.A.) 83:7821-7821, (1986), the entirety of which is herein incorporated by reference; Knott et al., Nucleic Acids Res. 16:2601-2612 (1988), the entirety of which is herein incorporated by reference; Eiglmeier et al. Mol. Microbiol. 7:197-206 (1993), the entirety of which is herein incorporated by reference), restriction fragment mapping (Smith and Birnstiel, Nucleic Acids Res. 3:2387-2398 (1976), the entirety of which is herein incorporated by reference), and the “landmarking” technique (Charlebois et al. J. Mol. Biol. 222:509-524 (1991), the entirety of which is herein incorporated by reference).

[0104] It is understood that the nucleic acid molecules of the present invention may in one embodiment be used for chromosomal walking. In a preferred embodiment, nucleic acid molecules of the present invention may in one embodiment be used in the chromosomal walking of Brassicaceae, particularly Arabidopsis thaliana.

[0105] Nucleic acid markers of the present invention can be used in comparative mapping and comparative chromosomal walking. Comparative mapping within families provides a method to assess the degree of sequence conservation, gene order, ploidy of species, ancestral relationships and the rates at which individual genomes are evolving. It also provides a method to isolate genetic regions or sub-aspects thereof such as genes. Comparative mapping has been carried out by utilizing molecular markers from one species with another species. As in genetic mapping, nucleic acid markers are needed but instead of direct hybridization to mapping filters, the markers can also be used to select large insert clones from a total genomic DNA library of a related species. The selected clones can then be used to physically map the region in the target species. The advantage of this method for comparative mapping is that no mapping population or linkage map of the target species is needed and the clones may also be used in other closely related species. By comparing the results obtained by genetic mapping in model plants, with those from other species, similarities of genomic structure among plants species can be established. Comparative mapping using nucleic acid markers of the present invention permits the identification and/or isolation of non-Arabidopsis syntenic regions and homolog genes with such regions.

[0106] It is understood that nucleic acid markers of the present invention may in another embodiment be used in comparative mapping. In a preferred embodiment the markers of the present invention may be used in the comparative mapping of non-Arabidopsis plant species, including but not limited to alfalfa, barley, Brassica, broccoli, cabbage, citrus, cotton, garlic, oat, oilseed rape, onion, canola, flax, an ornamental plant, maize, pea, peanut, pepper, potato, rice, rye, sorghum, soybean, strawberry, sugarcane, sugarbeet, tomato, wheat, poplar, pine, fir, eucalyptus, apple, lettuce, lentils, grape, banana, tea, turf grasses, sunflower, oil palm, Phaseolus etc. Particularly preferred non-Arabidopsis plants to utilize for comparative mapping are the Brassicaceae, e.g. oilseed rape.

[0107] Agents of the present invention include nucleic acid molecules and more specifically include nucleic acid markers capable of detecting polymorphisms. In a preferred embodiment the nucleic acid molecules of the present invention are derived from Arabidopsis and in an even more preferred embodiment the nucleic acid molecules of the present invention are derived from Arabidopsis thaliana, Landsberg erecta or Arabidopsis thaliana, Columbia.

[0108] In another preferred embodiment, the nucleic acid molecules of the present invention include those isolated utilizing the nucleic acid markers of the present invention. The present invention also encompasses the use of these and other nucleic acids of the present invention in recombinant constructs. Using methods known to those of ordinary skill in the art, such molecules can be introduced into a host cell or organism of choice. Potential host cells include both prokaryotic and eukaryotic cells. A host cell may be unicellular or found in a multicellular differentiated or undifferentiated organism depending upon the intended use. It is understood that useful exogenous genetic material may be introduced into any cell or organism such as a plant cell, plant, mammalian cell, mammal, fish cell, fish, bird cell, bird or bacterial cell.

[0109] In a preferred embodiment the exogenous DNA is introduced into a plant in a suitable construct. Preferred plants are selected from the group consisting of: alfalfa, Arabidopsis, barley, Brassica, broccoli, cabbage, citrus, cotton, garlic, oat, oilseed rape, onion, canola, flax, an ornamental plant, peanut, pepper, potato, rice, rye, sorghum, strawberry, sugarcane, sugarbeet, tomato, wheat, poplar, pine, fir, eucalyptus, apple, lettuce, lentils, grape, banana, tea, turf grasses, sunflower, soybean, and Phaseolus. A particularly preferred group of plants is rice, cotton, wheat, maize and soybean.

[0110] As used herein, an agent, be it a naturally occurring molecule or otherwise may be “substantially purified,” if, referring to a molecule separated from substantially all other molecules normally associated with it in its native state. More preferably a substantially purified molecule is the predominant species present in a preparation. A substantially purified molecule may be greater than 60% free, preferably 75% free, more preferably 90% free, and most preferably 95% free from the other molecules (exclusive of solvent) present in the natural mixture. The term “substantially purified” is not intended to encompass molecules present in their native state.

[0111] The agents of the present invention will preferably be “biologically active” with respect to either a structural attribute, such as the capacity of a nucleic acid to hybridize to another nucleic acid molecule, or the ability of a protein to be bound by an antibody (or to compete with another molecule for such binding). Alternatively, such an attribute may be catalytic, and thus involve the capacity of the agent to mediate a chemical reaction or response.

[0112] The agents of the present invention may can also be recombinant. As used herein, the term recombinant describes (a) nucleic acid molecules that are constructed or modified outside of cells and that can replicate or function in a living cell, (b) molecules that result from the transcription, replication or translation of recombinant nucleic acid molecules, or (c) organisms that contain recombinant nucleic acid molecules or are modified using recombinant nucleic acid molecules.

[0113] It is understood that the agents of the present invention may be labeled with reagents that facilitate detection of the agent (e.g. fluorescent labels, Prober et al., Science 238:336-340 (1987); Albarella et al., EP 144914, chemical labels, Sheldon et al., U.S. Pat. No. 4,582,789; Albarella et al., U.S. Pat. No. 4,563,417, modified bases, Miyoshi et al., EP 119448, all of which are herein incorporated by reference in their entirety).

[0114] Fragment nucleic acid molecules may encode significant portion(s) of, or indeed most of, these nucleic acid molecules. For example, a fragment nucleic acid molecule can encode an Arabidopsis protein or fragment thereof. Alternatively, the fragments may comprise smaller oligonucleotides. Exemplary fragment sizes include fragments having from about 15 to about 400 nucleotide residues and more preferably, about 15 to about 30 nucleotide residues, or about 50 to about 100 nucleotide residues, or about 100 to about 200 nucleotide residues, or about 200 to about 400 nucleotide residues, or about 275 to about 350 nucleotide residues.

[0115] Nucleic acid molecules or fragments thereof of the present invention are capable of specifically hybridizing to other nucleic acid molecules under certain circumstances. As used herein, two nucleic acid molecules are said to be capable of specifically hybridizing to one another if the two molecules are capable of forming an anti-parallel, double-stranded nucleic acid structure. A nucleic acid molecule is said to be the “complement” of another nucleic acid molecule if they exhibit complete complementarity. As used herein, molecules are said to exhibit “complete complementarity” when every nucleotide of one of the molecules is complementary to a nucleotide of the other. Two molecules are said to be “minimally complementary” if they can hybridize to one another with sufficient stability to permit them to remain annealed to one another under at least conventional “low-stringency” conditions. Similarly, the molecules are said to be “complementary” if they can hybridize to one another with sufficient stability to permit them to remain annealed to one another under conventional “high-stringency” conditions. Conventional stringency conditions are described by Sambrook et al., Molecular Cloning, A Laboratory Manual, 2nd Ed., Cold Spring Harbor Press, Cold Spring Harbor, N.Y. (1989), and by Haymes et al. Nucleic Acid Hybridization, A Practical Approach, IRL Press, Washington, D.C. (1985), the entirety of which is herein incorporated by reference. Departures from complete complementarity are therefore permissible, as long as such departures do not completely preclude the capacity of the molecules to form a double-stranded structure. Thus, in order for a nucleic acid molecule to serve as a primer or probe it need only be sufficiently complementary in sequence to be able to form a stable double-stranded structure under the particular solvent and salt concentrations employed.

[0116] Appropriate stringency conditions which promote DNA hybridization, for example, 6.0× sodium chloride/sodium citrate (SSC) at about 45° C., followed by a wash of 2.0×SSC at 50° C., are known to those skilled in the art or can be found in Current Protocols in Molecular Biology, John Wiley & Sons, N.Y. (1989), 6.3.1-6.3.6, the entirety of which is herein incorporated by reference. For example, the salt concentration in the wash step can be selected from a low stringency of about 2.0×SSC at 50° C. to a high stringency of about 0.2×SSC at 50° C. In addition, the temperature in the wash step can be increased from low stringency conditions at room temperature, about 22° C., to high stringency conditions at about 65° C. Both temperature and salt may be varied, or either the temperature or the salt concentration may be held constant while the other variable is changed.

[0117] Hybridizations involving at least one oligonucleotide can necessitate changes from the above hybridization conditions. Highly stringent conditions are often selected to be equal to the Tₘ point for a particular probe. Sometimes the term “T_{d}” is used to define the temperature at which at least half of the probe dissociates from a perfectly matched target nucleic acid. In any case, a variety of estimation techniques for estimating the Tₘ or T_{d} are available, and generally described in Tijssen, id. Typically, G-C base pairs in a duplex are estimated to contribute about 3° C. to the Tₘ, while A-T base pairs are estimated to contribute about 2° C., up to a theoretical maximum of about 80-100° C. However, more sophisticated models of T_{M} and T_{d} are available and appropriate in which G-C stacking interactions, solvent effects, the desired assay temperature and the like are taken into account. For example, PCR primers can be designed to have a dissociation temperature (T_{d}) of approximately 60° C., using the formula: T_{d}=(((((3×#GC)+(2×#AT))×37)−562)/#bp)−5; where #GC, #AT, and #bp are the number of guanine-cytosine base pairs, the number of adenine-thymine base pairs, and the number of total base pairs, respectively, involved in the annealing of the primer to the template DNA.

[0118] Nucleic acid markers of the present invention can be used to characterize transformants or germplasm, as a genetic diagnostic test for plant breeding or to identify individuals or varieties (Soller and Beckmann, Theor. Appl. Genet. (67):25-33 (1983), the entirety of which is herein incorporated by reference). Such markers can also be used to obtain information about: (1) the number, effect, and chromosomal location of each gene affecting a trait; (2) effects of multiple copies of individual genes (gene dosage); (3) interaction between/among genes controlling a trait (epistasis); (4) whether individual genes affect more than one trait (pleiotropy); and (5) stability of gene function across environments (Gx E interactions).

[0119] In a preferred embodiment, the nucleic acid markers of the present invention may be used in marker assisted introgression of traits into plants. Marker assisted introgression involves the transfer of a chromosome region defined by one or more markers from one germplasm to a second germplasm. An initial step in such a process is the localization of the trait or region by mapping. One use of marker assisted introgression of genomic regions is in the generation of near isogenic lines (NILs) or recombinant near isogenic lines (RILs). In one aspect of the present invention, the nucleic acid markers are used to generate Arabidopsis NILs or RILs. As used herein, introgression is the process of transferring a genetic region from one genetic background to a second but non-identical genetic background.

[0120] Additional markers, such as AFLP markers, RFLP markers, RAPD markers, SNPs, phenotypic markers, isozyme markers can be utilized in combination with or separately from the markers of the invention (Walton, Seed World 22-29 (1993), the entirety of which is herein incorporated by reference; Burow and Blake, Molecular Dissection of Complex Traits, 13-29, Eds. Paterson, CRC Press, New York (1988), the entirety of which is herein incorporated by reference). Examples of additional markers are set forth in Cho et al., Nature Genetics 23: 203-205 (1999).

[0121] DNA markers can be developed from nucleic acid molecules using restriction endonucleases, the PCR and/or DNA sequence information. RFLP can result from single base changes or insertions/deletions. RFLP are highly abundant in plant genomes, have a medium level of polymorphism and are developed by a combination of restriction endonuclease digestion and Southern blotting hybridization. CAPS are similarly developed from restriction nuclease digestion but only of specific PCR products. CAPS are also codominant, have a medium level of polymorphism and are highly abundant in the genome. The CAPS result from single base changes and insertions/deletions. RAPDs are developed from DNA amplification with random primers and result from single base changes and insertions/deletions in plant genomes. RAPDs with a medium level of polymorphisms are highly abundant. AFLP markers require using the PCR on a subset of restriction fragments from extended adapter primers. AFLPs are both dominant and codominant are highly abundant in genomes and exhibit a medium level of polymorphism. SSRs require DNA sequence information. SSRs result from repeat length changes, are highly polymorphic, and do not exhibit as high a degree of abundance in the genome as CAPS, AFLPs and RAPDs. SNPs also require DNA sequence information. SNPs result from single base substitutions. They are highly abundant and exhibit a medium of polymorphism (Rafalski et al., In: Nonmammalian Genomic Analysis, ed. Birren and Lai, Academic Press, San Diego, Calif., pp. 75-134 (1996), the entirety of which is herein incorporated by reference).

### Computer Readable Media

[0122] A polymorphism or nucleic acid molecule of the present invention can be “provided” in a variety of mediums to facilitate use. Moreover, the nucleic acid markers and other nucleic acid molecules of the present invention may also be so presented.

[0123] In one embodiment, a polymorphism may be presented in a manner that sets forth 1, more preferably 2, 3, 4, 5, 6, or 7 of the following features alone or in combination with other features: (1) type of polymorphism (e.g. SNP, insertion, deletion etc.); (2) physical location of the polymorphism on a chromosome; (3) nucleotide sequence variation associated with one or more of the alleles; (4) nucleotide sequences of nucleic acid marker molecules capable of detecting the polymorphism; (5) physical location of the polymorphism relative to a piece of isolated DNA (e.g., BAC); (6) methodology for detecting the polymorphism; (7) physical distance from that polymorphism to another polymorphism; and (8) genetic linkage with a phenotype or other polymorphism.

[0124] Such a medium can also provide a subset thereof in a form that allows a skilled artisan to examine these features.

[0125] In one application of this embodiment, a polymorphism and associated features of the present invention can be recorded on computer readable media. In another embodiment, a nucleic acid sequence of the present invention can be recorded on computer readable media alone or in combination with a polymorphisms and associated features. As used herein, “computer readable media” refers to any medium that can be read or accessed by a computer, either directly or indirectly through a network. Such media include, but are not limited to: magnetic storage media, such as disks or magnetic tape; optical storage media such as optical disks; electrical storage media such as read-only memory (ROM) or Random Access Memory (RAM); and hybrids of these categories such as magnetic/optical storage media. A skilled artisan can readily appreciate how any of the known computer readable mediums can be used to create a manufacture comprising computer readable medium having recorded thereon a nucleotide sequence of the present invention.

[0126] As used herein, “recorded” refers to a process for storing information on computer readable medium. A skilled artisan can readily adopt any of the known methods for recording information on computer readable medium to generate media comprising the information of the present invention. A variety of data storage structures are available to a skilled artisan for creating a computer readable medium having recorded thereon a nucleotide sequence of the present invention. The choice of the data storage structure will generally be based on the means chosen to access the stored information. In addition, a variety of application programs and formats can be used to store the information of the present invention on computer readable medium. The sequence information can be represented, for example, in a word processing file, formatted in commercially-available software such as WordPerfect and Microsoft Word, in a network-accessible format, such as an HTML file or web page, an ASCII file, or stored in a database application, such as DB2, Excel, Sybase, Oracle, or the like. A skilled artisan can readily adapt any number of data file formats (e.g., text file or database) or data structures in order to obtain computer readable medium having recorded thereon the information of the present invention.

[0127] A skilled artisan is provided with access to the information for a variety of purposes. Publicly available computer software allows a skilled artisan to access, for example, sequence information provided in a computer readable medium.

[0128] The present invention further provides systems, particularly computer-based systems, which contain the information described herein. As used herein, “a computer-based system” refers to the hardware, software, and data storage used to analyze the information including the nucleic acid sequence information of the present invention. The minimum hardware of the computer-based systems of the present invention comprises a central processing unit (CPU), input/output apparatus, and data storage. A skilled artisan can readily appreciate that any one of the currently available computer-based systems are suitable for use in the present invention.

[0129] As indicated above, the computer-based systems of the present invention comprise a data storage having stored therein a polymorphism and any associated information of the present invention and the necessary hardware and software for supporting and implementing a search. As used herein, “data storage” refers to memory that can store information of the present invention, or a memory access apparatus (hardware and/or software) that can access manufactures having recorded thereon the information of the present invention.

[0130] Having now generally described the invention, the same will be more readily understood through reference to the following examples which are provided by way of illustration, and are not intended to be limiting of the present invention, unless specified.

### EXAMPLE 1

[0131] Assembled Arabidopsis thaliana, Landsberg erecta nucleic acid sequence is generated essentially as set forth below:

[0132] DNA Preparation

[0133] DNA from Arabidopsis thaliana, Landsberg erecta seedlings is prepared by a CTAB genomic DNA isolation protocol as described by Dean et al. Plant J 2:69-81 (1992) and modified by Dubois et al. Plant J. 13:141-151 (1998), the entirety of which is herein incorporated by reference.

[0134] A solution of DNA to be sheared is prepared in a 1.5 ml microcentrifuge tube by mixing 15 μg of DNA, 6 μl of 10× mung bean (MB) buffer (10× MB buffer=300 mM NaOAc, pH 5.0, 500 mM NaCl, 10 mM ZnCl₂, 50% glycerol), and water to a final volume of 60 μl. The DNA solution is kept on ice prior to sonication. For sonication, a cup horn probe chilled with ice water for 1 hour prior to sonication is used. The sonicator (Ultrasonic Liquid Processor XL2020, Misonix Inc.) is pulsed for approximately 10 seconds on full power prior to use. DNA samples are sonicated twice for 6 seconds each at 60% power. Four sample tubes may be processed at once in a multi-tube rack which is positioned 1 to 3 mm above the opening in the probe. The DNA is returned to ice and a 1 μl sample is analyzed by electrophoresis on a 0.8% agarose gel in 0.5×TBE gel, run at 60 volts for 30 minutes. Sonication may be repeated if necessary.

[0135] A 0.26 μl aliquot of mung bean nuclease (150,000 u/ml) is added to sheared DNA and the sample is incubated at 30° C. for 10 minutes. To stop the digestion, 20 μl of 1 M NaCl, 140 μl dd H₂O, and 200 ml of phenol:chloroform are added to the sample which is then vortexed and centrifuged for 20 minutes at 13,000 rpm. The resulting aqueous phase is transferred into a new 1.5 ml microcentrifuge tube, 500 μl of 95% ethanol is added, and the DNA is precipitated overnight at −80° C. The sample is centrifuged for 30 minutes at 13,000 rpm, washed with 500 μl of 95% ethanol and centrifuged again for 30 minutes at 13,000 rpm. The sample is then dried under vacuum, and resuspended in 10 μl TE.

[0136] The sheared DNA fragments are sized and purified by preparative agarose gel electrophoresis. Five microliters of 6× BP-XC-glycerol dye (0.25% BP, 0.25% XC, 30% glycerol) is added to the sample. The sample is split into two samples and loaded (12.5 μl per lane) on a 0.8% (1×TAE) low-melting agarose gel (SeaPlaque GTG) and electrophoresed at 60 V, 46 mA for 3.5 hours.

[0137] The gel is photographed under long wave UV and slices containing DNA fragments of 1.3-1.7 kb and 2-4 kb are excised and excess agarose cut away. The gel slices are placed in 1.5 ml microcentrifuge tubes. One gel slice is stored at −20° C. 15 μl of 1 M NaCl is added to the other gel slice, followed by melting of the agarose by incubation at 65° C. for 8 minutes. The resulting approximately 250 μl samples are placed into microcentrifuge tubes. An equal volume of water is added, following which the sample is vortexed and placed at room temperature for 2 minutes to bring the temperature up to 30-35° C. 0.5 ml of water-saturated phenol that has been cooled on ice is added and the sample vortexed vigorously. The sample is placed on ice for 5 minutes, and the vortexing step repeated.

[0138] The sample is centrifuged at 4° C. in a microcentrifuge for 20 minutes. The upper phase is transferred to a clean tube, and the bottom phenol layer is reextracted by addition of 200 μl of dd H₂O. The sample is vortexed and placed on ice for 5 minutes, followed by centrifugation for 15 minutes. The aqueous layer is extracted and added to the aqueous layer from the previous step. Phenol extraction is repeated with 0.5 ml phenol, followed by vortexing and centrifugation for 20 minutes at 4° C. The aqueous layer is removed and repeated sec-butanol extractions are performed until the final volume is reduced to approximately 0.165 ml.

[0139] Two volumes of 95% ethanol (400 μl) are added and the sample is stored at −80° C. overnight. The sample is centrifuged for 30 minutes at room temperature to pellet the DNA, washed once with 95% ethanol and dried briefly under vacuum. The sample is resuspended in 7 μl of TE. A 1 μl sample is run on a 0.8% agarose gel with markers to estimate concentration of recovered fraction.

[0140] M13 Library

[0141] 20 ng of M13 DNA digested with SmaI is mixed with 1 μl of 10× ligation buffer (10× ligation buffer=0.5M tris pH 7.4, 0. 1M MgCl₂, 0. 1M DDT), 1 μl of 1 mM ATP and 100-200 ng of sheared genomic DNA fragments (1-3 μl volume), and 0.3 μl of high concentration NEB ligase (5 unit/μl) is added. Water is added to a final volume of 10 μl and the sample is incubated overnight at 14° C.

[0142] Plasmid Library

[0143] 200 ng (4 μl) of pSTBlue vector (Novegene) is mixed with approximately 600 ng (12 μl) of sheared genomic DNA fragments from the 2-4 kb size range gel slices and 1.2 μl of Gibco T4 ligase (5 units per μl) is added. Water is added to a final volume of 30 μl and the sample is incubated overnight at 14° C.

[0144] Transformation

[0145] The ligation reaction is titered and diluted for optimal transformation efficiency. When the ligation contains approximately 20 ng of M13 vector, the dilution will typically be from 1:25 to 1:100. A 1:25 dilution is used for plasmid ligation containing approximately 200 ng of vector DNA. To increase transformation efficiency, the ligase is denatured by heating at 65° C. for 7 minutes, and placed at room temperature for 5 minutes following the heating step.

[0146] A sterile electroporation cuvette is chilled for each transformation. Electro-competent cells are removed from the −80° C. freezer and thawed on ice. For each M13 transformation, a sterile tube containing 25 ul of IPTG (25 mg/ml in water), 25 μl of X-Gal (25 mg/ml in dimethylformamide) and 3 ml of YT top agar is prepared, capped and placed in a 45° C. water bath. YT plates are pre-warmed at 37° C. for several hours to avoid cross-contamination problems that may result if water remains on plates. For plasmid transformations, a sterile tube containing 0.5 ml of SOC medium is prepared for each transformation, and L+amp plates are pre-spread with 25 μl of IPTG and 25 μl of X-Gal.

[0147] 25 μl of electro-competent cells are mixed with DNA in diluted ligation mix in the cuvette, and the sample pulsed in an E. coli pulser (BioRad) set to the appropriate voltage (1.80 kV for 0.1 cm cuvettes; 2.50 kV for 0.2 cm cuvettes). The cuvette is removed from the pulser, and the sample immediately transferred to the tube containing SOC or YT top agar. For M13 transfections, the sample is plated immediately on YT plates. For plasmid transformations, the tube is placed in a 37° C. shaker for 15-30 minutes and 30 ul aliquots are plated on L+Amp plates. Plates are incubated at 37° C. overnight.

[0148] Two basic methods can be used for DNA sequencing, the chain termination method of Sanger et al., Proc. Natl. Acad. Sci. (U.S.A.) 74:5463-5467 (1977), the entirety of which is herein incorporated by reference and the chemical degradation method of Maxam and Gilbert, Proc. Natl. Acad. Sci. (U.S.A.) 74:560-564 (1977), the entirety of which is herein incorporated by reference. Automation and advances in technology such as the replacement of radioisotopes with fluorescence-based sequencing have reduced the effort required to sequence DNA (Craxton, Methods 2:20-26 (1991), the entirety of which is herein incorporated by reference; Ju et al., Proc. Natl. Acad. Sci. (U.S.A.) 92:4347-4351 (1995), the entirety of which is herein incorporated by reference; Tabor and Richardson, Proc. Natl. Acad. Sci. (U.S.A.) 92:6339-6343 (1995), the entirety of which is herein incorporated by reference). Automated sequencers are available from, for example, Pharmacia Biotech, Inc., Piscataway, N.J. (Pharmacia ALF), LI-COR, Inc., Lincoln, Nebr. (LI-COR 4,000) and Millipore, Bedford, Mass. (Millipore BaseStation).

[0149] In addition, advances in capillary gel electrophoresis have also reduced the effort required to sequence DNA and such advances provide a rapid high resolution approach for sequencing DNA samples (Swerdlow and Gesteland, Nucleic Acids Res. 18:1415-1419 (1990); Smith, Nature 349:812-813 (1991); Luckey et al, Methods Enzymol. 218:154-172 (1993); Lu et al., J. Chromatog. A. 680:497-501 (1994); Carson et al., Anal. Chem. 65:3219-3226 (1993); Huang et al., Anal. Chem. 64:2149-2154 (1992); Kheterpal et al., Electrophoresis 17:1852-1859 (1996); Quesada and Zhang, Electrophoresis 17:1841-1851 (1996); Baba, Yakugaku Zasshi 117:265-281 (1997), all of which are herein incorporated by reference in their entirety).

[0150] A number of sequencing techniques are known in the art, including fluorescence-based sequencing methodologies. These methods have the detection, automation and instrumentation capability necessary for the analysis of large volumes of sequence data. Currently, the 377 DNA Sequencer (Perkin-Elmer Corp., Applied Biosystems Div., Foster City, Calif.) allows the most rapid electrophoresis and data collection. With these types of automated systems, fluorescent dye-labeled sequence reaction products are detected and data entered directly into the computer, producing a chromatogram that is subsequently viewed, stored, and analyzed using the corresponding software programs. These methods are known to those of skill in the art and have been described and reviewed (Birren et al., Genome Analysis: Analyzing DNA, 1, Cold Spring Harbor, N.Y., the entirety of which is herein incorporated by reference).

[0151] PHRED is used to call the bases from the sequence trace files (www.mbt.washington.edu). PHRED uses Fourier methods to examine the four base traces in the region surrounding each point in the data set in order to predict a series of evenly spaced predicted locations. That is, it determines where the peaks would be centered if there are no compressions, dropouts, or other factors shifting the peaks from their “true” locations. Next, PHRED examines each trace to find the centers of the actual, or observed peaks and the areas of these peaks relative to their neighbors. The peaks are detected independently along each of the four traces so many peaks overlap. A dynamic programming algorithm is used to match the observed peaks detected in the second step with the predicted peak locations found in the first step.

[0152] After the base calling is completed, two sequence quality steps occur 1) poor quality end sequences are cut and if the resulting sequence is 50 bp or less it is deleted 2) overall sequence quality is examined and poor sequences are deleted from the data set if they have an average quality cutoff below 12.5. Contaminating sequences (E. coli, yeast, vector, linker) are removed after sequence quality assessment.

[0153] Contigs are assembled using PANGEA clustering tools (PANGEA SYSTEMS. INC) and PHRAP (www.mbt.washington.edu). PANGEA clustering tools are a series of scripts which group sequences (clusters) by comparing pairs of sequences for overlapping bases. The overlap is determined using the following high stringency parameters: word size=8; window size=60; and identity is 93%. Each of the clusters are then assembled using PHRAP. The final assembly output contains a collection of sequences including contigs, sequences representing the consensus sequence of overlapping clustered sequences, and singletons, sequences which are not present in any cluster of related sequences. Collectively, the contigs and singletons resulting from a DNA assembly are referred to as islands.

### EXAMPLE 2

[0154] INDELs are identified by aligning sequences from Arabidopsis thaliana, Columbia and Arabidopsis thaliana, Landsberg erecta. Finished BAC sequences derived from Arabidopsis thaliana, Columbia are obtained from GenBank (www.ncbi.nlm.nih.gov/entrez/query.fcgi?db=Nucleotide). Because the GenBank sequences are subject to change, the finished sequences of the Arabidopsis thaliana, Columbia BACs are included herein as SEQ ID NO: 1 through SEQ ID NO: 1482. The sequence of each Arabidopsis thaliana, Columbia BAC is used as a query against a database of Arabidopsis thaliana, Landsberg erecta islands using the GAP2 program of the Analysis and Annotation Tool (AAT) for Finding Genes in Genomic Sequences which was developed by Xiaoqiu Huang at Michigan Tech University and is available at the web site genome.cs.mtu.edu/. See Huang, et al., Genomics 46: 37-45 (1997) and Huang, Computer Applications in the Biosciences 10 227-235 (1994), both of which are herein incorporated by reference in their entirety. The GAP2 program compares the query sequence with a cDNA database using a fast database search program and a rigorous alignment program. The database search program quickly identifies regions of the query sequence that are similar to a database sequence. Then the alignment program constructs an optimal alignment for each region and the database sequence. The output file of GAP2 is reviewed for insertions or deletions. Using alignments that are at least 96% identical (as reported by AAT), insertions and deletions are determined by looking for gaps of at least three bases, with three aligned bases on either side of the gap. To ensure that an insertion or deletion is derived from matched sequence, the 10 bp region to either side of the gap is aligned and compared. To be considered an insertion or deletion, the adjacent aligned regions must be at least 90% identical (as reported by AAT). Insertions or deletions smaller than 100 bp are considered candidate markers. INDELs identified by the method of this Example 2 are set forth in Tables A1 and A2 and identified in the “method” column by reference to method 2. More particularly Tables A1 and A2 identify the location and nature of the polymorphism as follows:

[0155] “SEQ NUM” refers to the sequence of the finished BAC of Arabidopsis thaliana, ecotype Columbia where the polymorphism can be found;

[0156] “SEQ ID” refers to an arbitrary name used by applicant to identify the BAC sequence;

[0157] “Chromosome” refers to the chromosome of Arabidopsis thaliana in which the polymorphism is located;

[0158] “BAC Length” refers to the number of nucleotides in the finished BAC sequence;

[0159] “BAC Name” refers to the name of the BAC as used in GenBank;

[0160] “Marker Name” refers to a unique six digit number arbitrarily set by applicant for a polymorphism;

[0161] “Left” refers to the position of the closest nucleotide in the flanking sequence on the 5′ side of the polymorphism;

[0162] “Right” refers to the position of the closest nucleotide in the flanking sequence on the 3′ side of the polymorphism;

[0163] “Type” refers to identification of the polymorphism as a SNP or IND (i.e., INDEL);

[0164] “Method” refers to the method used to identify the polymorphism, where “1” represents the method of Example 3 used to detect SNPs and INDELs of less than 3 nucleotides and “2” represents the method of Example 2 used to detect large INDELs; and

[0165] “Indel Size” refers to the size of INDELs in terms of “n/−n” or “−n/n”, where n is the size of the insertion or deletion and the minus sign indicates the ecotype, Columbia/Landsberg, respectively, with the smaller sequence length in the area of the polymorphism.

[0166] “Columbia/Landsberg” describes the nucleotide base of a SNP in the respective ecotypes, e.g. “T/C.”

### EXAMPLE 3

[0167] SNPs are identified by comparing Arabidopsis thaliana, Columbia and Arabidopsis thaliana, Landsberg erecta sequences. Each Arabidopsis thaliana, Columbia BAC sequence (extracted from GenBank and represented by a SEQ ID NO: 1 through SEQ ID NO: 124) is compared to a full set of Arabidopsis thaliana, Landsberg erecta contigs using WUBLAST (version 2.0) to locate areas of high identity that could contain a marker. Each identified contig is subsequently compared using WUBLAST to a full set of Arabidopsis thaliana, Columbia BACs (all of SEQ ID NO: 1 through SEQ ID NO: 124). To be selected as a marker candidate, an Arabidopsis thaliana, Landsberg erecta contig must have either one or two matches to an Arabidopsis thaliana, Columbia BAC. A single match suggests that that the sequence is unique. Two matches often result from overlapping BACs. The alignments are evaluated in a conservative manner. False negatives are preferable to false positives. To be included as a candidate polymorphic marker there must be: a minimum alignment of 200 bases between the sequence of an Arabidopsis thaliana, Landsberg erecta contig and the sequence of an Arabidopsis thaliana, Columbia BAC; the alignment must cover at least 75% of the length of the Arabidopsis thaliana, Landsberg erecta contig; a minimum of two reads of the Arabidopsis thaliana, Landsberg erecta region with the two read areas extending at least 25 bases on each side of the polymorphism position; agreement between all Arabidopsis thaliana, Landsberg erecta reads at the polymorphism position; minimum PHRAP consensus quality of 40 at the polymorphism position, with an average quality of 30 for the 25 bases on each side of the polymorphism position; and a maximum 1% polymorphism across the sequence. SNPs and INDELs of less than three nucleotide bases identified as described above are set forth in Tables A1 and A2.

[0168] A set of fifty polymorphisms was selected from among the polymorphisms in Tables A1 and A2 and identified more particularly with primer pairs in Table B as core selection markers. The primer pair oligonucletides for these core markers have the sequence of SEQ ID NO: 1483 through SEQ ID NO: 1582.

[0169] More particularly Table B identifies the primers for use with the core set of 50 polymorphisms as follows:

[0170] “SEQ NUM” refers to the SEQ ID NO for the oligonucleotide primer.

[0171] “Marker Name” refers to either an aribitrary six digit identifier or the public name from GenBank.

[0172] “Primer Name” refers identifies the primer by adding a F (for forward) or R (for reverse) after the corresponding Marker Name.

[0173] “Chromosome” refers to the Arabidopsis thaliana chromosome on which the polymorphism is located

[0174] “Genetic Distance (cM)” refers to the genetic distance of the polymorphism from the beginning of the chromosome.

[0175] “Size of Insert Col/Ler” refers to the number of base pairs inserted in listed ecotype for an INDEL polymorphism. Col identifies the Columbia ecotype and Ler identifies the Landsberg erecta ecotype.

[0176] “Amplicon Size Col/Ler” refers to the length of PCR product using the forward and reverse primers for a polymorphism for the listed ecotype.

TABLE B

| | | | | Genetic | Size of | | Amplicon | |
|---|---|---|---|---|---|---|---|---|
| SEQ | Marker | | | distance | Insert | | Size | |
| NUM | Name | Primer Name | Chromosome | (cM) | Col | Ler | Col | Ler |
| 1483 | 460499 | 460499_F | 2 | 85 | 19 | 0 | 216 | 197 |
| 1484 | 460499 | 460499_R | 2 | 85 | 19 | 0 | 216 | 197 |
| 1485 | 456794 | 456794_F | 5 | 96 | 14 | 0 | 182 | 168 |
| 1486 | 456794 | 456794_R | 5 | 96 | 14 | 0 | 182 | 168 |
| 1487 | nga6 | nga6_F | 3 | 85 | 19 | 0 | 161 | 142 |
| 1488 | nga6 | nga6_R | 3 | 85 | 19 | 0 | 161 | 142 |
| 1489 | nga63 | nga63_F | 1 | 9 | 25 | 0 | 129 | 104 |
| 1490 | nga63 | nga63_R | 1 | 9 | 25 | 0 | 129 | 104 |
| 1491 | 461064 | 461064_F | 1 | 2 | 47 | 0 | 377 | 330 |
| 1492 | 461064 | 461064_R | 1 | 2 | 47 | 0 | 377 | 330 |
| 1493 | 457984 | 457984_F | 4 | 16 | 12 | 0 | 238 | 226 |
| 1494 | 457984 | 457984_R | 4 | 16 | 12 | 0 | 238 | 226 |
| 1495 | 452585 | 452585_F | 1 | 90 | 56 | 0 | 396 | 340 |
| 1496 | 452585 | 452585_R | 1 | 90 | 56 | 0 | 396 | 340 |
| 1497 | 454039 | 454039_F | 5 | 51 | 35 | 0 | 199 | 164 |
| 1498 | 454039 | 454039_R | 5 | 51 | 35 | 0 | 199 | 164 |
| 1499 | 455075 | 455075_F | 5 | 23 | 0 | 15 | 143 | 158 |
| 1500 | 455075 | 455075_R | 5 | 23 | 0 | 15 | 143 | 158 |
| 1501 | nga280 | nga280_F | 1 | 81 | 18 | 0 | 122 | 104 |
| 1502 | nga280 | nga280_R | 1 | 81 | 18 | 0 | 122 | 104 |
| 1503 | AthCDC2BGR | AthCDC2BGR_F | 3 | 74 | 2 | 0 | 147 | 145 |
| 1504 | AthCDC2BGR | AthCDC2BGR_R | 3 | 74 | 2 | 0 | 147 | 145 |
| 1505 | 455469 | 455469_F | 3 | 43 | 18 | 0 | 207 | 189 |
| 1506 | 455469 | 455469_R | 3 | 43 | 18 | 0 | 207 | 189 |
| 1507 | 466785 | 466785_F | 5 | 110 | 24 | 0 | 267 | 243 |
| 1508 | 466785 | 466785_R | 5 | 110 | 24 | 0 | 267 | 243 |
| 1509 | nga162 | nga162_F | 3 | 21 | 17 | 0 | 123 | 106 |
| 1510 | nga162 | nga162_R | 3 | 21 | 17 | 0 | 123 | 106 |
| 1511 | nga172 | nga172_F | 3 | 6 | 25 | 0 | 179 | 154 |
| 1512 | nga172 | nga172_R | 3 | 6 | 25 | 0 | 179 | 154 |
| 1513 | 466780 | 466780_F | 2 | 19 | 55 | 0 | 452 | 397 |
| 1514 | 466780 | 466780_R | 2 | 19 | 55 | 0 | 452 | 397 |
| 1515 | 450584 | 450584_F | 1 | 108 | 12 | 0 | 116 | 104 |
| 1516 | 450584 | 450584_R | 1 | 108 | 12 | 0 | 116 | 104 |
| 1517 | 453494 | 453494_F | 1 | 115 | 0 | 16 | 155 | 171 |
| 1518 | 453494 | 453494_R | 1 | 115 | 0 | 16 | 155 | 171 |
| 1519 | 466786 | 466786_F | 5 | 130 | 0 | 14 | 130 | 144 |
| 1520 | 466786 | 466786_R | 5 | 130 | 0 | 14 | 130 | 144 |
| 1521 | 449044 | 449044_F | 4 | 72 | 37 | 0 | 214 | 177 |
| 1522 | 449044 | 449044_R | 4 | 72 | 37 | 0 | 214 | 177 |
| 1523 | 452443 | 452443_F | 1 | 99 | 15 | 0 | 279 | 264 |
| 1524 | 452443 | 452443_R | 1 | 99 | 15 | 0 | 279 | 264 |
| 1525 | 455725 | 455725_F | 5 | 120 | 25 | 0 | 373 | 348 |
| 1526 | 455725 | 455725_R | 5 | 120 | 25 | 0 | 373 | 348 |
| 1527 | 455913 | 455913_F | 3 | 29 | 3 | 0 | 116 | 113 |
| 1528 | 455913 | 455913_R | 3 | 29 | 3 | 0 | 116 | 113 |
| 1529 | nga168 | nga168_F | 2 | 73 | 16 | 0 | 169 | 153 |
| 1530 | nga168 | nga168_R | 2 | 73 | 16 | 0 | 169 | 153 |
| 1531 | nga8 | nga8_F | 4 | 24 | 0 | 43 | 174 | 217 |
| 1532 | nga8 | nga8_R | 4 | 24 | 0 | 43 | 174 | 217 |
| 1533 | 459322 | 459322_F | 2 | 49 | 0 | 43 | 427 | 470 |
| 1534 | 459322 | 459322_R | 2 | 49 | 0 | 43 | 427 | 470 |
| 1535 | 453973 | 453973_F | 4 | 54 | 27 | 0 | 407 | 380 |
| 1536 | 453973 | 453973_R | 4 | 54 | 27 | 0 | 407 | 380 |
| 1537 | 466787 | 466787_F | 5 | 88 | 21 | 0 | 369 | 348 |
| 1538 | 466787 | 466787_R | 5 | 88 | 21 | 0 | 369 | 348 |
| 1539 | nga225 | nga225_F | 5 | 11 | 0 | 72 | 136 | 208 |
| 1540 | nga225 | nga225_R | 5 | 11 | 0 | 72 | 136 | 208 |
| 1541 | nga76 | nga76_F | 5 | 71 | 0 | 69 | 244 | 313 |
| 1542 | nga76 | nga76_R | 5 | 71 | 0 | 69 | 244 | 313 |
| 1543 | 466776 | 466776_F | 1 | 48 | 0 | 27 | 399 | 426 |
| 1544 | 466776 | 466776_R | 1 | 48 | 0 | 27 | 399 | 426 |
| 1545 | 453574 | 453574_F | 4 | 48 | 0 | 30 | 420 | 450 |
| 1546 | 453574 | 453574_R | 4 | 48 | 0 | 30 | 420 | 450 |
| 1547 | 455553 | 455553_F | 5 | 7 | 0 | 32 | 211 | 243 |
| 1548 | 455553 | 455553_R | 5 | 7 | 0 | 32 | 211 | 243 |
| 1549 | 456131 | 456131 F | 5 | 79 | 0 | 32 | 283 | 315 |
| 1550 | 456131 | 456131_R | 5 | 79 | 0 | 32 | 283 | 315 |
| 1551 | 457489 | 457489_F | 5 | 42 | 0 | 28 | 156 | 184 |
| 1552 | 457489 | 457489_R | 5 | 42 | 0 | 28 | 156 | 184 |
| 1553 | 460464 | 460464_F | 3 | 62 | 0 | 18 | 321 | 339 |
| 1554 | 460464 | 460464_R | 3 | 62 | 0 | 18 | 321 | 339 |
| 1555 | 450660 | 450660_F | 5 | 60 | 16 | 0 | 218 | 202 |
| 1556 | 450660 | 450660_R | 5 | 60 | 16 | 0 | 218 | 202 |
| 1557 | 458709 | 458709_F | 2 | 10 | 42 | 0 | 452 | 410 |
| 1558 | 458709 | 458709_R | 2 | 10 | 42 | 0 | 452 | 410 |
| 1559 | AthSO392 | AthSO392_F | 1 | 40 | 0 | 16 | 158 | 174 |
| 1560 | AthSO392 | AthSO392_R | 1 | 40 | 0 | 16 | 158 | 174 |
| 1561 | 466777 | 466777_F | 3 | 51 | 4 | 0 | 189 | 185 |
| 1562 | 466777 | 466777_R | 3 | 51 | 4 | 0 | 189 | 185 |
| 1563 | 459775 | 459775_F | 2 | 63 | 68 | 0 | 426 | 358 |
| 1564 | 459775 | 459775_R | 2 | 63 | 68 | 0 | 426 | 358 |
| 1565 | 466781 | 466781_F | 2 | 40 | 0 | 7 | 213 | 220 |
| 1566 | 466781 | 466781_R | 2 | 40 | 0 | 7 | 213 | 220 |
| 1567 | 466778 | 466778_F | 2 | 2 | 19 | 0 | 283 | 264 |
| 1568 | 466778 | 466778_R | 2 | 2 | 19 | 0 | 283 | 264 |
| 1569 | CZS0D2 | CZS0D2_F | 2 | 56 | 20 | 0 | 204 | 184 |
| 1570 | CZS0D2 | CZS0D2_R | 2 | 56 | 20 | 0 | 204 | 184 |
| 1571 | nga106 | nga106_F | 5 | 33 | 33 | 0 | 171 | 138 |
| 1572 | nga106 | nga106_R | 5 | 33 | 33 | 0 | 171 | 138 |
| 1573 | 450129 | 450129_F | 1 | 32 | 27 | 0 | 392 | 365 |
| 1574 | 450129 | 450129_R | 1 | 32 | 27 | 0 | 392 | 365 |
| 1575 | 466788 | 466788_F | 4 | 7 | 39 | 0 | 271 | 232 |
| 1576 | 466788 | 466788_R | 4 | 7 | 39 | 0 | 271 | 232 |
| 1577 | 454879 | 454879_F | 5 | 132 | 12 | 0 | 299 | 287 |
| 1578 | 454879 | 454879_R | 5 | 132 | 12 | 0 | 299 | 287 |
| 1579 | nga1107 | nga1107_F | 4 | 102 | 20 | 0 | 168 | 148 |
| 1580 | nga1107 | nga1107_R | 4 | 102 | 20 | 0 | 168 | 148 |
| 1581 | 466779 | 466779_F | 4 | 5 | 0 | 49 | 306 | 355 |
| 1582 | 466779 | 466779_R | 4 | 5 | 0 | 49 | 306 | 355 |

### EXAMPLE 4

[0177] PCR primers can be designed for the flanking sequence of polymorphisms and can be used to either confirm or detect the polymorphisms. Such primers are designed with the program Primer3 (obtained from the MIT-Whitehead Genome Center) with a “perl-oracle” wrapper. The criteria applied to design a primer include:

[0178] Primer annealing temperature (minimum 57° C., optimum 60° C., maximum 63° C.)

[0179] Primer length (minimum 18 bp, optimum 20 bp, maximum 27 bp)

[0180] G+C content (minimum 20%, maximum 80%)

[0181] Minimum target margin of the primer relative to the polymorphism: 50 bp

[0182] Length of the amplified region
[0183] for SNPs: minimum 480 bp, optimum 500 bp, maximum 550 bp
[0184] for INDELs: minimum 200 bp, optimum 400 bp, maximum 500 bp

[0185] PHRED quality score of the gene template (minimum of 0)

[0186] Target sequence on one contig

[0187] Maximum mismatch=12.0 (weighted score from Primer3 program)

[0188] Pair Max Misprime=24.0 (weighted score from Primer3 program)

[0189] Maximum N's=0

[0190] Maximum poly-X=5

The primary goal of the design process is the creation of groups of primer pairs with a common annealing temperature (Tₘ).

[0191] After the Arabidopsis thaliana specific portion of the primers is selected, an additional common primer tail sequence can be added to the 5′ ends. Forward primers for the detection of insertion/deletion polymorphisms have the additional common M13 bases on the 5′ end: (5′-CAGCACGTTGTAAAACGAC-3′); reverse primers for the detection of insertion/deletion polymorphisms were designed without a tail. Forward primers for the detection of SNPs have the additional common M13 bases on the 5′ end: (5′-TGTAAAACGACGGCCAGTT-3′); reverse primers for SNPs have the additional common M13 bases on the 5′ end: (5′-CAGGAAACAGCTATGACC-3′). The primer tail sequences are added so that subsequent amplifications of any primer pair can be done with a specific kit designed to work with oligonucleotides having the primer tail. It is noted that primer pairs are not required to contain the tail sequence, the relevant portion for amplification and/or hybridization probes being the Arabidopsis thaliana specific sequences.

[0192] Using such primers for polymorphic marker flanking sequence, a person skilled in the art can amplify genetic regions from Arabidopsis thaliana, Columbia and Arabidopsis thaliana, Landsberg erecta genomic DNA, as well as from a mixture of Arabidopsis thaliana, Columbia and Arabidopsis thaliana, Landsberg erecta genomic DNA to represent a heterozygote. In the case of SNPs the amplified product is purified and sequenced to confirm the presence of a predicted SNP. For validation of INDELs, the amplified products are analyzed or sized on an agarose gel or an acrylamide gel to determine if the fragments amplified from Arabidopsis thaliana, Columbia and Arabidopsis thaliana, Landsberg erecta genomic DNA are polymorphic. An exemplary PCR amplification reaction procedure to detect an INDEL-type polymorphism in a mapping experiment is a follows: a reaction mixture containing 4 ng/μl DNA (2.6111); Taq Gold Polymerase (5 units/μl) (0.1 μl) (Perkin Elmer, Norwalk, Conn.); 5 μm forward and reverse primer (0.2 μl); 1 μm Li-Cor M13 Forward/IRD 700 (0.5 μl)(Lincoln, Nebr.); 50 mM MgCl₂ (0.3 μl); 10 mM dNTPs (2.5 mM each of dCTP, dGTP, DATP and dTTP)(0.8 μl); 10× Taq Gold Buffer (1.0 μl); dH₂O (4.5 μl). Thermal amplification is carried out in an MJ Tetrad as follows: 94° C. 10 minutes; 35 cycles (94° C. 1 minute, 56° C. 1 minute, 72° C. 1 minute); 72° C. 10 minutes; 4° C. hold. PCR products are loaded on a 7% Long Ranger gel and run on Li-Cor's DNA Sequencer Long Redir 4200 or DNA Analyzer Gene Readir 4200 according to manufacturer's protocol. Data is analyzed using GeneImagIR software.

[0193] An exemplary PCR amplification reaction to detect a SNP-type polymorphism in a mapping experiment is a follows: A reaction mixture containing 4 ng/μl DNA (6.6 μl); 5 units Platinum Gold Polymerase (5 units/μl)(0.1 μl) (GibcoBRL, Rockville, Md. (0.11 μl); 5 μm forward and reverse primer with M13 tails (1.39 μl); 50 mM MgCl₂ (0.66 μl); 10 mM dNTPs (2.5 mM each of dCTP, dGTP, DATP and dTTP)(1.04 μl); 10× Taq Platinum Buffer (2.43 μl); dH₂O (12.77 μl). Thermal amplification is carried out in an MJ Tetrad as follows: 94° C. 10 minutes; 35 cycles (94° C. 1 minute, 56° C. 1 minute, 72° C. 1 minute); 72° C. 10 minutes; 4° C. hold. PCR products are purified using QIAGEN's QIAquick 96 PCR Purification Kit as per manufactures' protocol. Purified PCR products are run on agarose gels to confirm amplification, followed by sequencing to confirm the presences of a SNP.

The application's sequence listing, which the Patent Office published only in electronic form, follows.

SEQUENCE LISTING (124 sequences)

SEQ ID NO: 1 - DNA, 76175 bp, Arabidopsis thaliana
aagcttctgacgtgggctcaaaacactaaaacggcctctgaatcagtcaacactttgaggcatgagagattgattaaaccacagaccaagtctttacgacaaatcaactcgagcccaataggctctaataaggcccaatacgatataatcgtcttcttcctgtagagtcggggacctgggattagtcaataaatgagtagaatttttgtaaggaagagagtagttggtgagcgtcgccattgaaggggaaagcagcccaactttgcattgaatgacacttaaaatctttctctcagcagctgtcttcatttatgatcgatcctacttctttcttctctctaccaatttcaagatctggtcgtcgctcacaggagaaacgtaatggaaaacaaagagaccaagcaagaaccagcagcagcagctgagcaaaagaccgttccgttgatcgaagatgagatcgagaggagcaaagtcgggatcatgagagctctctgcgaccgacaagatcctgaaactaaggtccctatcgatttctttaagtaaaaaaagaattcaaccagaaaagtattgatttgataaaagccctaatgatttggatttgcaggaggtggatgatctgatgataaggaggtttctgagagcgcgtgacctggacattgaaaaggcttcaacgatgtttctaaattacctgacttggaagagaagcatgctcccaaaggggcacataccagaagcagagattgcaaatgatctatcgcataacaagatgtgtatgcaaggtcatgacaagatgggtcgacctatcgctgttgccattgggaacagacataacccttccaaaggcaaccctgacgagttcaagcgttttgttgtctacacgctcgagaagatttgtgctaggtgaataataataatattactacatacattaagttagtgtgggtatataagaaaccatttatgctaatgctctttttttgtttgtttgaatgttgtcatgttagaatgccgagaggtcaagagaaattcgtagcaattggagatctgcaaggctggggatattctaattgtgacatccgtggctaccttgctgctctttccactttgcaggttacttcctttaattcgcctatcatatcttttgaaacaaacatttaggtttttagcaattatcactaataaaggaaaatattgctaataatccacttaactccaaatatagagaattcagtttgacttccaactaagaaaccttttgttcgtcagtactatttactatgttttaaaaggtgtttttgttattttggagtaggtgatcaggttaaaggtctttttgttattttggtccttttggccacacttggcttctttttttttgtttctctttgtttatggattttttttgaaaaggaactttcatgattgtaatcctatttttagcaaaatattgcgttagtaatattgttcatggtcgtgagtcctgacagtgagtaacccccacattaagaaaaccttgttttacaggattgttacccagagagattagggaaactctatatagttcatgccccctacattttcatgaccgcatggaaggtcatttatccttttatcgacgccaacaccaagaaaaaggtacattgatttgctctgcttcacaatcactttattagtatgttttaagactgtgttggaaaatttgattgttaatttcgtgtttttttgggggggcagattgttttcgtggagaacaagaaactcactccaacgctgcttgaagacatagacgaaagccaacttcccgacatctacggaggcaaattgccacttgttcctattcaggagacctgattataggtcttactacggcccacctctatttccaaattattacttactagtattattttttatttgaataaaatgaaaaacatattgagtgtcgccaaatgccaacaattatatatttactgtcaaagaagctaaaagatataatattgaaaacacctttaaatttcatgtaatttttcataattatctatctactgtgatctagccataatacttcggcaactatacaatttcagtctagcttgctgttgctcttccctgcaaatctaacacacaacttgttccaactagaattctaaaccaaaacaacaaaataatataaaagaggtttaatttatgaagggtacattgaaaaaaagaaaacaccttgaattgataatccataaaacaagtctttactaatattttcactcttattagaaagaaaagaagaaaccatcaaatcccctttggcaagtgagatcgatccacttacacaagctgtttgttcaccagatgcgtgggcgagtattaccatttagaggagctccatgatctttggctttggctttggtctctctcagataagcccgagtgatctccacgcttagatccgggttcctctgcacaaacgtctcatatttcatgggaacaaccacttcttccatatgtttgacaatatgattgatagccgcgtctttcaagattgtgtcacaaggtatactggcgagctctaagatgtctaggacgttcctagagctcagagatgcgatgaaatggttacggcatacgtcttgcagatatgaaatgtcgtacttatctgcagccagatatagggatcggtattgattgtatggagcttttaggttaccgctgtagaggaactcgagaagagatttgagttcgtcgtgggacaaatcagggagagtgattgattcctcgggggaggtcttgcattcatcagaatctaacatgttcctgaagacctttgatcttgccgcctagaacaaaaacagatttattcagtcgtatcatgatccagtgttatcatatcatatctaaatatagtaatgtcttgagactagaactgtgacattaatataaaagcaaaatgtaaatcatctgttaccagaacggctttgtgggtaggtatgggtggagcttcttcaccaggtttaacgagaacatcagtatgcatttgctccttgaatgagacaacaagaccaccgaggaaagccgccttttgctctgcttctgtcattagtttattcaaactaatgtcacaaccaaaaagctttagtatgtagtattacttggccaaacagagaacgaaataccaagaagatcaaagttaaccatacatgccacaattgtttattttaatcaacaaatcttaagagtagtagtagagaggttctctattcataagatcaatattgtaaatttgtgatcctcccctaagctttaaaactctaatcaaagctttaaaatttgaaagtattgttctggctaatagttatccaaggatatggtatcgaatcttaaaacgccactctccgaaattttaaaactcaaacagaaagaccactcacacaaaacgaaaattcaatcaagccaccgatcatattctcaaatttcatgatgattttaaaacaacccttttccaagggtttgtcatgcaattctcaaagaaaacaaaaagaagaagagaaattaggaaagtagaatgatagtgtatattaccgactgatagcgagatcggctgcttcctctatagattcggtacgatgatctgagagactctgaacttgacttgatgattactttacttgtgatatcgatataatttaagattatatttttagtggagcaatatttattatcaaaaaaattcggaaaagcaaatgtttaaagcgaaagtttaggtgaatatcggattttgaaatatcactagaatttttttaagatcttttccagcattttaactataggtccaacgtgctctaatgggtcaccggtatcggcccataacaaaccaacaacaacaacttctgatttattttcaagactcgtttttttttcttttcttttcagttaagctagacttttatcaacatcaactttatattagaagtgttagcatcagtttttattactatcagtcatattaatgaaaaattttagttgctactatatataattcctctaaaaaacttgtgacccttttacattagtaatctgtaaaatactagttggacatatgtatgttatagaagaaaatctgatcatcatgactcaggaaaagaagccaagtctattcatggtttcatgtctaataatagagagaaactagcaagagaggttaaaagagttatttaaggcaaatgtggtatgggctctcctgtctagttgtgtgaaagcgtacagagacatatatattgacctaagaaggggtgtgttgtattaacaataaaaaaaaactagaggatcatctgatttttatctgttcccatctgatacatagcaggttgttttaagacgattgaggttgaagacgaacgtgagggcatggcctgtcgggttcccctgttgtccacagcgtcttcaagtcacctctcttgtgacccaacacgaacaaagtacctgacacattgcaccacaaaccattcttagtttcaaaacatacatagcttttggttccaaaacatctgttgtgggttcagtgttcttacctagtatgaatgggacgatgtaaagcagagccggttgcccatgtccgtccatcaagtttagagctatgtatgttatgagaagacctgtgattgtcaagaatcatattaaaaaacctttactagatttcttattcgtttctcccctacgtgagggatcatacctagaccataagcagacattgtcccaaggaagtaccctgactttagcctcttgttcgccagccagtcgtacctgcagaacggtgcacgattttgatcggatttaacattagattaaggtacttatcataataggtttcctttttattactgaaaatgataagatggatcacctgaaaacacatccctacagttatcaattctttttctaaacaatatcttgtctccatttgtctacctagtgcaaccttaccctgatttctctgaagacatttgattcattcacactcatctatttactagactatgtaatgtatatttctatctacaagttcttcaaaaaattgcaaaccacattaaacagacacaaagcataaggacataaggttaaattgaaccagaatgtcggattataagatttttttgccaggttcaagcgattttgttttataaaaaatctgtcagagatgatgcgcaaatgcggatataaaggtatatcatgaccccaatgtttctgataaacccttttcacattttgttgttttcgctgagcacctctattggtttgttgtcctgatttacattgatatccgcatttgcgcatcatttcatacttttgtatgcttctaataactcagtttagttgagatcttgatatagtaataatgtgagagagcgcaagaggagattgtaacagtgcaaacctcagtgcgaaagttacaagcagtcctggtaagataatgtcaccaaatccaattatgctgtagccaccccaaggatcaaacattcgtgggatctttagtagcattggaattccgtcctctccgcttctgtcaccacgggctacctatatgtgggaaaatgggaaaagacgtacaattctccgataatatcagtgtggagcagacagataagtatgtgtagttggaatatctaacaaagtcttcttgcatgatggtctggagcaaaaaagaaaaacttaccacaatcatcacgctttcacggaaccaccattttgaaacaaaaacccagaagatgtcatacatgaaggcacagctgagaagaacaaacccgacctgtttacgtaagagttcaatgagtcatcataactaatattgttattatagagattggtcttctatacattggcagaaatgattgtatccgtctaccagcagcaatcaaattttcagtcttcaactgattggtttagacagttgaattttcaacatgttagagcacaaattcagaatatatacacaggaaaagtgatggttcaaaacaaagctggtacgagatggctaaaggtgtttgtcaacatgtgatatttagtgccctcatgattgtaacggcaatcccatgtgacatttgataaggaattggtaataccttaagatttggtacgcggacaatttgaagaaccgtgattatcagtgagattccctgtcagcaagaaaaaccaaaagtaagctgttaacttgtgttatttgttaagactacagataggtcaacctaacaccaattacttatacatatgcatgaaggtatgtacatggtagccttgtatggaaatttaacagtaggtatacttgtagaaagacatggattcaagaaaggtcagttaagagagagagatggaaacccgcgcttacaagtatatcttgccctatccaagcataagagtattgacgtttaaccgcccaaaatacagcaaatgctatgcaaaagggacaaatagccagagtcaagtatgagacagcacccaggaaaggaactttgacatatgattctccaaagcggcggaaccatctgaaactataacaaatttaacgtcagtatcagattttcttttttacttctcaaagagtgaagaagcttgaataccctagcatttcatagtcaacaaaaagaaacaactcatggtttctatctgattcattatttcatggtaaaacaagacctgaaatcaagacaatgcagaacgtagaaagtttgaaaagagatcaatgcacgagaataaataatgaaaaaatcttgggatcacgagtgtttcttctagtattaaagggctgtttccatcttaatgttcctctctactgctctttgaaaagcaaaaagaggtgaaacaagctccttacaagaaaatgttaatgagagaagaactatacataccatgagagtagagagaccaaacaagtttgcagcccctgatagcaccaacaaaactttcaacatcagtacaggatggttcaataaggtattgctatgatttcaattggtcacaagataaacgttctacctctacgccacctatgcaaaagagtaccaccaacacctctataaaccagaatgacataagcttgtagagcatgatcaggaaacaagaagccaccactacaaacaaaattgctgatatcacggtgacctcaacaacacctctagagctggtggttgataactgcaaaagttcatctgatccgtcctgcagtttaagatagataacaaacgaatgagggcacttttccttggctgtcaaaaggttcgaacatggtggatgtccagaatataaaattgtacgaaattttgagccagcaatcacctttagcagcttgtcttgctcaatagcttcttccctgacggtccacgcagaccaataagaagcacataaaatggtaccgacagccataagccaaagaaagacctcagccacatcaactgctggacgtttcggcgagtagagctgcagagtaactgaacaaatatagtcaacaccaactcaaagaaaaagagagagcacagagatgccaaactatgataagatatgctaaaatacaagaagagcaatctatgcggaagtacagtttgatttatacgaagaattacctatagcgttacttttgactatgttctccagacttctaccagcatcaacaggtagcataacaacaggaatagtaatatctaaaacgttttcacccttctcgcagaccatcttgaaaagatctgcaaagcaacattcaaccttgcaaaactcaagagggatttaactagaattgggaaataaataatcacttggaactagtacaagaggaggaatatatacagaaaaaagcctttagtgaattacctgtactgttgtttatgataaggatggcagaggcaccagctgcttcagcaaccttagttttggtggtaaaactgcatttaccacgatgaacaagaatgacctctcctgtaagctaccaaaagataatgaaactggaattacacaagaaggaaagatgagtacaagagagacaagccaaaaaggaaactttaccttatttttgggagtgctgcaacaatcaggagggtcagcaatagcaagtttgatgagggtagcatgtttctccttagattccaaggttgggccaaacctagcaccaacaccaacatactccgtgtactccgacccattgactcgagttgggactttcacctgtccatgaaattatatgttgtagttatatatgttggaagatgacatggcagggtcctaaacgcaaaccagatctatatcccaatttcttcactcacaccaaatgactccttattatagctaacaagaagcttgcaacaaattgaaagtccatgcgactaaaacgagggtttagttaggtaactcatggctatacctactctccctctattctgaatgacatcaaatctggaatccaaaagttcctctagagtctgtaaaaacccaatttctcaatctgctggcaacaacagatatagaaggaggaggacagtgagaaagcaatcaacagactcattccactaaaccctagtattacaatccaaagcctaaactaaattccaaattcctgaaagtcaccaagagatagacaagagggacaaggagataagagaaagagtaagaacgacagatcaaagtgaaatagatcaaaaatcaaaccagaacgaaattgttgttgcaaccaggtctctgcggaagcgaatcgtcgtggtgaactatgtctccagcacaaacgaaactagcactgtacaacaacaacccgaagacgaacgagaaacaactgagagatttccacaagatcatattccagactccacggaatcgttaaaaggagggaagaagaaaaagaagataaaaagattagagaggaaagatggagaaaaaatggaggaaggtacaatgaacgagagagagagaagagaagagaagagggaaaaaaaataaagtctcgtgggagagagagagatgaaaaaaggttggtgtcgttttagaggtaagtaaagcttaaaacgctggctttgactttttttttctctctctttttggtcctctggcgcgtgggacgcgtgtttagatgtattggtgtctgtgtacagtactgtttattattattgaattctttgtccgtacgatattttgccttttctgtagttatatttatcaaaactgtttatctgctgatgatgataagtgataacagatcaagcgccgtgtagttctaaaacatgtggagtcattaacggaaccaaaaagttacacaaaaaaacaaacatcatatattaacttaccgatgcttgaataatagtactattattgaatgacaaacccattctataatctatatcactatatgccatgttatgattattgatgatttaaggtttaatttttttttcttttttgaaatatgttgattgtctatataataaacatctctcactcaataaaaatcaaataaatcaagtgacctttttctgaatcatatcataaacaaaaaaatatcagtaattttttaaaaagtaccggttttcaaataataaatttgcagtaatgaattcattgatgttttgggtcggttcaccctaatacattttttctctctcgcctccctgctttaactccaagtggtcgttgtgctcgtgacggcgcgtggcggctcctacaacgccggcgtcggtcacctttcttgtttcctgtttagtttttcttttcatagatgtcttctttggttttagaagcatagaggctctttacaatttggagtggtgagtgttgtgaagcagatctagtgagattgggttttggtacttggatctgtgggatctgatggtcgagggtgttcttaggtcactgttcttgttcgctggtcatggagtgcagtcacgcttcatctttgccggtggactttcaagacttttgcttcttctcttgacggcttgtttctcttctcccatggctgaatctgtgcaacatcggatcgacttctcgataactcggtatctccattgtctctcatgtcttctgcttttgtgaaacttgttgctctgatcagtttgtattcatgagatctggtaacatcagcggcttaggttaatttgtctccctcttttgggctattgtctcccttttttgggcttagcttctcttccccgactaagttagactttgttagtttggggttgagctcttggattacatatcagttcttcttttgttgtattaagcaacgattagcttaattaattgatcgttgtggtgttgaaaggtttaagtggttctcgattatcctacggttcatccgggttaggtactctttgaaaaagaagcatcatttacggagaagaccaagttccactatcttgttattgccataagtgttgaagcccgtcttctcagtttgttgtgcgggaagtccttgtggtgaacttcgagagctttgtttagtctcgagataagattagtttggtttttgcaatgttctcgaaaaaaacccttcttcatgggtcgagctttgtgtatctttaaagtctaaactctttattttcatatgtattatatcttttccaattctaatatcaaatataattcaatgagaaaaaaataaaaaaatttgcagtaatgaattgcatgtgcgtggaacatatatagagacaagctgcgcgtggaacatgcatgcgatatgtacttcaaatccaccgatcaccggctacctcaattttaataatatatatattttattaaatacttttttagtcatcacaaattttaatatgaatccgtatgaaccgtaccgacaagacggcatgttacagttaaccattagataattatttttataatctgaaaatctaatgtggtcgacctcatgctaagatcaaatgttatggccaataatattctcgcacgtgaaaaaagccaattcgtccttttgtacacgcgtcacgttgttaatcttaatatcacgtgcgcttaaactctctaccatattcgtgggtcatttgttgggccatctttagtaatactggcccatagaaagggacgtctgtgaattcaatttacaaacgccaagatatgttgacgtatctcaagagagagagcaaaacagcaagcatttttgtaaatgggtactagagagaaccaaacagtttttatgaataccactcacagcaaataataacagcttttaagtaaacacaacaaaagcaaagattctcaagagtttcgttgtagccactcctgaatcgcggaacgaagggcgtgattcgggacaaggttgttgtgggcgagcttcaggtttgtcattggtgaggtctcgtgaccattatcgagccattctcttaaagattcagcttcataggtgaaaccatcggctgcaacacgaggctctcgcattacttcctgaattaataaataaacaagcattaacttctaaacatcgaatataagtttgttctgttacaatgctctcatttgaacaatgaacccacgggggtcctggtccacatacctgtgagataggacatatgaaatatgagggaggctggcgtgtaacggaatcctcatcggagaatccagaaggagttccatggcgacgagtgtaactctgaaggagtaatagaatctccgaacagactgagctcgctgcgtctttctcagccgccaccttgctgagttcttcctctgttccttttctacgtcttgcttcttcttcatacaacctcatgaagttttgtcctacagagcaagcttcttccttctccttcttcactttctctagctcctctcttcttctcttcaccaactcctctgcctctttcctctgcctcacctgtcaaaacgatcttttaatatatgatgaaagtaacttctagtttctaaattaaatctaagattgatcacctcgtcttcatatagctgcatcaagttcttgcttatcatgcacgcttcttccttctccttctttgtcttctcaagctcttcctcttgtctcttcatagattcctccatctctttcctatgtctcagctgctcgttgtacagctgcatacctaatttgtacaaattcaaatgaaatctctaattgtctgagaagaaatattcacttctgtttctgacagtaccatcctgaacaatggctcgcacttcttcgatctccttcttagttctctcgtgttcttctttctctttccccaacatctcttcagcttcaactctgcgtctcagttcctcattgtatagcttccttccatttagaatgatgattagcgcgtcgtccctctcttgtttagtcttctccaccattttcctctgcttcgctaatgcttctttaccttctttccttagcttcgcctcttcgttgtacatggcctcgtactctcttgccttttaagtaaaaggaaacaagtctaagcaaaaacacattttcaatgtatgagattatgaatttgtgcaggtgttttacactgcgaatggcctcaacggctgtattttcagctttaaaccgcctgacacattcttcgtaagcttcccttttcgattcctcaacttccataagtgcttgcttaagctgtctatacagttgatcattcctgtcgctttcctgcaacataacagagacacaggaatatattggtttttgcacaaaccattcgattatgcatctaattcacaataccaacaatatttagaacatacagattgatcctctgatgcatttggctccaacatatctctgtctctccttgtgtcaatgtaagctacaattgcagagactaattctgcagagcatttcggtgaagcagaggaatagagcttcggtttggattgtccagcttcggattctgtttcacccatacagtcttcaagattggcttccctgtgtatttaatacacagagacaatcaggtaatttcttcaaagacaagacacatataagtaaagagagtattcaaaattctcactttgtgtagatgagatgtccatcacacataaacataacctcgcacgagctgggcgcgtgttggtaaacatactttgcctttcttgatttgagatcgaacatcttcctgccattttcagcaagtcaacgagtgaatgtcttgatgagatttaaagttttcctaggtttccaatacgtactctgaataatgatgatctgatgcagctcccatgacgagcttcttgattttgctctcatggatgagttctagtatcccctgcttcacatcgttcatctctatacatgatatgtaaatatcgtcctcattcacctgcgatcataatgaattcaatatagggtattaaaccaaaccatttgaaagcaagaaaagacagaatttaacagtataagaggacaacagattaatataccccttcttgttgacaaaaatcaaaataatcatgtaatgtctcgtacatgatagcctccaattcttcaagcttgcgagctaaataatcaaacataaaataacttatcaaatgcgacgcatgtaatcacttttctagcctttaaaaacacattagaaaatggcaaacatctagccacggaaaatcatataaatctcgagcttttactcaaatggggcttgaagatcatgaagcttaccagccggagaagctgtttttggctgataaacatggaggatgcagactttcttagccccgaggttcctcaaagcccaaagaagagttgatctgctctctctgacatcactcttcactgcaacatgaacaacatcattgcccatggccatgagttccgccattgatgtcctttcttttcgccttcgttttctatctttttttcttccctgaaaactgaaaccagataaacagagaagaatctaacagaaagagaccaacagtggttagtggtgaccctcaatgttcttcttgttgaccgcttcaggtttcgtgagggagacacagtaaagtcaatgtgtggcaattaaaatacaagtcaatgcataaaaatactaaacaagaaacggcacttttttccagtgaataaaggactttttattagatttttcacaaacaaattcaatgaatcacagcacgattaacaccacatttatcctaatactaataatcacagaattatggatgctgttgcaaccagtctttaatggcggaacgaagaacaagattcgggatgagattgcgattctcgagcctaagatttgtcattggtgatttttcacctccgtgattgagccatcttctgaactcatctgcttcataggtgtaaccatcggctgcaacatgaggattttgcataatatcctacatttcacgagcaatggcatgaaaaatagttagactgcagatcagcagcagatatcaaaatggaagataagttataaaaaaaaaaaacaggtatggtttagaatacttgtcagcttagaacactaaagttgagatattgaacagaagccaagtcaagatctgaatagaaaatatgatatctcgatggaggctttgagtcctaacctttgaaatgggacatatgaaacattggggaggctcgatggaaacagaccactgcaacgggattgatgactcacccttctccaaagctcttaaaagctcttcagttgtcttgatagcttcgtctcgctctttctctaacagacggcaatcagcataatgctgttctttaagttcaatttggacccttttcatatcttctatttctgcttttgctctgtttagttccgcctccacttctctcctgcgcattacttcttcattgtacagtatcttagtgacaccagaagaacttgagagtgcttcctctcttacacgcctcatcttatcgcgctgctccttctctctctttaattcctcaatttccaatctccgtctctgctcctcgtaatacattttctcaatccctctagcctgtttaacaattgaacaaatgagaatcgcctatagaacaccagcacaagaatctcacatagtaaacttgacattaaactcatgttttaagacaagcggtacaggaaatgagacatatttggcttaacagggagaggtgttggaatctagattttccaatatatcactattcaatttcttcatatattctccaatggttttgtgaggttttaagcaattcgcaaggttccaaattcataaaacaatcctccaaaatgctatgtgctgaccaaagtggggtttacatactgattgttcttcagatgatgacaaggcatgtggctcggtaacacgttcagctcttcctgcacccccatatggtatcagagcagaatcaatgctatgaaggctgcttgaggatgagtacgctgaacctgcatgttcgaaccgtccctccctaatcaacaaagaaaattttctataaactttacaataattcaaaacatgcagaagtataatcctcaatctcacctcgtttggatgagatttccattacatacaagccatatgttacagcaatggggcgcatgttgaatcacgtagtcagcttttgtaggtgtgatatgaaccatgcccctgcatcatcaaagatatataactagagtggacatttacttatttacagagtcatatttgcatcacatagattattgcagaacagaagaattgtttaacagcgttgttctggagacagagaatgatactgaagatatacgtactcggagtagtgtgaatcagcagttgctcccatgataagcttcttgatattgttttgatagataagttccacaatccattcccccacactatttgctgaaaaacatgacatatccacatcttgttcaataacctgcaatattaagatttagtaaaatgttatagcttataatcgaaattgttgttgtaaaacaaataaaccacaagaatatgttataagattccactagcttccttattgtatcaactagttggaagagcactcactccttcatctatgcagatatcatgatacttgagaagggtatcatttctactagtctgttccaactcctggattgcatcgatctcgctttgttccagcccacttgctaaaattcacaaacataagaccaaacgttaggagaaaagtcattcaagaacgtaaagcatgatcttcctaaataatcaggaatcattaatagcttgataataaccacacataaacacaaatacaagacacagagctgcaaccatttgcatcatttagataagtattaccaaagcagagaaaactaacaaattgtaacatttttgattaatacattcccgaacaagtttcttagcacccaaaaaggagaagtgaacttagggaagagatggttttacatgaaggggtcatggaaatgagctgatgaacatggagaaggtgaagctttttcgctcgaagagtcttcaaagcccataacaaagtcaatctactttgatcaacgtcttcgcttactgcaacataaacaggatcgtcgtcattcaaagcctttgccatggattctccacttttctctataagatagatacgcagagagacaaattctctctttttccaaaacaagaagataatacacaaacaacacatgaatatacatatgtatcgttcgcttaccaagtcactgcaaagatgtttccgacaattttcttagtcaattatataatattcaaaatcgtaatcgtcttttatgagaaagaaagtgattagaacgaaagacatgatctaaacagagtaggataacatcattcagaacgagccaattctcacaaataaattaaatgcaacttaagctaatcgcagaacatttcttaattcttaccgtaaaagacacatttcctacgatcattttagattttttttttaaagccagatttttaatttaaaatgtcaactcagagaagattaaaagtatatatatgatacgtggaatccgaaatcgaagacaagataattttagggtttagtgacggggaaagctttgacgaagtcacggagaagtagaaacaaaaaatatatacatgtagagagcttggcttgatagtgagaaatttcgtttcgaaatttacctgttctatatccgattttcagaccaataatgtccgatcaaccgccgttcaattagccggagagctgaagaagagcaattctatgaggtggagccagtgaagaagtcaacagactactgagcaaaagttttttcctcgagaaataatcgtggagtttaacgattcaggttacgacacgtcacgaagctattagtatgaacgattagaattacttcgcctagatctcttcttatttaagatccaaaaagcttacaaacatcggggtcaattaagtaaatttgcagtgtgctgaataagcacggagtatttagggtttcttttttcttctgtttctctgttctttttcgtaaggaggacaagaaaatggaaaagataaatttatacacagattgattgcatagagaatcgcattaataccctccatggatttcgtagtaagatacatgaaggttttatttgttatttcacaaagaaattccaaaaatcacaacataatcattgactttcttgttttttctcatatagatagatgaatcaacgtttataatttgggttcttctccagccaatcttttatgattatacgaagagtgtgatttggaacgagattgtgattctcaagcggcttgtttgtctttggagaggttcgacctcctgaccttagccactttctgaattcctctgcctcgtaggtgaaaccatcagcagccacatgaggatctcgcattatctcctacaacatcacatatgaaatcgaacaacagcgttgatgatgtggaacaagtctagttttgtttcaagagctgaaaatcaaggaaatatatatatatatatatatacttcaaatatcctaaccattgaaatgggacacttgaaatcttcgagacgtgggtcttcatcgctctcattgctttttgatttctctatagtttccttccttcctttctttggtgattcctcaggttctagtatccaaccctgttggttttacacgacaagaatctcaattggtaatcttgacactaaattatatatagggttttgtctaactttatgacaatcttgctacttactggatgttctttaggtgactcgggttcctcttcctcatcccttcttcttcctttgctaattggtttctcagcagaagtagagaattctgagaatgagtctgatggattcccgaggtagaaacttctttctctattaaacaaatgaaagtttatgttagaactctacaattagtactataaacacacacacacacacacgtgtaatatcccaagctaacctttgcttgatgagtttccccttgcagatgaaccatattttacagctatgaggtgcatgttgactcacatactctgctttcctagatgtgatagacattcccctgctttatcaaagagaaggttagagtcttttgctatatttttggtttacattagattgattcactattgatggattctcaagttatctttacctggaatagtgaggatcagctgctgctcccataacgaggttcgtgataatgttttgatagatgagttccacaatcccttcccccacatcatgtcctgagatcattgatgtatccacatctttttcattaacctgcatcaatatagatttctattaaataaaataagtcaacattatgttttccttttagctccatcaaccgaaaagagaactcacccctttgtttatgcagatatcacggtacttgtagaggctatttactgaagtattcagttctgaatcttggattgcatcgatctcactttgttcaagcctacttgctgaaaatgcacaaacaaaaacagagtaaaaattccaatcctaacatctgcattgattcaaggttagttcttagcatatgtgacataagtgcaattgcaatctccctggaacatcttatgtactttttaactcccactagaagaacagataaagcaaaggtcaaattaaaacatgatgtgtgacttaactacaaatagctagtaatagccgtatatgcccaaaaaacgaatttgttttggaagtaggtagggttgaaaccaaatttggttttaattgttaaaacaaactatatcatcaatcatctaatctaagacgtgtcagaattcaagtaaatataagaattattaaataaattgattatttcgtccgatcaacgtgacaagttatatataattgaatcgtccataaacaagctacttccccttatgaaagtatccccggcagccccaacaaaacaaaatttgcaaaagttaacgtagagaatgtaccaacaaaagaaaaagacttacaagaagtggtcaacgaaaatggaagatgaacatgaagaaggaaaatcttcttgacttgaagatttttcaaagcccataacaaagtttttttactttctcgaacatcttgattcactgcaacatatatggcgtcttccatggtttcttactctggctttctttcttttttttgtgagcaaaggtatggagttatggaactattagaaatgcatgatatatagtgggagagggacatcaaggtaataaatacagtatatctcttttcttatccctttgcaacaaaattgcaaggaggtttcggaccatttacgtgttattttctcaggtcaatggcttgtgagggtctcggtcatatattatttaattcgaccgagcagttgaactttacacttgtatattaagtttccgggaatactagtgttaattaattccttaacacttggacattaagtttctgagaatattgtcggaaattattggtttcgggagatgttttggtgtacacgtatacatcaagtttgtttttataaatgttgacttcactgcaggttttagttctaatagtatgattttaaaagataccactttttttattttttgtgtgtttggcaattagtatatgtaattaaaaaaaaggaatgtgaagatattaaaaagaaaacatactgtatttggttcttaacggtttgtgtgatgcattttttaatgttgtgttgcattcagtataaatcgttttcattgtcactttcatctagaaattattgggtttgcattcagtatgggccatttatacacagctaatgggctttatgggcctctaaaatcgtcccttccccgctatattcattgcacaagagcaaaaacttaaaacaaaaataaaaataatttcccacttttcgttcctctcagtcagtcgctctatctctggatcttttcaaaattcaaaattcggtttcagttctctcactctctctctctctatagcataaagttcattatcgtgaatagctgctgctgcgtcttcgtctactgggtagtgagatcttgggtgatgaagatgaatattaacaaagcctgcgatctgaaatctatttctgtctttcctcctaatttaaggtgccatctcgcttctctccgtatctctctctttcacaatttgatttgagattacactgcgatttccatcgtttagggtttttgttttgttccgaatctggtttgtgactggagacgagtgtcagtgatctgtatgtggacattgtttttgatctattaccaactaatttatcgcttcccaggagaatccattagggttttggctactgataatgtttactctttggaattagaaggagatcagcagaaccacaagcatctcagcagcttcgatctcaacagtcacagcagtccttctctcagggaccttcttcgtctcagcgtggttgtggtggtttttctcagatgactcagagttctatcgacgaactcctcattaacgatcaggtttgctacttagctatagatcgtctcttcttctgattatcgatttcatatttctgtgcttgcttttcctttttgcacagagatttagttctcaggaaagagatctctctttgaagaaggttagtagttgcttacctccaatcaatcataaacgagaagatagtcagttggtcgcttctagatcttcaagtggtctttcgagaagatggagttctgcttcaattggagagtctaagtgtaagtatgctctttctaaattcacaaattagcgtggggatatgttcctaatttgattcaacttttcttcatttgtcacctagtagctcagatcagtgaagagcttgagcaacggtttgggatgatggagacttctttgagcaggtttggaatgatgttggattcaattcagagtgacatcatgcaagccaatcgaggaactaaagaagtatttcttgaaagtgagttctatgattgtctcattttaaacatttcatatttgaaaatgccaaattcgctctcttctcaaagtatgtagcaaccacataggctagcaactgaacaggggttaggagagtgtattcccttggattctcatttgcttagccaaataggatttgttagcaggggccgtgtcaatctgatcttactcctttaggaatgtgatattgacaatagtaattcacagattgacattgtttgctccaatagatttatcagtttgtttgaagatcaattcacttgaccgtgttgatcacatcttgacaatagtaattcctccatactcattgtgaaggtctcaatagatacttagctggatttatagtttcttctgtttactgcagctgaacgcatacagcaaaagttgactctccaagacacttcacttcagcagctggtaaaatcacttcatttcctgtttctttctcgaccttgtgcaaatggtttaccttactatattgattaattgggaatcagagaaaggaacaagccgattctaaagctagtcttgatggaggtgttaaatttatattggaggaattcagcaaagatcccaatcaggagaagctacagaaaatcttacagatgctaacaactatcccagagcaagtagaaaccgctctgcagaaaatacaaagggaaatctgtcacacgttcaccagagagattcaggtaaaaatattagtgcttcaagaaaatctgtatgtagttatatctatctcagcagagctgtgtgtcatatcggattgcgataaatctttagacttgtctgcacatgtaatctttaattctcactaccaactctcttataggtcttggctagcttgaggacgcctgaaccaagggttcgggttccaacagcaccacaagtgaaggtttgtcctgctttccatgtctttgttctttaagctacatatttcagcaattaatgtagcctttgttaattatcaggctaaggaaaacctgcctgagcagcgtggtcaagcggccaaggtaactctaaattctcaaccttgtagaattataggacatgtaatgctttgattcccactaccaaatctcttataggttttgactagcttgaagatgcctgagccaagagttcaggttccagcagcaccacaagtgagagtctcttgcttttcatgtattttgctctttaagctgcaaatttcagcagttaatgtggctgtttgttaaacaataggctaaggaaaactttcctgagcagcgcggtccagtagccaaggtaactctcactctactgcagtgaatatccctctcctcataattccattttgcttactagctcagctgtcactaacacaagtgtaaaatcaattgcagagcaattccttttgtaatactacactgaaaaccaaacaaccacaatttccgagaaagtaggtcaaacattggtttgctacttctaccctttttttgatataccacagatagattatataaatgcttatcttgcattgacagtccaaatgacgcctcagccagagctgtaaaaccatatttatccccaaagatacaagtgggatgttggaagacggtgaaaccagaaaaaagcaatttcaagaaaagagcaacaaggaagccagtgaaatccgaaagcactcgtacgcaggtactgggttgcattttcgcattggtcagcgataataagaacaaatgttttaacttcatcaaaatctaaggaatgtgcaattcaattcatgcagtttgagcaatgcagtgttgtgatagactccgatgaagaagatattgatggaggtttttcatgcctgatcaacgagaacaccagaggtatgaaactttctaaagtcgaaacagtgaagagctcaaaattccatcttttggtagactaaagtaagaagatgttcatattctagattacaaagctgtgtattgttacttcaggaactaacttcgaatgggacgcagagaaggaaactgaaaggattctgaggacagcgaggaggacaaagaggaagttcggtaaccccataataattaactgaaattgaggtaacttagaagtaggaggagcgtagcctcctctgttttacatgtctatatctgaagcatgtttaagattatttaaaattgggatagattttcacagttgtgactctattggtacttttttattagaaggtatgtcaggttcatcaattagtaattgagaaaaaatccaacaaaaagttataagaaccacttgtttttttttttctaatgtaaaatcaaagaggtgttcattcaaatttggatgttacttttacaatttaatattcttaatacaaagaaacaaatcttaccatagttgttcaattaactaccaaaagtttgagttgtcttgaaatttttgtattgattttgaatagattactttctttttggaatttgaatagattacttaatgaattaatactggtactaaataattaaatattttcaaccataaatgataaatgcaagaaccaataatacgttcatttttggaagatgttaaataacagtagattgtgttcagatttgttctataaacaaaagcgatgatacaatgaccaatcaatctgttagtgaaaaatttcaccagacagaaataataatttcctctctttcttagtaaagagtctcatcgtcgaaaacttttggcttttaaatcttttgttgtcagtgtttgtaagagatctgagattctaaagtatatcagaactcgttggtcagttagtatatatctgaaatgccagtcgaaaaacatgtggaagaaaagcttcgctcaaatagaaaagagagaggctggatatctggtattttcagaaggaagaagagatcaccacaagaagaagaagttgataatgaaaataactcatctgaagattctcgtttgatgggagccaagaatttgcatttgtttctctctgagatcatgagaaaactgaaacatgcaatcagaaaggagaaaccggacaagagattgttagggaagaagaaaagctttgagaagagtttgtcaactaaagatcatttctttctcgagcgcatgacttcaatatctcaaaagagatttcatcaagaacataatgatccaaacttggcaacaagcaaacaggttcaaagaaatcacgaaaggattgtatggcttcccgagtattcgtctccttttagcagcccgggaagaatatggaaacagaattcaaccgtgcttttgaggtcttcttcatatgatttcatcaagtccgaaacaattgcaggtagtttatcttttctctcatttgagatttaaagtagttattgactatccaatgattctttgagactctgcagatgattcaataactttgaaagagataggaactgcttcatcaagtgaaggtagtagtagccctcttctatctaaaagcaatcagattgttgatgagatgtcaaaagttgcagcttatggtgcagagaatgaaggtgaattcttggaagaggcaagttcacttttgatttctatacaaatttttacatgaaaaaaacacagagaataactataaactaatttggttgcttttgtttcttctaacagacactgtctctcccctctgtgggctcaccatctcactatatatctaaaactgaggaatatgactttgttcttgaaccactattcataagtccagcaagaggtatgaaaagaaaggtccaatattactggagttagattttaacatgaactaacattgactcatcttaacacttgctcaggtgaagcaaagatacaacctttgtgtaaccaattgcaagaaaagaatcgtcacaaagaatcagtgtttaagtatgtaaaagcggtgttagaggcaatagactcaaactgggaagagctgtatctgaaaacagaaatctctgaccagcttctatatccggcattgatcagcaacataccattctatccaaatcagctttgtgttgaacatgagctcctcttcgactgcatcaatgaagttctcttcgaattctgcaggtttcctcaatgggtttcctttgctgaaaccaggacccaagtcttgccatatagtgttgaaagcattgttcccgaggttcaagaaaaggtttattgtcatctcttgccaatgcaactccgtcgatcgttggaagaaagagttagagaagatatggctaaacacaggagctggttagacattagatgtgaccttgagtgtattggctttgagactagcgaattgatattgaatgaattattggaacagctgatgcttgagcttgaagataatcacaaaaatggttaaattgcattaagatatgtaaagtaacggagatattaaaaaaattattatccaaatcaaaatgtcaaatgggtatgttgggaattttcgtctctttctaagcaaatcagaaggtctagttaattagttatcaaacatatttgggcctaatacgagattgtattactaagtcacatgggccatcgaagaagtcacattgagtgatttaaaaacgataaccatattgtgggggtagtttgggaatttcgtctgtccatattgatttcctttttcttctccccgctcccgttacaaagatttccatttttccatgtttatgaatatagcagtaagtagtaaccaaccccagagagacctaatcgatcgcaatttcctctctttctcatcagcaagccatcttcaatttcttttctctctttttacttagatcactcatgatctctattccacttttcaaatcaagtaatctatttgtgtgtgttcgatttatgaagaataacaacaaaatcgcttttcgttgtttgggggcatgacgatgacaagggaaggctcgccgacaaaaacactctctgatttcaaaaggtatttttttcttcgaattcaattttgaattgatgtcttaaattgcttcctgtaaggtggtgtctcttctccttatgtagtagatttgccatcatctcttctccggcttttcgccgttgttgttgatactctctgttttgtgtcgtaaacatcagagagacgatcacattccgctctcaccgctacatgtcgtcgaaactcaacaaagcccaataagaataaggaattccagcccatgaccataattgtctcacattcagcagacactacaattatacaagctattggccaggtctatttctatcctatattttcagttattaatttttcattttagctctaaaaattaatagattttcaatgtttttattcgttcagtaacttttttttcaaatttctataatatataattttatttatttaaaactatttttaaaattatatttttatattactactagttttttataagtgtttaatttttaaattttgtgtaaattaattggaaacaacatccaaacctttaagaggtgttctaggttcaatatgttttgcacataatttaaatttttaactcctatcttttttttgcttaaaaatacttttaaaattatatttttatattactactattaaactataagtttttttttataaatgttcaattttgaaattttatgtaaattatgtgaacattgtggattgaacccactttaaagttattagttacagtcaagtcttatgactaattatttaaacactggttttacgtacctaaacactgattctttccaatttcctctaaatattgttttctcagtcgcgtctacatgcttttgtttgttccgcatcgccttgtagtattgggccttgtatgggccactttaatgacgttagaaactggaatgaaggaaatacttctcaaaaaagaccttactaacaaagaaaattgagtcttgaaacaagggtttacgacaaagaaaattgagtcttgaaacatttctattaaagaatttttgtcacattatcttaatacagtagaaccttttataaattaatactctataaattaataacctctataaattaataaattcttccagtttcgaattgagaccaatgtaaaatgtgatacaaatcgataaattaataagataataatttttttgaaagtcctatgtaaatatatagtcccatcaatatcataaattaataattatataaatgtatcaactatatatatatatatattatatgtaaaaaaattctttaaaatatatttataattatgttttgcttaaattcatatttgttctttgtttaacttataatttttatattttactgtatcaaaatttttggtgttgttttttagatattattattatgttttacttgtaattggttttaaaaagatatttctataatgaaaaaaatcttatagaaatttttaaaaaattaccaaattaggaaaatctctctataaattagtatttattagtttatcgataaattaatacctttttaaattaataaaatttcacggtccaaacattattaatttatagaggttttactgtagtagtaagtaaacacaattgagtcttgaaacaagagtatacgaaaacaagaagctaaataaagatagtcaaagcaaggacttgaatcaaaatagtgaacaaaaaagtgtccgtttagtaaaggacttgaatcaaaatagtgaacaaataagaaaatttctaagtaacacatttctattaaagaatttgttttgtcagtatctatttgtttaaagatataaggatttgactactactacttaaattatttctaaagattatcgaaaacaatcttcatactcaaaatgtggtctttccttcggaaaatttgtttctcaacgaatgcaatcggtaacttctttaccatggttgaagaacgttatgaaagcctcttgacgacggtagaggatttccaaacaaggaatccggctgtactcctttgtgaaaacttcctctttttctttcttggacacgtgtcactatttctttcaggcctcagccattcttttcgttttgcggaacatccttactacttcagcctttatctgatcgctgccaacgttgtcttcgggtatttttttctacgtgcagccagacgtgataagaacgaaaccgacgacgacaatccctacgccatgcttcctgatttcccgaggaacccaccaccgccggcgctccatcaccattcgatgtccgcatggtttctatggggggttcgttccgttgcagtttatcttctgaagacgcactccggtgaatcggacctgttcgctacgggagcgcttctctttttccacgcgtactgcatcactctgcttaaactgaatgttagtgacttcggcgtttccggcgctttcatgtcgctcgcctcagcgttctccgagactttaatgaaaagtccacactttaaactcttgaactcattaatatgtttttatggtaattatttaagaaaatttttatagcaaaacaaactaaatatgtataaatgaaaataagaaaaaggaaaatgtaagttttgtctttatttgattacataacaaaacaagagaaagttataaaagttatttacaaatgggaatttaatgaaaaaaaccctcaactttggccagatccatttttaaaccctaaactatgtttttagtaaaacaaattctgaactaaaacctgttaataaacttaaccccatagtaattaaatattaatgggatattaatttccaaaaaaaaaacaacgagacatttgtatttagcgcaaaaaccacatgatgttctttaaaactgttttgaatttattacaaaaaaaaccttctaaatgattttgaattgcttaattagtttggattttagaagctgaaagaaagatacaacaacttaaaataatccaaggagtcatgcttaaataaatccaaccaacataactatcgaagctgttgcaacacaacaatatttgtcacaaaaaaaaaaacaatcgtttcagagggacaagatattctaaagtaaagacttgtcaaacattaactttgaagagaagattgtattggctgagtgatagggttctcttcatccattgttttctgttttttccttggtcgtccttgaggtttcttgggtggttttggcactgctttacgcttgcatgaacgtttgttgtgtccgacttgttgacagttgctgcaagtctaaatatgcaaagattaaattaaataatttgaaaaggaagatcttgtgaaacataattcattgttctctattttaccatttgaactttttcacgtgtataaggaactttttgaggtggacgatcttcagttggatcacggattctgtcattgttctttggtcgatttttggaaattaatatctcattaatatttaattactgtggggttaagtttattaacaggttttagttcagggtttgtttaactaaaaacatagttcaggatttaaaaatggatctggccaaagttgagggtttttttcattaaattccctttacaaattagagttgaaagagaaaagtgtttattctccgtatttctaaaaaaactacatactttacatgtaaaaagtgtatacttattatgtagtgaggtcggtgacccacgtgacaataaaattatttaagaagaaaatatagtatttctctcgttttggctactgattatgttttctctatcgaatttatgtttaaacaatgaaatctgaagtgcgtttgattgggcgcaatttctctcgttttggctactgattatgttttctgaatcgaatttgtgtatctgtgttgcgcgaatcttattttaaaaggagattagcagatccacaagcatctcagcagcttcgatctcaacagtcacagcagtcccttctctcagggaccttcttcgtctcagcgtggttgtggtggtttctctcagatgactcagagttctatcgaagatctcctcatcaacgatcaggtttgctacttaatctaaaagacttaagagttatcttctgtagatcgtctcttcttcttcttctgaagaaaagttaattaagctatgattgatttcatatttggtgctgacttaagacttaagagatgttatacgtttaatatgggtttacacataatttaaaattttagcacttgtttttagtatattaataaatatttaaaaatatacttttatttaactcttaacacttgttttaaaacataactaaatgttaaattctccccactaatattattcccggtatctaataatctatatacagcgttcgtctttcttacataaggaaaacaattcttaatatgattttacttcaatttgaatcttactaggtagaagaaattaaaagtaattatactcatcattcttctcctctcattgttttgtctacataaagaacatcatcaatccaagcaactatgttaaaagctaaaccttcaagaactcttgaataactctctaacacagcttttccaacatcctgcaaaccacaaaccataaattgttataatattcaataaaacatgattcaggtcactgtttgtttcttaattaccttgttgcaatgaatcttgcaaatatctaacgatgtctgagacaattctgggtaccgttgtttcaaacagaagagcaaagactctgctctctcagccaaaacatagttcttgtcacttctctctgtaattgacattaaatctttcaccatattccatgaagacttggaattgttaagacaagctttgcgtctccatgtgtacattgaagcttctactctatctgccagctgaagcgcttcatgttctgatacaatcttgagacgatctagaagtttttctggtgaaaaccgccctgaactcgtcatgtgtcgatagattgcatctcctgtgctcgcttttccgctctgcaaatgcataatattgtaagcaagaaaatgacaccaaaaatagaaaaccaaaacttcaaaatcatcttaagtgtggttacctttggaagagttgccatgtaagaatcaggaatatccatttcaccgagtatgctgctattgatggccatagcagctttatggatttgattagtgctctctcgcttgctcttaagttgtttccttgccttctctgataaaccttgtaatggaaccagaggaatcggtaaccaccatttctcttctttcctctgcacaatcactttcctgaatgatccagttgcggaacgcgttgacttcatcgacaagcttccttcttctgcataccaaaactctgtcttttgaaaactatccaatgcctcctgcagaaaacaaagagaatgacttttatgaggaatattaaccgagtcaatcttattgatgatagcttcttgttctggtgtagtaactaccataagcatggaatctagttttctgagtgcaggcagattgatgtagatatctgctcttggtctactctccatgacctgacaaaaaaaccgcaacagctatttttaaactattgatgtttatttcagtttttggacttatatctataagcaaatcttgtttacctcaacagtggctccattgcttagattctgtgactttgggataaactcgaaaatatagtcacacacagagagaaggcaattcatttctctcttccacgtcgtcttctgctctatctccaatggttctaatcttagattctgtccaaaaacagtagctgcaaatctcaaaatcaaaagacattaactacagtttctctagatggcttagtttgaaagtcacaaaactgtgaggcgtattagtgtttagttaccataaagattggttatagcgtttgagattgtcactgcggtgcaaacgcctttgccgcttcctgacatatcttccccaagcagaagcttcgagaatctttccttcatcgtctccagctctgctacgaaaccgataacagtttcatgattataatgacaaagaggaaatacagacacagagaaagagagagagacggagaaacacaaaacctggctctgaaatttcttggaccgcaaggtgctcatcagtctcaatctgattatgtttcaagtcgaagacagttggaaaatttgagctcgcagagttgttggattcggttaagacaggccaatcactaggagaagcctcagtgcagaaactgctggtttcatctatttggtctgaaaagcctcctccagaggtttcagaacatgttcgatgataagcaaaagaatctgtgctcattgttgagtaaaccggagtttcagatgctgaatgatcatttggatcgatgggaccaggtgactgatgatagcccacatcgtcgttttcttcgtgatttggcaaattctccatcttctcaatgttctgtttttgaaaattcctctgcttttgttgatctcttgttttaataaaagaaataaagcttagaactttcgttgtgatgtatcaggaaaactttagaatatgaatctaaatccgacaattagaatcgggaattatttttgattcttggatagtgaaattttgaggaccagatagcagtaaagtagaagaattgttttgtttttttttggccaaaagcagagaccgttaggcgtgccaaaatcaaaaagcaaaacaaaacataaagaaacgaaaagaaagaaatgaagtaatcacaacattatttatcgaaactttcacgaagatttattttattactataacaaacatttcgcttatgtcgatcaagatacatgaaagtctgaaacttgaaattttgaaaaacgatattaaggaagaagaaaaaagcaacggtctttattttatttacctttaaggctttaaagcttctgcaaatttgtctttgaatttgaaacgcttgaatcttttataacgtttataaaacactctcttttccgcattaagctttctacacaatttatcggtgcccggaaaaaacttgaacaatgtggaccgtccgatggggaaggatgactcatcctacggttgagattgtgaaatgttttttcaaacatttcaactaaaacaactaattgaagatacgaaatcataaaccccaaaggtacctagcgtgttacgcgagaaacacatagctacagagaatatctgtttccaaatgtacatatgctttaagattaagtaggaggaaaatccatcgtgacagtgagacccaatcgatcgagaaagcatccatgatttggagaaaattaatactgattcaaattgaaacatagactagaaacgaaaaataacagctttcaggagttggtaacaatttaattaaccactgagtgataatcgaacaagacgaaaacccgtccggagtggttactataacttgcatatagtaaccattggttttaaacaagcaaattaaacgaaaagaaaaataaatactgattcaaatagaaacattagactagaaacgaattaaaataacagctgactgagattctgttattatcgtctcttctcatgggccatttagaaatttacttagttcggatttattttaaggccttaaagccattaatgggccttgaggttgtaggatttgtttattgctttttgtttcatctcaagaattaaattacatcacaccaatattatttgtatatttcttcatttattaatactaattattattattttatttataacacgtgagagaaataaaaatcgaaccgagtccacgtattcttccataaaccggagctggtagttgatacaattgatttaccttgccaggtgggaggaaaccacattttctcacacctaatcatcatcatccaaccggcgatttcttccgactagccgaatccgccatgaacaccgagtcaggtaagcctataacgtgagattgaggaatgacgtagtgagattttcggcgaattccatgttgttgctgctctgtttttgtagttgtcgagttccttggaaacgtccctttactccagaaattaccgagctcttctctgaagaaaattgctcaagttgttgtgccgaaacgttacggtcggtccattctcaatttcggatttattcttctctctgatttcacgatataaaaaaattgagctgtgttgttctctattgtattattgaagggaaaggggattatgtggttcgtgaagatcaaacttgggatggatgttattttattttgcaaggagaggtttgtttctgagactagatatcgatgtatctatcttcgccattgttataatttgattcttgtttgcaggctcaggtttccggaccagacgaagaagataaccgttccgaattcctcttgaaacagtatgattacttcggcgttggtgagagatgaatgctttctgttcaaccttgggtttggtgatatatgctcagcttccttgtcttttttcttcctcctacaggtttatctgggaacgttcattcagcagacattgttgctatgtcccaggtatttgctgacttttgatatatattccaacgacaagcgtgtccaagtttcttccctcacttgtcattgcagcttacgtgtttggtgttgccgcgtgatcactgtcatttgcttgagactaattccatctggcaatcggatacgtcacttgacaaatgctctttagtggaacgcattttgcaactcgaccctttagaagtacgtacggacggtgttcttctttatcacatttctttctgcttctggcaactgaatctctttttctctgtgcttctttcttctagttgaatatcttcagggggatcacactacctgatgctcctatatttggaaaggtttttggaggacaatttgtcggacaggtatcgcattttctctaggaaggttacattattatgtctctgtaaaccttgctgatctgattcatgtgcatatatatattgcttgttaacagtgataaccgtaaccactactaagtcacttttaccaacattttacaggctcttgctgcggcgtcaaaaactgttgattttctcaaggtcgtccacagtttacactcctattttcttctcgttggagatattgacagtatgtacataatctcactggggcactttctagccaccaatgatgcctttcttccctattgaaacccaccctgctgttggattcatctgattatcatagtttgttgctcttgcttgcagtccccattatttatcaagttcaccgcatacgtgatgggaacaactttgccacccgaagagttgatgcagtacagaaaggaaatatcatattcatcttgctggcatcatttcaggtttcccattttattctttacaagatagcttatgaatctctacgtccacctgccaccaagagagaatagcctttcacaaaactgggaaaattgttttcttaaattttctcttttattactttcatagaaagaacaacaaggatttgagcaccaggagtcaaccatgccctctgtaccagatcctgatacggtaaatcatttctccagatttaagggttccaataaattgttgtgtgttttatttttcaccattatctgctacagcttctatcactggaggagttgcgtgaaagccgtataactgatcctcatttaccgaggtaagtggtagtgttttccaatgtatgataacttatatcaaaagctcaagttggaccaatcttccaattgtttctttctttcaggagttatcggaacaaagttgcaactagaaactttgttccatggcctatagagattcgattttgtgagcccagcaattcaacaaatcagacaaagtctcctccgaggttaacaactcgctgaaataaatcaattatatcatagagtactcttgagtgtatactcataaattccattaagtatttcttaaaaaaaaaatcaagaaactcacaatgccttcttgcagattgaactattggtttagagcaaagggaaggctttctgatgatcaagctttgcaccggtaagtaactccatctatgtatatcaaggtaaccatctaaaaattggtattattcatctggtaacaatcctttaaactttaaaggcaagaatgattgtagacaagtgaatcaatggtgttttagtatcccaagttgataggttgagacttgtaaaaggccaaactttcttaatagcattgaaaaactgacggtatattgaaattcaatttatcattcttagcaaactaatcatttggcaaagccatgttgatatgcagatgtgtcgttgcatttgcctcggatttaatattttgtggtgttggtttgaaccctcaccggagaaaaggggtgaaatccgccgcacttagcctggaccatgcgtaggtttttattttctcttggtgatgtatgagttttgtgtgtctgggttaaattttttaattacattgaggcattattccagtagggatcttccagataagtaactattacgagttactattcctcatttggtttgcaggatgtggtttcaccgacctctaagagccgacgagtggttgctctatgtggtagttttttctatccttgtttcttatgaacatttcagatcaaatgtttgttcagaataaatgaaaatgatttttggtatagagttgttttataaacttgtttgctgtaagaggttcacccacttacaacacaaaggatgctgcttgcagattgtgagtccaactgcgcatgagacccgtggttttgtgactggtcaaatgttcaacaggaaaggagaggtactctttctctattcttttgaaccctattatacatacatatctggaaatgataagtgataaaagaattccttttggtatgtgtttttgaatatgagaacaacagctggttgtatcattaacgcaagaggccctattaagagaggctagacctccaaaaccctccggcacgtcgaagctctgaatggctctcaacgtaagttaaataagatacattattacgagtacaaggcgacgaataaaaagatcaaaaaccaatctgggtgggtactaaataaaagattttattagacaaactcataatgtcaatgtagcacgctgtatgtacattgtttgattccggccttctcacctctatcatcatctatctataaattctcttgttttttttttttgttttaaaattctttctcacaagaacacctttagatcgattcgtgggccagaaaattatgggcccaagtatcaaattagttttcgtacgacccattttggatccgcgggggtatctttgatggaaccggtacacctgcttaaccggccggtttatagttttgtatccatttgtgatttgcgggtttctgttgccacctccccactctcctcgcttttgttggtcttggaaaaaccctgggattttgggtatctctgagcacgaattctacattctcatggctttcgaacacagaaatgaagacctaaattccttggattcggaagaagatctggagaaaatggagtcagaggtggagcaaatgtcgcgcaaggtttccgagtacaggaaaagcctaccgagtaatctgagcaattctgtgatttcttctcgtagatccaattttcccaacatcgattctttgggctttcgcacaactagcacaggttcgtacgtttctttgcttatatttagttagataccttccttctcctttggtttcagctggaattttagtctctttttctttctagatgatgtaataatagattgatcctctacattattcgtggatcattcttgtgaagaccaagttgtttagcagcagcagacttgccttttgattgtgatgtcgttttttgcatttaggtttgtgtcatgccatgcgtgtagaatattgtgatacttgctactataccctctggatgattatgttcatgagttattacgcttaattctgaggtgatgatacatatacaaggcttttccattacaataaatcatgtatttttgtggcttagaatcgacaagcatgagactatgtgatgatatgtttagctaagctgagagaaaatgattgtttagccaatttttgtttacagataccatgagataagtggccacattaggtgacactaagatttcatagcattgtaatatacacaagtctctagtgaactgctgttgtgataaccaactcatcagttattttgttccttgcaagtttggaagaacctctagtgtcaagagatggagcacatataggtggaatcgaacaagaatctcgagatagcctgattcagctcaaagaaagagtgtacgagaacattgccacagtgcctctagttgtagagagaatgcgagagagtaaagagagaatcgacaagtccatttctttcaatggaactactatgcacccggctttcacaaggcggaaagctagctaactgatcagtttctacttctccctattggctttaccactcaaagaaagctaatgcataggaggagatatggctggtatttctttctactatattagtatcaaccaacatctctcgcatttagaataagagtataccataacctctgttttgattgtgttctacattgaaacaggtctttctctgattttaatatggactcttatagaatcttgggctgattctacaccctgtatgtatatgtaagaatcacataatcagatggttgcacaattgtcaagaacacccaaatccaagcttgcgatttagcaatctcacccgtgtaagaaacttaaaaccataaaaccaattgatataagagcttttctagcaaaaacttaaaaatataattaacaccgtcgaaaatggtggaggctactagagcgagatataaactttatcaccgtttaatcgtgtgggattttgaaatgatatgaacctattgcaaaaagacaaaaaaaaaatataaacggaggaactaggcagtgggaccggagatccaccgaccggaaacgaagaatccatagtaagatagagcccaggggttcggtcgtatcggaccggtcggatttggattctaacgacaagtgagtggacccccagaaacgacagacgtaagcaatgacaacatcaaactcatcgccacgtcagcaacggagttctacttgcgaaacgtgtcccggcagcgtcatccacccacgtgtgttctagaagctcttctcctcctccgtatctcgacacgtgtccactccctctccttatataattgacttttctctcattctttccaagtttcaaaaacgccaagtttcagaggtagagagagagatactacaattgattaggataggatcaggatcatcctcaacaacctcctcctaattcctcctccattcatagtaacaataatattaagaaagagggtaaactatgtcagaattattacagttgcctccaggtttccgatttcaccctaccgatgaagagcttgtcatgcactatctctgccgcaaatgtgcctctcagtccatcgccgttccgatcatcgctgagatcgatctctacaaatacgatccatgggagcttcctggtgacatactagctctctttctctttaatctttgccggattctaaatctgagattgttctctgctgactcaaattcaattttacaggtttagccttgtatggtgagaaggaatggtacttcttctctcccagggacagaaaatatcccaacggttcgcgtcctaaccggtccgctggttctggttactggaaagctaccggagctgataaaccgatcggactacctaaaccggtcggaattaagaaagctcttgttttctacgccggcaaagctccaaagggagagaaaaccaattggatcatgcacgagtaccgtctcgccgacgttgaccggtccgttcgcaagaagaagaatagtctcagggtatggaatcagatctgattcacatctttgtttcaatctcttgttctgtttctggtaaattgaatcaacggtgttgatttttgcccagctggatgattgggttctctgccggatttacaacaaaaaaggagctaccgagaggcggggaccaccgcctccggttgtttacggcgacgaaatcatggaggagaagccgaaggtgacggagatggttatgcctccgccgccgcaacagacaagtgagttcgcgtatttcgacacgtcggattcggtgccgaagctgcatactacggattcgagttgctcggagcaggtggtgtcgccggagttcacgagcgaggttcagagcgagcccaagtggaaagattggtcggccgtaagtaatgacaataacaatacccttgattttgggtttaattacattgatgccaccgtggataacgcgtttggaggaggagggagtagtaatcagatgtttccgctacaggatatgttcatgtacatgcagaagccttactagaagggaattcctttcctgccgccgaaacgcaacgcaaaacgaccctcgtttttgcgtttatggcaacacgagaccgttttatatggtcaatgagtgtgccgattcggccattagatttctgttcagtcttcgtttattctatagaccgtccgatttcagatcatccctaatcggacggtggtcgttggatgtatcagtagtgtattactgtgttaggtagaagaaaatccacttgttcttaaattggcataaaagtcagaagctaatatttatatgtgccgcaatcaatttaatattttctgtctacttaggagtaatggatacaaactagcgtattggttctatatttatttatcagctttcacagttgatctgacttacatttattgtgaacatatctaacaagtgtagaggagtaatggatacaagctagagtacagtgtgttagcagaaacgctataagatgaagtctgatgttgagctacatgttactgtccattgtcacttgtcggacttctttgatggaaagatgaactctttcacggaatcttgcgctgaaagtatcctctgtctgatctgcatatgcaaaatgtcatagataatatagagttaattggctacaaaaccccatcgaaccataagaaattgatttggtgttcaagagtaaatgagtaatcagtactctcaacatagagagagtaacaacagactaaaaactcagcaaaacaaagtagtcactactcattcgttgaagatccaggcaaacgcaacaaagctgagcatagaagtcaggaacattcatatctcattcaaagttttctaagatcaaaattcaaccctagcaactaacaactaataaagagatctaaccaatatcaattgaaaccaagtgattgtaggctgtagcaaatatctgcgattcgaagcgatgatgatcgagaaggttgacggttcgatttattaaacacaaacaaaaaaaaaagagagagagagagagagagagagagagagagagagagagagagagagagagagagagagagagagagagagagagagagagagagagagagagagagagagagagagagagagagagaaactcacaggatcaagagcgttgggctctggaccgtaatcagcggttaagaggaagtacgatacaacagcagtcgccaccacactggttaccttcaccaccttttcaatttggggattcatcgatgttttcgttcccagaaagaacaattccggtgattttggtttttttcaagtgacacaatgatgatgttatacgtttttttattggtaaaacgacacacaatccgatttgtgtaagaaaattcatgccgttttcgttcacttcaaatatgggcccagaaaggcccaaacatctcatcaagtcctcacggcgtcgtttttaagatccccgctgcgttgatttatggcgatctctttcggcggttgaaaacctttgaaaattgaaaatggagaaatcgacctctccggcgactcgagtcaccgaacctcctcctgctgctacttcatctcttccagcacaagctcctccgcttcctacatctgcagatcagagatcagctgagttaccttcgcctgctcagccagctcagatgactgcgcctccgtcgacagttaccacagatccgtcgtccaggggaagaaagcgagcgctggaagcgaatcttcagatcgagagctccaactactacaagatgcgtctccttgtcaaagatcttcgccctcacgttctcgaggttggaccataattgtgataaaaacattcaaactctttgtttgggaaagggtttatacataacaacttggattttgtggtgtgctacaggttttacgaactccagacttgaggaactctaaggcagttatcgagattcaagagagtgagaagctcttacactctcttcttttgttatctcaattttcacttagctcaacaaaaggcccaacttgtttgattctgtgtcccttgaaatgatgatgtttgcagagatgaagcttatgcttcaactgtacgaagagatgattggagagtctcccaaacgtgagaaaacagctaagagcgactctttatccaacggaaaggcgactactactactactactactactagtgtactgagatcatctgaaactgagaagcacagctctgatggagatggcgacaaggtggttggagggtcggcatttggctggaacttcataacctctggagggccaggcactgaacctgtttattctggaatgtcaaaggaagaatacagaagctctcacccaattatgcaagtggaggcagagcttgagttgcccaacacattctaagctttgttagtggtgtttgtataatattattcactttggtatccgttcatcccaatgttttatatgtatcaactgaaacaatggattagcttctacccatgaagccttaattagtacacaatatgcttaacatctaaacctttttttttacacaatatgcttaatgagacagcacattacctttggattgttaatcaaagcttcttcatcttctaccaaaacccaaaataataagtctttagttctgtgtggaagctgaaatctttctggcttcaagaatggatccttcggtaagtgcgatttgagattccttctccattcccaggacagaaagagcagcagactggagatacaatgcaacataccaaacaggagaaatgccttgagccttcattgcatcatctaaagcttctttcgccatgttactcattaggtaactttgacttcgccgcaccaagactgttgcagagatcattcccaaatcaagaaactgggacaatttttatagacagggcatcatcaactatggaggaaggtcttgttacggattcaagtgtgaaagaaagacatacctgcgtgtaaaactcaatggcttcactaaagtcttttcttctaaatgcaatatcaccttttttcttcgagtttatagcttcttgcatctgttccgtccacataaacgaaagctgcgtttaaacatgtcacataaagaagccttcatgggatgggaagcataaggattctaactctaaagtggtaaccgtaaagcatgacgacttacatcttcatcgtctttgtaaccaattttttccaagatctcaaccatagacgtcaggtcttttcccgagcaagcctcagcaaaaggagacggaggtgacgcaaaagtaccactttgaggcagacccattagaacatgagacagaacctctgtgtctttctggagagatatcagtgcagtgaccaaagattttatgtttggtcgctcacgagcttcatactgaagacaacaagatgtcaggcgtactaactccgtaccatcactgtctgaaaattgtccctccaagcaggaatcggttagagtctgaagatttctgtctcgaatcaaatcaagggcctaaaacacacagcaaaaggctgagataattaataaagagaattcaagaaacgattaaagtagctaccatgggcacttacatggctaggaggaatatgctttccggtgagaagatcaagcagaagagtgccaaaactgtaaatcacactctctgctgtgattctccctgtatcaacacacacttaagtctcaagttgtagaaattgttggaaataatatgacctacgaggagggtgcaaatcaatttcaccagttcgtagatactcaggtggggtaaaagcaagatttgtgctataacttttcccatcccgactattcttcattaacccaaatgttgaaagtcttggattacattccttataaagattcataaacgcattagtgggggaatatagcataaaacaaaacatggtttcccggacaagagttgcgtttaagtaattacctcgtcaaataaaactctgtaagcattgagatcatgatatagcgtgtgtccattgttactacagtattcaagagcttctgaaatgtatagagcaacccttagtcgcatcgcccatttcattggctctgtatcccctggtagatgataaaagtggtaagcaaatcttaggagaaaatcttgaaagaaaatcgaaagacaattgatcaaaggcattttctttttacagtggaaaaggtgtttggctagtgtctcattaggcataaactcagccacaagtaacctctcgccgccttcacagcaataaccgagtaaattggccattcttttgctgcgtagctgaccaaccaatcttgcttcttcctggaaacagacatatccaaagttaatagatttgagaattggcaactagataaactgaaaggtacatgccataccaggaattggcgaggatcaggccaggcagttccagaaaagcgcttgatagcaatcttcatatgattctccaatttcccttgatagacaacatttggagctgtttctccatgttcagatacaacattctccaaagcaaaacaagaggtggcgatcttaagctgttctagtgagtattcacgaaaagaatgcacaccgtttacctcaccattctctttgttttctgtaatattgtaaaaaggggattacgatatcagccaaaagagggcttgtcgttgtagcaagagagaaaaacagagacgtcaccaacatctggagcttcaagagcagtagtcttgtgtgaacaacatgtaccaatctttgagctttgacctcccatggatgcgttgcttcaaattttcaattataaggtaactggggtaaatatgtctggaaacaaggagaaatttcccaatcttactacttacagagagatatcacgcagagatcaaaattgaaaatggggtacagaaataggtcgtaccttgtcaagtcgctaccattctagtgagccaactcggcggctagtgacagcgagaccagttactaatttggaccagatgaaagaaagaagcaaaacacagctgaactaggaagccttcttatctagtcatctagatacacatttgccgccggtattcgtatcgatgggattctatttctcgcactagctagtagctaaatccacgaagtttccatatataactttctcgatatcaataagaggctttaaaaaacactccagaagaagagagactgtattccgatgttgaagtagccaaagcagaccgggaagtgtcgctagacaaatagtataccgacagagtataaatattatggttggacttggagaaggcaaacaaagaatctaaagccgccacaaattttctcaatttaattgatcacgtacaaaaaatattggggttttatgtaagcgagtgtgtctgtctttcggtgggataagcccatgggcttatgttaggccctcattgaccaacaatttttttctgtttggtcctcaattaaccaaaacaatagaaaacgtttttgtgagtccaaaggttttattttctcgacatgacactgatacaattggttgcttattttgtccaaatccattctttggataatatgatgatcaatatctgcagtttatcatagcgcaaaacccgtttgaagagaaatgacgaaatcgaaggctaattattgtttttttcgctaaattctaattaaatccgcacccaatagattagcaaagtctacgaccaattgtgaggaaagaaaaagtcaaaaaaattgaaataaaaagaaagaaaacatgtacatcatgaaacctcaactccccaatgatgtccggaacaaacttcaccacatgtgcttgcatatacacatagatacatgtgtattatgcgaatgcgtgaataactgaatataatatagactcactctaatatatctaatgaagtaaatatggcaacaacgtgacagcatctaagtcttcttggttttaagacgtgaccagcctaacgacccaaccaaactacttgtctattcttcctcccaccctctaaaacccccctaccttctctactttcagatcatcaagccccaatttcaagcagagaacaatggtctcttcctacatttcatttttatcaatctggtattgccattcatgtaatgtattgtgatcatataagttaactgactatgcatgtgtttgactgtgcaggctaattcagcgtctgggatgcacgttagcgatgagtgcaagctcaagttcttggagttaaaagcaaagaggaactataggttcattgtgttcaaaattgatgagaaggctcagcaagttatgatagacaagcttgggaatccagaagaaacttacgaagatttcaccagatctattcccgaggatgagtgccgatatgctgtctatgactatgatttcaccacccctgagaactgccagaagagcaaaatctttttcatcgcatggtacaactccctgcccttgtatttttaatgatttgaaaaattagatgttataattgagacatcaacttgcttcaggtcacctgatacatcaagagtgaggagtaagatgttgtatgcaagctcaaaggacaggttcaagagggaattggatgggattcaagttgaattgcaagcaacagatcctagcgagatgagcctcgacatcatcaagggacgagtcaatctctgaatggaacttaccgcatcttaattcgtttcagtcaaaattcatattttctgctttcgttttcttgggtatttttcatttaacttctttactatttgtatcttctgtgattcaagatctcacctctttcttttttccttttcggtacgcaataatcatcccaatagataattactttgcttccctgaacaaagctggcaatttcaagcaacttgttgatgctaatgaactaatgatgcaaagaacatacgctaaaagagagagtaaataggatgacatacctcacgtctaatttatcagaaaatcctcgcaattcaagggttttcttagccaattgttgaatggatactttcctttaaaaatctttgacatcaaataatattccgtagctttgttctgcatacaattaaaacaaaaaagaaacgtaaatcatctcagaattaaccagagaacaatatcacaaaatcacaatcttgcagcatacatgtcaaaaactcactatgagatttatacactttagcatgttagttgttccagtggaagcatgttaaagctgcagaaaagaatcagcatcgcacacaccttcagttctcggtacgatttttttgacttggaagattcccttttgtgtccatgagtttctttcaagaatagctccagtaaccgctgtctagaaaaatatatgaatatgatatcaactacaaataatgaaggtcatgcttggataacaaggctcatccccttacttgcatatagatgattgagtagacggatacagagctcctttagctgatgtgccttgctttctaccggttgttccaagaataacttcgtgtaagccagaatagttccaacacaaggaatatctaagagccaacaaatagatcacaccaccttttaagaaacaaagaaaggacacacatgtcatgtgaggaagagtattgaaaactaacccgcatgttaaagtagcttgcgcagtttctgaatgctgaaactctgatggtggtactggagctacaaaaaacagtggctggaaaggaattagcacgatatatgctagtaactactgcaatttccatgatacattggtataaagcagctagtgaaccttgttcaaacggaaggaagtcagaagttcatccgataatgggaggatcctctcatacaaagatcttcgcaagtgatcagctaaagaaaaattgtcaggactgtgcagagattgtccaacggtgatggtagaaatatacacaggctggaggacttggtaaagcaatgcccctgaagtaagaacacacaaagagagaaaatcccaataagcaaatcttaaattacacaacaaattatctgtcaaaattcagggtacagaaaccttgaactccaagaacattccatcgagctatcttatccgaacagctaacagagagtgttgtttcaccgcgaccaggctttctttgcaccatatctgctacttgtgagccattacctgaaatagagacatccaaagtaaattgataccaacatgagcctaatccgctttctcccagcttctaaataagaggaaggcaagctgagagaaaactcttgcagcattacctttgttgctattactacctatctctggaacatcagaatgccgagacgagcaaatatcagaagcttgaactaacaatgagtcatctacttgtgttgatggaatctttttcagggcatacaagggtgaactagtagaagcataaccacctacatatgacaaacacgtcaatgccaagtatattcttgaaacagataaagaaacgtaatgaggcaaattgaaggtaaattacatggcaattgagaaatgtacaaatgcaagaggcacccagatttgagcttatatttgacttctccaggacagcttgaatctgctgactctagtattgagcttgtttcgctatcaattctctgacgcttggcttcattactcttacctgaagtcaattgcatccgctgaatctcggaatagaagaacctgatgagagctcttctggcgacaacttcggcatgagaatcgttcacaatgtccccacggggactcagcagcgacccactaacgcacttggtccccgtccctaacgctatcactttcgggtctgcacaaaatcctaattagctctaaatcgaaaaccaaaaataaagcaaagagtgacagagaccttgggaaggagaagagacgaggaaagcggagaggacggtgacttcacgtccctgaggttttcccttcttcgggagagacatgtaagccgaaataaccttctctgatactgtctttccccaatcctcctccattgctacgattcccacaaacaagtccgttgattcattcatgctactcaaaaaaagcagattcaaggacccgcatgaaaatagttataagtttagggatcgttttagtatatatactacaaaattattaaagtaatcaaaatcccaatgggataagcatctttaactcacttccgtcactcgcttccttcacgtctctctcccaaaattcaaattcctcaggcctaaccaatcctgtgatcgacgtcgtcaaatattcaaaagcagtccgtgatccattgcatgatcctcttcctgtgggattcttactctcatggctaacccagacgttaaagagattctctgcgattgtgtgataaacttggtaagaatttttcattttgttttttcttttccgttaaaattcaatccattgctggagatgatttgattgaatttcagagagagaatccgaagaggcgaagggagacggtttacgtcggatgtggtgctggattcggcggcgataggccactggcggctctcaaactgcttcagagagttgaagagcttaactatcttgtccttgagtgcttagccgaacgaactttggctgatcgatggctttctatggcatctggcggtctcggctacgaccctcgtggtatgtttttggactttggaggttgctaaaattacttttagggatgctttgtaacttcaaaatctgtttttcttcagtttcagagtggatgcagttgttgctacctttggctgtggagagaggcacttgtataatcactaacatgggtgcaagtaagtgcttacaatatataatggaggaggccttttttctctctgtttttcttttcatctgaattatcgtgtttttttccttgtagttgatccctctggggctcagaagaaagttctcgaggtagccggtgaattaggtctcaccatttccgtggctgtggctcatgaggtgcattttgaaacaggtaatggaacctactttcatccctgggagatattgtcagtgttatgggtatttaacactgtctgaagccataataagtgtgattaacccttgtctttcaatctttttaaggctcgggatcatcttttggcggtcaatattgctctgcaggggtatgattctggttttctaactcctgatcatatgtgtcaaatgtgatattatcagctagtgacaattattttgatagagtagaagatatgtagaacatagttatgtgtactgtgaaggactctgggttatatgttatatataaagagttttccatggattatttagctcctccatgtgatttgtgtggtttccctgaacttttatcctcctttgttgaagggtactagcacttatcttggagcagctcctattgttgaatgcctggagaagtaccaaccaaacgtgataattacttcaagagtggctgatgccgccttatttttagcaccaatggtgaggcgttcttgtcgtttcctgtttcgtgattaaatctgatcattcttgttgtgtcatcaggtctatgaactaggttggaattggaatgacttggagctgctagctcagggaactctcgctggccaccttctggagtgcggttgccagctcactggtggatacttcatgcatccaggtgcgttttacgcttattggctcagggaagatatgatgaactactgttttccattatcagtatggtcatttcgttcctcaatgttctttaggtgatcagtatagagacatggctttccctcttctccaggatttgtcacttccttatgcagagattggctatgatggtaaagtatgtgtatcaaaggttgaaggtagtggtggaattttaaataccagtacttgcgccgagcaacttctgtatgaaattgctgaccctagtgcctacattacacctgatgtggtaagttagctgtacaaaatctagaagaaataactgtaaaaacggcggaaatatttgatttgaaaaccttctttgcaggtaatcgatattcgaggtgtttctttccttcccctgtcagactgcaaagtacaatgcagtggagcaaaaccatcttctaacacttctgtgcctgagaaactcttgcggttaattccaaaggttgttatccatagaaaatgctggtggtatttgattgatgctaaagagcaacctatgtttggttctataattcgtattttctttgcaggagtgtggttggaaagggtggggagagatatcttatggaggaaatggttctatacaacgtgctaaagcttcagagtttctggtgcgcctatgattaatatgtctatgatgtagtagcattttttggccccatcgtcgcttgaaatgactccttatggtgccttaaattggagttcatttcttatcaagtgtatgtacgtattttacttgtgttttttccttctttctttcaggttcgatcttggatggaagaaaccattcctggtgttaaccattgtattctttcttatgtgattggggttgatagcttgaaggcgacaagcaacggcactgaatcttggcagtcatgtggagatattagattacgtatggatggtctttttaaactgaaggaacatgcggtccagttaacaaaagagtttactgctctatatacaaacggaccagctggtggtggtggaattaggtaatttcttcacgttgatgttcgctccatatatcaatccaatgctaattgtagctttacagtagtaccaaatcctgttgagttgagacatcttatgactagggacaatgtattgaaactagttatttgttatgagattcggggtggtctttttggtttgacaaaactgcttgtaaattatatgcagtaccggacacaagatggaaattgttcttgaaaagcgtttggtaggtcgtctccatcaaaaaatttaaactaatatagccttgcatcaatcaattttacggattctgatgttatatgtttggttatccaggtcagccgtgaatctgtaatgtggaaaactggacttcagcacaccaacacttcagagccagagacctctgaacatcattctccagagaaaatgccaaaggttagctcgagagttcttactaaactaattgtgatgactgatagataatggaaataaacatgacctgaattcaaattccttggtgaatcaatcctagtgtgttcgaacatcaaactaactctgatgactgatagatatgttttactatttgaaagctgaaaatgtgaaagaactctaacatgtgcatttgtattaacaccttgttattacttccatttgtagttacctaaggaaaatccaaagaaccttacaatgagaggctatcaatctggatttcatcactctcctgctccatctggccaaaagatcccactctactctgttgcacatagccgggctggcgataaaggaaacgacataaacttctcaataatcccgcattattccccagatgtcgagcgtctgaaactcataattactcctcaatgggtaaagcatgtgatgtcagttctgttatcaacctcttcgtttctggaattggatgcaaaaccaatggatgaaaatgtgtcagtagagatatatgacgttgaaggcattcatgctatgaatgttgtcgtacggaacatattagatggtggagtcaactgttccaggaggatcgaccgacacggaaagacaatctcagatctcatcttgtgtcaacaagttgtgttgtaagactactttaactttgcatatcagatttttctattcaaattctgtggtaatatgttaataaaaagggagacttgaactacactatagttctaaaagataatagaaaaagaaggaatcgacttagtggtgcttcactttcttttacttctatacattaaaattactttaatttacaactggatatcttgatagatacgcatacagataagtattaaaagcattgttttgattgagagagaatgatattatatatttgtgtaatgttaggttgttgttatattcttttgcaggatctgactgacatgggttgcaccacctcagagacagttggcttaaagtaacaatcccttattggattgaaattgtcagaaaccacaacccttcttttgctcaactccaatcactttgccacccaattttatctcattcattttgcaaaaaagatcaaagagagagagagagagagagagaaagaaaaaaaggaaaaaaccttcctccgttacaacctcacaattgcaacaaagtttcatataaaagaggacagaaatttcgcaggttcctccgttgtctgaggtaaaggtttccttctttaactaattcctcagatgacctcttgatttgttggaaaaaaaattaaaaaatctgtttcatacaggatcttggagaaggaaggaaacaacaacaaccaaaaaaaaaccaaaaaaaaaaaagataaaacaaaaaaaatgtctttcacaggaactctcgacaaatgcaatgtttgtgataagacagtctatgtggtggacatgttgtccattgaaggaatgccttaccacaagtcttgcttcaggtgtacccattgcaaaggaacccttcaggtgcactcattactcattttcttgttagatcttctatgatcatattatatcaacaatttatctatgtgttgatggcagatgagcaactattcctccatggacggagttttgtactgcaagactcattttgagcaactcttcaaggaatctggcaatttcagcaaaaactttcaaccaggttcgtattataaaatctctgacatcgaatctctctatctttcaaatcatcatgatcataacaagtctctttcttttctcaggaaaaactgagaagccagagctggtaggttcatcattacatgtccttgtatatgattagcgtgtcaatatttcattttctttcttttatgatcgactaataggatctgtgtactgatttaaacattacagactaggactcccagcaagatatcttccatcttctgtggaacacaagacaagtgtgccgcttgcgaaaaaactgtttaccctcttgaaaaggttagtggtatacgcatctgcaaatgttctcatggcctaaaataccaacgaactagtctcgtagagaaatttatttgctctagaatttgttttttgttttttcatttccgtagaatttttctgttcggataaaatcattactagatcaaatggaaataaaattttgattttggtttggtttagtatacttttggttcgatttgagaacgtgatgttggttggtccaagcaaatgtggaatcaattttggcttggttctaatcgggttatttggtaacagatacaaatggaaggagaatgcttccacaagacatgtttccggtgcgctcacggtgggtgtacgctgactcactcctcctacgcctccttagatagcgttctctattgccgacatcactttaaccaactcttcatggagaaaggaaactacgctcacgtcctccaagccgccaatcaccgtcgcacagcctcaggcaacactcttccaccggaacctaccgaagacgtcgccgtggaggccaaggaagagaatggcgtttcagagtcttgaatatctcttacatgagtgtttttgagtgaatgattgaatgaatgttgttgcgggggaaagatttgatttcatttgtaatgagttgtttccatatgaagacatgattttttttgttatttttttaattcattcgttatacatttattattacacacgaaaaaaaggcaagaattgatgttttttcactctatgtgtgctgcttatgatatgctttccgatggtgatgatgatattcgatgtaatatctgttcggttcaaagataccaaactacttatataccggatcaaaccaagtggttatcgggtgatgtgaatcattcattatttcgttaggtgagagagggtgttttcgtaaaagtatctaaaaacggccttagcaatgatgtctggttggcgagaaactcaaaaaggaggagacagagaaagttgtttgactgggaaaatttgaagagacgagccaaaattatctgtttgaaacgaacggaattgaagacgagagccactcctttccgtttccacctttcttccattcttactcaactttccatgattggttagcctctctatctgtccgtggcttgtcgttgattttttttatcttggtcgtctgaatgtgtggaatttcgttttgcttcacaggagttgtatataaggttcgaggaataaagtaaggctactttttttatttgatttccgatatggagtatgcgtctacttttcaaaggccgattctattccatggtggagatggtgcgagttactgctttccaaatcgattgataagtcctaaaggaatcagcattacatctggggattctaaagtgcattcgtgttttcgattgaggagaaatgtagcacaaagtggtacattgaatttgatgaatgcgtgtttctctggaaggttttatagtggtcatttgcattctacaaaatcaatacttggcaatggccaccaagccaaaagaatcccttttggatttaggttacgttgtcagggtcatgaatctctgggtaatgccgatagtaatgatcatcggatcggggaatcttccgaaagtagtgatgaaactgaagctacagatttgaaagatgcgagagtggaaaacgacactgatagtttggaggaactcaaggagttactacacaaggcaattaaagaattggaagttgctaggctcaatagtaccatgtttgaggaaaaggctcagagaatctcagaaagagccatagcactcaaggatgaagctgctactgcttggcttgacgtaaacaaaacccttgatgtcattcgagatactgtttatgaggaggctcttgctaaagaagctgttcaaacggctactatggccctgtctctggctgaagctaggcttcaggttatagtggaatcacttgaagctggtgcagggaatgatattccacatgtgtctgaagagactgaggaaacaatagatgttaatgataaagaagaagctcttttagctgccaaggatgatattaaagaatgccaagttaatttagataattgtgagtcccaactgagtgctttgctgagcaaaaaagacgagctgcaaaaggaagtggacaagttgaatgagttcgctgagacaatacagatcagttcgttgaaagccgaggaggatgttaccaatattatgaaattggctgaacaagctgtagcatttgagcttgaggctactcaacgcgttaatgatgcagagattgctttacagagagcagagaagtctctctccatttctcagaccccagaggaaactcagggccaactctcggatgaagaaacttctcaggaggatgcgatggtactttcaggtaacgttgaagatgttacccatcaggttgaaaaagaatcacctaaagatggagatctaccagtggtacagatcacagctgaacttgtgcctgatatagttggtcagaggaataaaaaactaactcagccttatgagtcaagcgatcatgagaatggaaagccaagtgtagagtcttctaaagtggttgaagcagattctgaaaagccaaagattaatgttcagacaaaaaaacaggaaactcaaaaagatctgccaaaggagggttcctctcttaattctcccaaggcatcgtttaataaatcctcccgtttcttttctgcatctttcttctcttctaatccagatgggaccgcgacagtgtttggtagtctggttggttctgtcaaacagcaatggcccaaactagttcttgggcttgctcttcttggagcagggtcagtttgaaaatttactcttctttgcttcgagttttgaagaatcatttttgtacagaaagttctctttttgttgatacgagcttcttattcgttccagactgacattatactccaatggagtaggggggaacaaccagttgcttcaacagccagatgttaccagcactagtacagaagatgtctcttcaagtacgaagccactgatccggcaagtgcagaaacttcccaagagaattaagaaactacttgagatgatccctcaccaggaggtatgaacaattgttcttgtttttttttttcttttacgaagtgcaaattgtatggaatgtactttgcaggctgaaactttctgcaattaataggtcaatgaggaagaagcttccctctttgactttttgtggttactgctagcaagcgtcatatttgtgcctctatttcagaaaattcctggaggtaagtagtatttttttttcttcttttgttaattctatccattgcattactatttgtttcccctttccctcaaactcctacaatttctatgttctcatcagtcaaaaacattttcagttctggtctcgcaatcatgttgcatagagatttatgtgccatcttgatggcttcatctgctgcaatgtataggcagccctgttcttgggtatttggcagctggaattctgattggtccgtatggtctttcgataatccgtaatgtgcacggaaccagggccatcgcagaatttggagtagttttcttgcttttcaacatcggccttgaggtattatttgatatatgtgtatgctacctttttgcttttgaactgtgtttggtagaagagccaatattttgtttatttctttgacagctatctgttgaaagactgagttccatgaagaaatatgtttttggattaggctcagctcaggtgatttaaagatccgtgtatctcattccacatcatttatcaactacaatgcctacatgcttgatgtttctttttccatctactttaatctctacttctattgctgtaatctaggttctggtgacggcagcagtagttggattgcttgcccattatgttgctggtcaggctggtccagcagcaatagtgattggaaatggcctggctctgtcgtccactgctgttgtccttcaggtaacatttttggttgtattcaaaaagggatcttaattaaaggaattttgtagcatccccttaattttttttttaatgcaattacgctaccagttggttgaacagaaacaatgcacttggttttcaggttctacaagaacgaggcgagagtacatctagacatggaagggcttcattttccgtcttgcttttccaggtttgttcaggaaaaagttaattatatacgacaactatgctgggcatttctcatcagtttgttattttttcttcacaggatctagctgtagttgttttactgattctcatcccacttatttcacctaattcatcgaaaggaggggtaagctcatctctagggttccttctttttcttgagtatggcttgcttttctgttcgataatgtctaagtaagaggtttgataacgtctttggtctcttaagaagaaacgttgtggtcatatgttgctattactggttgaaattgctggtatgccagatatttctatatactcaaggaagtctaggaaatatcagtggtcgcaaaatgctaagtttctactgctcttttcagattggatttcaagccattgctgaagctcttgggcttgctgcagtcaaagcagcagtggctattactgcaataattgctggtggccgtctagtgagtctcagatactttaacttttgagggttcagatatcaaaataagttaattattaccaaagttgttaggtgaaatgttttagatttgctacaaaaggaagaggcatgtttccatgaactaatcatgaaagttaactgtgctatcactgctacttccggtactcaatttatatgtttcaatggagttataatataaggaatttacactcttgttgcatatagcttcttcgaccaatctacaagcaaattgcagaaaatcgaaacgccgagatattctctgccaacacgcttctcgttattcttgggactagtttactgacagctagggtatgaccgtgaccttgttggcattgagtagtttactgacatgccagtacttcccgtctgctaatttttccagtttctataaatcaggctggactttccatggcattaggagcgtttttggctggtctactccttgcagagacagaattttcgttgcaagtagaatcagatattgctccatatcgtggtcttctgttgggactcttcttcatgacggtaatatgagtttcctaataactttttccatagtttatcatttctgaaaagaatgaggaactatagatggaaaaggaaaccttttacttgtgttctagtaagatcctgatattgttgtcaactgtaagcaaactaacaaaaagagttccattgatttcaggttggaatgtcaattgatccgaaattacttctctccaacttccctgtcatagtgggaactttgggactcttgatagtgggcaaaactatgttagtcgtgattatgggaaaattgttcggcatatcaataatatctgcaattcgggtcggtctactattggccccaggcggagagtttgcatttgttgctttcggagaagctgttaatcaggtttgttatcaacatggcgtatttttttgcttttttccaatgaggtatataatcagcaatgttgttttaatggtttacccttacacattacatatatttctgtcaactgtttttccctagaaggcctaatctgtggttcttccagggtataatgtctcctcagttatcttcgttgctattccttgtcgtgggaatctcaatggctatcacaccctggttagctgctggtggccagttaattgcatctcgttttgagttgcatgatgttcgaagtttattgcccgtcgagagtgaggtaggaatcttaatgattcaaatatagaatttacctctattaggcaataatttatcaatcatggaaccacttgtagctcacacattctctagttgaggaaatcattacaaggccgactgatgagaatttttcttgtctgattttatttgcagacagatgatttgcagggtcacataattatttgtggatttggtcgagttggtcaggtttatatattatctgaacttcttcagtttatgctcttatatgagaacctctctgtagacattcagcttcacatgatagctcgaagtttctaacctcgtgaccattttctgtttgttaattgtagataattgctcaacttctctcggaaagacttatcccatttgttgcccttgatgtcagcaggtaacataacattgcttattctttgcctctattgttgaagaatctttgtgggctaaagtggtttcaaatattttgttctcgtatcgaaccgaaaatgtggggactatcagtaacttccacactcaatgagataacatttcaacctatctgatttataagtcttttttcaagactctttgtattgcaccaaccagtttccatacctcttcctcgcatgctatgcttacctgaaaacctccttttttttacagtgatagagtgactatcgggcgttccttggatcttcctgtttatttcggagacgctggtagtaaagaggtaggtacacacaaaaacagaaaaatatagattacaccagcatgtgaatattacttcacttgtgtgaacaaacaggttctccacaaaattggagctgggagagcatgtgctgctgtggttgccttagacgcaccaggagcaaactacagatgtgtttgggctttgagcaagttttaccccaatgtcaaaacttttgtccgtgctcacgatgttgttcatggtcttaatctagaaaaagccggtgctactgcagtaatactcacagaccccttcactctcatctagactatagatatgctttgtcaatcgtacactaataatacctcgatcacaaaaacttttaggttgtcccggagactctggagcctagtctacagttggcagctgctgttcttgctcaggtaaaacataaatgtttccttatttagttgaagtagtaatcctaaacagtgtatgatcattttttgggttgaaacatgtcaggcaaaattaccgacatcggaaattgcaaacacgattaacgagttcagaacccgtcacttgtctgaactgaccgaggtgtgtttcattgtcgatatatccatctatatttatcagaatctggtttggtctgattgatgtgtattgggaaatggtgtaatgataatggcagctatgtgaagcaagcggaagctctctaggctatgggtactctaggacgagtaagcctaaacctcaaccatcggatgcatctggcgataaccagataatcgaaggaggcacagtcgtaatctgatgacgttctccattctggtgagaaaaagaagagtatttctcctttggtgttcttcttaaaccaccatcaccaacttgggttgcagtgcgtggtgaagtgatggatccatcagatgatgtgtagtgtgactaatatattcattatatgttcagtacatatctctcatttaagtctttgatctcagaacaattagatttgaacaaatgcgtagcaatcgattctcggcggcagtaataacaaatgaaactacatcccgttcttgtactacagatgtgaacaccttgcagttgttggtaaaagactgaatgggccttcttttctttgacttcgactgaatgggccttaaatacagttggttttatggtccaaacaagatttacgtaattgtttgaccatcgatcattacaaaacaaaatagataccaagccataaattaaaccaaagattgggttaatgtcatgttccagaagcgagaatgataaaggcatgtaatatgaaaaatgtccaaaacacaagtgatgccccaacggaaaaaaaaaaaaaaaagaataagaaggaaaactactgatacaggaaaagccccaatagacgatgagaaaaaaacagttgctctcttttggccatttctatttgtagcttcatcagagcaactgtttttttttttgttaataatatatattgatatatttgaaacgttatttaggtcaaaagagagatttttaacaaaggaaagggccaaaagagagatttttaacaagaataacgctgaccaaaaagggaccaccaaatcacatttgccgaaaccacaagtacctcaacattataaaaacatccaaacatatatccaatgtactgtgcatgtcattattatatttgaggtcaaatatttaactaatgttttttttatgattaacatgcgagtttacataaagagttagtatatgataaactgttggaaaaaaaaagtagtagggtacatgttacgagaaaactaaaaaaaaaaattattacattgtactgacatatatgttaagaaaaaaactatatgtagcataaacgaaggcaaacgaaaatacagctcgaaaaaactaaaaaattccgattttggtgttaaaagagccaccagaaccgataacacaatcagcggcgactaagtttctttaagagagaagcatgagggtttttgaagagagaaagggtttggtttttgtacagtatttgttcgtttattcgcagaaaaaaaaacaaaacatagcagtcatggattctctttcaacgcctccgtcgactatgcaaaattccaccagaggctctcaatccttatcgtccctgctaacgtcaaatctccctccaccgtcgtttcagccaccaacgacaaatctcagtctgaattctctttcaacgccttcgtcgactatgcaaaatctctcactatacctcgggattctctagctcttgcacacttacaccatccatgctaacgtcaaatctccctctgctgtctaatctctctccactgtcgtctcactcaccaacgacgaatctcagtctgaattccctttcaacgatgtcgactatgcaaactttcaccggagactctcagtccgtaccgtctctgctaacgttaaattttcctctgctgtctaatttagggcttttattgtgctctatccaatagtgccaattctagctatggttgggttctccgtgtgcgagtgtattgtttgtctactcttctggtttcatttaggacaaaatgatgttgcagagcctgaagaagacatgtgatttggtctacttccgaagattttgatgattataattactcctttttattatatgagaattatatgttatgcacttctttctattctatgagaattatatgttatgaactcaaattaattctatactatgttttagaaacgaatgtttgctggatatttcttattaatattatattttgtgttgaaaagtgtttctagatgcgcatacaaattagttgagtttgagtagcaaatatgtatgctgcttttttcctacatttttcggtttgttatgttttcacatattcccttgggaatcgatccaagcggaaagcctaaaaagaagaatgcatcaattcgtgttgatttgtgggcttaagcccaatagctttggaccctccacactgatagcattttcttagggctatcaatgctaaaggctaaaacgagactgataattaaataagttgcattaattaagcaagtgtcacgcttcttcttgttaaaacgtttagtctgtgactaaataaatatagtatgacactgaaaaaactcctttcactttttttaatatatactataatgatgatccattctcctttgatgctaatttggaaatattggtcttatcaaaaaatataagaaatatagcggtgtctaatcttccatgtgcacacacttgtttatccctatttttttgtatatacttttttagttaacagcatgaggcttgacttttctctgtcctttcaacaattcaatggcagacccaaggttcatgcttcttctctctctgtctaacctcggcttgaaatctttttcagattttgattgttcctttttctttttcctgtttgtctccagagttgcagttgttactggttccaacaaagggattgggtttgagatttgcaggcaactagctaacaatgggataactgtggttttaactgcgagagatgaaaacaagggtcttgctgctgtccaaaagctcaagactgagaatggtttttctgatcaagccatctcctttcaccctcttgatgtctccaacccagacaccatcgcttctcttgctgcttttgtcaagacccgcttcggcaaactcgatattctggcaagtttctcttttcttttcctattatcatcaatctagatctactaatcgtggctttaatcagtttcactgtcggatcttattaggtagctgcacttccctttccatgatcacatttcttaactaagatctgatcctttttagggattgagatacttcttcaacaacttcttgtctgttgcgactaggatacatacatgttaactagaaaggatataactcttaagcgagcattatctgaaaatagcaattctgttctgtctactcttttctgatttcttgtttggtatatatgtcttcaggttaataatgccggagttggaggggcgaatgttaatgttgatgttctcaaagctcagattgctgaggtacactttcctactttctcttacctttttgaaatatatactgcacaagcttgagaggtggtcttacatataaatgactactagtgcaggctggtgcgccaactgatatttccaagataatgagtgatacatatgagatagtcgaggagtgtgttaaaacaaactactacggcgttaagcgaatgtgcgaggccatgattcctctccttcaatcttctgattccccaagaatcgtcagcatcgcttccaccatgggaaagttagaggtaccatcttgatttcttctagtcaataaacttaaaggaagggatcgtttatgaaattgactctttggctggttaattctcgtattttggtgttgggtaaaggatgaatcttgtttgtgtgcagaatgtttcaaatgaatgggcaaaaggagtgctgagtgatgctgagaacctaacagaagagaaaatagatgaagtgatcaatgagtacctcaaggattacaaagaaggtgcattacaagtcaaaggttggccaacagtgatgtctggatacatactatcgaaagctgcagtgatcgcattgacacgagtattggctaagcgacacaaatcgttcatcatcaacagtgtttgtcctggtttcgtaaacacagaaatcaatttcaacactgggatcttgagcgttgaagaaggtgcagcgagtccagtgaaactggctttggtccctaatggagacccatctggtcttttctttgatcgcgccaatgtctccaacttttgattcttcaatcttatgtgttcggttgggtgttggtttgtatattttattatctcatcaatttagcagaaaataaagtgaactccaaactatatatcaaccaaacttggttatattataaagcttcttcaatatttatgtggttttgtattcccaaaataatgtatttttcctcttgaatcctatcggcgtgtttccccacctaggttcagatagtttgcctgtgcgcgttctcgtgacgcaaaattgttattgggctgctagaaggcccattttaagtgagtctgtgagactatataaatgccctaagtctcggaaaagaaaaaaagtgtagccgtaatttgtaattgatcataatgaagccggaaactaagagaagcaccgccacaacaagacggcggaccaatgacggtggttctccgttcaatttcagctctctcaagcaagcgatcgaggccatagatgctgcaaaggatacttcaatcaatctatcgtcgttgtctgtggcgttatccgccgcgagtcgtgagatgaagcaaaggaaggagaaatctcaccgtaggcgagaaaccaggaagagggacaagaagaagaagaagaagaaggatagtaacaacaatacgaagctagtgatcggaacaaagccggaaacggatgcagaattgcgaagatggttttcatacttcgacaaatcctttaaactatcattgccgagaaaggtgaaactaacatcgccgagaaagctcaacgatcataataaaaacttgaaggaagcgccgatttgtgagttgaatacagatttctcgatgaatcactgctctgaatcctttagatactaggaacaacgcttagcttcatttttttctttttcctactctatgaaaatgttaccattctatttgtcctctttattcaatgaaatgttggagatgatgagtgcatgcgttacgcgatcataaataataatgagaatcatatatatgcaaaatacgatcatggtgtcataatattacatataagaatcacatgggttccgagacaacgtgggggttcttcatttactagagagcttctccagcctttttttttgcactctctgttgtgttgactcataattcaaatttaacacctcgtaatgcttatctgttcttattattctacagagactgcaatgtttatcattatcttatataccatagaatctaacacaaacattaaagtagtcaagcaagacaaatttaacaccaagtaatagtaaaacagacacaaactatatatggaacatgtggacaatgaaactagttcgcctttccttgtttcccttttatcagaccatcttggacttgggatgtgacggcaatagctgcacaagcgagagattgatggcttttattcattggtttgatcccaagattgcaacacacacatatatatataagcaaactgttttcttgaaatgagatctggtaaatatacctgataacaagagataagtgatgaggcgaatccgaaagcacctgtgactcggggagtgactttctttggagccaattgaagcaatccgaaagcaacaactacatccatccctgctttgatcagagccaatgacctctcgtttgatttctctacttttgcacggtattgctcattctgcttaatgatgttatctcaaaaatcagcaaaatttcttcttcactccatagagaaagggaaccaatatcttgaggaaagcttgcgtacctggtgtttatccttgttccctatctctttttctaacttcttaattgatgctgacagcctaccaagctccccaacctaaacatgtcgaaattattacattatgcggtattgcatttgaaccagaagtaagagacaattcaatggcagtgaacagacctcaaccaaggatgtgcaaaccgaagaacccatccaacagaaaagtgatatacgtccaagaatctcagcacgttctttgtcctaaagcagcagattcataacataaacagagtaggctcagtttaacctgaaggaaataaagtctcctatattgcaggcttctcctaaccttgtaaatcccagtcctgccaagccacacaatttgatctaggaacaagaacgttgacagcaacgcgtttttagactgccaaaaccagaagatcaatcaatgtttggaaaagacaagctctaaaagcaagcaaagcaacaataacattacctttccgagcagaacaagcgggagtggagtccctttgggaacagggctaatgagagcatgaagatcatttacaaactgcacaacacaagaagaacaccatttaactagatttacaataaaaccactaagcataatcacagaaccatttttttcctttcggagtctgaattatataattccccataagatatgtattccagttgcaaatcttgtatctccataattcaagtgatataacccataaatcctataactgaggtataaccatggatctatacatctagttgcatttatcaactcccataatagaacaaatagtcttttccccttaaagtcaccaacttaaaacagatgttagctagctcatacccttaagactggtttcaggtaaaagtgtgatttgaagtttgataaaagatgaagaaaccaaccttgaagagacggaaaactttcctagccaagctggtgttcttgtcgacattttgagcagtgccaggttggccatcactcaagaacttggaaccatattgaatagctcgacaaatcttgtctctcgcctccgctttattcaaatacacaactaccagaccaagctcagctcttgtggtctcaagggtactcatcgtttaagctcacaagaaaccttttattttaacaccaaattaggtttgaggtaaccatatccaaaaaagtcaaaacaaagaaaacccgattttttattagtcagttcacaacaaaatctcatcttagtcgagcaaagatggtacttttgtaataagattttcagagtctaagaagaagccctaacatttctacccaaagtgataatcagctttgcaaacacatattcattgcaatttcataaggcaaacaaaggataaaagcaatttgagatccaagtaaatactttacctttacgaatattctcgtacgagctcggagaagataaacagagttcgcctgaaaaacagagtaagccttctccgataagagcaattaaggacatattgtccagactagtaaactccttgtgccaaatgaagccgccagacgaacgcaccgtgatctatttctgaccgttgattacgttgacccaacaaaattatcactaaatatctctatcgttcttttttttgtgtgtgtgtgtgtgtgtgttattattatgtttcctagcaacaagatagacctaaaaaaaaaaagttaaaatatagtgtgagataattattatctagtggcaaaattgttctattaagcacatcgattacgactttgtgaaataaacttgggagtttcacaactgatatttgtctccttaattaattttgataaacagaatcatattacgttcatgggcctgtattttttttgttaaggtcatgggcctgtatttaatagttggccacataaattatctgggaataaacctagttgactactgaaagatattcaacttcatgggcctgtttaatataaagcccatatttatcagcttcagagaaacagcccaaagaacactttttaattactagtaaagtttaactaacggttaataaacttacatcagacaatattacactttttatcttggctgcttcaatgtctccgcatcgttcgttttaccggtgaaagaagcttcttagctttcctctttcaagcttctcgagaagcttatcggcgcccattacttccatctccgacagcttcttcagataccctattgctccgtacgacaccatcattttcttactcttctcgcttcccgacatccccaacagccccgccacggcgtacttcttcgccgtgtttccagggtttgaatccaataacatcaccaaattcgtcagaacgctcttcccgtctttcttcagttcccgtcgaatccttccttccgctaccaatccagcgatcgcctgagccgccgcttctcgacatccgtttgacttcgattccagaagtttcacgatctccgggatgcaaccggattctcccactagccttttcgtctccggcgagcaagcgaaacggcaaatagccgatgctgctgcttgttgcgcgcctaaagatcctgacttgagtacatgcctcaatcgtggaagcaaattgagagccacccatatctctggattcaccgacgggattagatttctcagtgccgttaccgccggttgttgcggcaacggaccgtcgagataagccaagagactcggaactccgccttctgagacaatggcttcacgtagagcgtcgctcgctgcagtgagattctgcaaacactcggccatgtgttctcttgatcctaacaatatcccatggtttagaagatcgatcgagactctaattattccttcttccgcaagcaattgtctcagctctgaaactgctgacatgttcttcagagcagctgcagacgcagcttgtgacacagaatcccctgttttacagagatctataagcggtgtgattccgccgtgtcctgcgatttcccgtgcgttttcctctgtcatggacagtctctggatcgcaatcgcagctttttctttggtttcaagactccctgattcgattagtctcactaacggaggcaatacaccttcggagataagccattcgtcgcagtgtcctgattctgctaatacactgatcagattcaccgctttctctctgattcttgtcgaagttgctgttagcagctgaactaaagctgcaacgttggctcgtccgatcaaaggcataagaaccatcttttcatcttcttgcattgcaccaaggaggctttcgagagcattgtgttttgattccaagtgaccgatctgtagcctcgctagaagttcttttaaactggaaattttgggtgtttccgatgaacttgaaatgtaaagaggtaacgtagcttcaccgagaacgccggtcttgatcaaaaccccacagtctcttagattcaaatccagttttccggataaagaatctagatcgctctgcatacgcagcttcccttcatacttgtcagttgaacactgctctgcaagctctatcacttcactaagcgtcttagccacagattgcaactgctcgttgcagagcttgttcttggagaagcaagggtggcttgagaggtcagataaacaagctggtatctgttcgatcttcgagatgatcgtcttccatcttcctgtaaacttcttaaccgtttttgccttgctgaggacggatggtattagcgagttgacgcgcgatagccattcttctactgattgtttatccatgatcatctggttaacttgctgctcttctgccatggctccaaattttcccatggttcccaattctgccattgttcccattggacaaaaaagaaagaagaaaattcacagcttcttatgctatttgaacattcatcttctgtgtttttgaaaacctgaagagaaaaatcaaaactttacaaccttatatacatgtctgagccatgattttccaagtctatagggaaacaaaagaactttacctcatctgaaattgaattgtagccagatttctctagctcgatcaatgattggtcgactccaacctgcaatgaaagacgaagagaagaataaaaactttttgagcttttacatgtctagtgagaaacataaagaaaagccaaaaccttaccttgtctccttgttccttttaacttcacttggagaaaaaatatccaaaatgttccccagttctttatgttcctcactgacaaattcagatcacaaatgctgattaactgtacttggagattaataaagatcaaaactttatggaagacactagtgagtagaagacaaaaaaaaataagtatagatgaaaacaacatctaactaataatacacacaagccattgcttaagaaaagaaggaagtttccacacgacatatcatttcgagtggtttctagatgcatatccattaaatgcttctccctaatatatcatatgaataacacatcaaactcattaacagccacgtattatactcaccctccatgaacaatcattgtcaatgcaaaaaacttttcaaaactcgtaaaggttagtttcgtgattggtgaaagttttcttaaaaaggggaaacacaagctgtaattttctgatcagaatgattcaatgtgttgatagtaacagaaaggaaaaatctggctgcggataaaagttaacttgcagacttttctttgaagagaagtcaataggaagtctctgtctctctattcattagaccacaaacacaagttgtaacttgtaagcaccaatgtgaggaagttagatactgagtgatctaataaatattgaaattagcccaaaatttagtagtaatctttagtggatgatctaaagatagattttgtgtacagtttataccttcaatctagtagttgacttgagtgtgaaaatggttgcatccagccaaaatttgatctgtgaaattacgagagattcagtaagtatacacacgtagaggttaagcaagattttacagaattatgcagtatgatctttaggcgagtcactgagagaaacacactcaaaacaaaaataaacttgtgactatgaatctaattcaaaaacggaagatcggaaaggagatataggggaaagtattgatcttcataattaaacaaaagaatcacagaagaaaaatcactcaattgtctctgtcgactaaaaagcaattataagttagagatgacaactttagctttatttttctagtgaatacaaacatcaaccgtaaagaaccaaccttttaagattcagaatcttaaaataattttcatcttttgtttacgaaaatcaaaaagacaaaaaaaaaaaaaaaaaaaaaactgagggatcggaaatttgaactttttattctgaatcaaaaggaagtagaaaaattacagtgatacaagagaagataatttggatggaatactcacacttacccagaaaccaagtttgttgtgtaatgagaagagaaactaaagcggaggagctgttgacaaagctgctgagtgctgacttctctcttcctcaaactcaaactgttcctctcagaataaatatttgaaaattttcaaatatctcaacacgatttagagagagaaagggaatgagagagataactaggacagaggacaaaaactaaagacaacttcgatcaaatcccgattctttaatgataatagtatttttttttaaaatatccgtatttatgtattagatgatttactttctcgaaacagttgacaaaattatataaaaaaagaagaagatacaacagtgtcactgagattcgaaaaagaagccctacggtacgatctacgagttttctcttaaaagtgctaacttcccttgggatccgacggctgcgatccatcttactacattcaattttgaccgttagatcttgttttgtttcataacgttacactctgttactgacgtgtcttgttgtacgaccgtcgatccggttaaactcacaagatttctttttaccggcccattacgtggccactgtgccacgtgttgtgtagaattttgaatctgaatgaatactttatgagtttattttacactattgtgcttctactttagtgatattacaaaactgccaggcatagagagagcctgtgtgagtcgcgtgagctatctatgcctttggcccacttctttacgtccatttgctctatttaataaattcattaaattgtttcttttttctttctttttttctggaataggaataaactaaaactcttacctaatactataacaatataattatttgaacatgttgcttcacatgacaaatgattcattattctcgtcgtatttgaccacaacatttttaattatgttaacaagtaacaaccatgaggggatgcatgaattgaatatcctttaactggtggtgttatcggacaaacaataatttgaatttaatttggccatgtgatgtcttgtttacactactcatcgttattttaagatgggacattaaatgcgaaaatctactcttgtcttcctctctcacacaaacaaacccaaaggacactttattcattataaagataaacgaaaataaaaagtacacatgcaaatgtaaatgattagataaaggcatagatatattcataacctttcaaccttatgagttatcatgaaagaccatatacagtactataatacaaaaatatgttaactttttcgttgtcaacaaatcatgaatttgtaaattacttgttgacaagaatgggtttgtgcgtcttgaattgcaaaaaaaattgaagaccctctttagtttcattaaaagaaggcctaataattaccaatttcgagtagtcttattaaagcccaattaataaattaaaggcccaaaattaaaagcagtattttacatacacatcgtgagtctattcctccgacgaccaaaccgtgctcctcgctgtgactggtaataacacaaaatacctggagaaatagattatccatagaaagcgaaagcgaaagagagagagagagagtgtgtgtgtaagaatatggcaagtatagagcaagtagctgagctgatatcatcgctggagcaagcaactttaatggcacagcaaatcggaaccaccgttggacagaaccagttactccaaatttcctctctccgcatagcccaccaacgcctctctgccttcctagcctccataccaacggcggaagctgagaaatctttctcctccgtggagccgatgcaattaggagaagaagagaaaggagaggctgagcctgctgaagaggagagatactcggcgatagagaaggtggaggagaagatgagagagtgtttcattagaaacaagagactcaagcggccactgtctccctcgtcggctgtggtggagacttcggcgacggaagagaggagtggccgtgattatgggtttgattccgacccacatgccaccaagttgagagctttggatcttatctaccagtttcatgcttgattttataaattgtagatttccagtagagagattcttttgtgattgtaaagactatttgtcggtttggtattacaaaatcaacaatttacaaagatcatctcatagacagaaaaattctaacaataacaaaccagattgggactgtattctacttactccctgattcctgactgtatggatattggtcacattcgtctttcggcaatcaacagcttgcactgcaacgttgtatcttcctcgtcttgttgccgtcactgttctgttttcaggtggcttcgtataactctaaagccgacaaaacatggatactgatggtccttctcgttggtcttattctctggcgattacgttatgcaacttgacaaagtcatccaaggtaagctcttcaggccttgactgcagcaaggtagtagaacaaatatatatgactcaaggttacaagaatcgtttctctaagaagccggtttcaagataggaaattcctcttatggacttgtggtaattgatatgatcttagaacgagctaagattctcgtgtaaactgctgctacccaagacctcatataagacatgagagagattactcacagtggctggaagaccagcaactcctagtgctttttcgatatcaggagatgatgatatgtgctggagggactttctcaacattttcctcttcccattgaatgcagaattcacctgcttaggaattcgattcagatgttttcttgttaaaaatctaagaaatagtctgaagcaagttttagctaccaaagagaagaaatttttggtggaggaaacatcaggatagtccctcggatgcttcagcttgaatgttacgacagcagcatcaacctgtaaagaagcataatcatatttctgtaatggtat

SEQ ID NO: 2 - DNA, 45013 bp, Arabidopsis thaliana
gaattcacctgcttaggaattcgattcagatgttttcttgttaaaaatctaagaaatagtctgaagcaagttttagctaccaaagagaagaaatttttggtggaggaaacatcaggatagtccctcggatgcttcagcttgaatgttacgacagcagcatcaacctgtaaagaagcataatcatatttctgtaatggtatcaaaatttagttatgatgaaagtttgaagaatcaaaaccttgggctgagggaagaagttttccctaggaactctgaaattgtattccggttcttgaaacaaaggagcaaaactacattgacgaattgcaatacatataaagagttaaaatgtcaataatggaacaagtacgtaccagaatagaagttgatcaaaatgttgatgggacggtattcagatgttcgcagtgctggttcaaccaatcgcaatgctgcctcgtcctaagattagccaaatgttttttgtcacaattgaatatataagcatttgggatcataatactctaaaaacaagtaatgaatggttaacctggagtaagagaacaacttttgagaagatatcacccataggaagtagaagcttcacaacatcagtacttatattgaaaggtaaattggaaacaacctgcattaacatacaattccattgtgtaaataatgaattgagaaagatgtggttcctggtgctgagttagtaataaaatgtaccaaaagagaaactagagtgacctttgcaagagcagaatctggatgtgataaccttctagtctctaaaatggagagcatgtgagaacggatgtgacacttgacaaaatcctcttgcaaaaccttgaacttgtcagaaccagcaaatcgttcgctcaccaaatcaaccatatgaggatcctaaaagatgaagttgcaaaatcagaatcgaccattttgctatacaaaacaaagggtgcttgaattgatatagcaagcaaaccttttcgatggcaagaactgtagcacctaaattgataaggacattggttaaagaaccagtcccaggaccaatctctaatacaaaatctccttctttcacatcagccgcagaggctagctggtcgttgatgtccgaattcaacatgtaatgctgtgacagacaattcaaaccattctctacttaatgggtgttcgaccatttgtctcaaacaaagctgaggattttaagctatgtggtctacgagtggattgtgagagaacctggccgagggactttctgggaaaccgaccacgagaattgagtgatttgagggttgagtggtaatcatctgggctgctcttgccgcatgacaccttcacggtcctccgtcgtgataacgcggcagatatttcccccaacagaagctttgacggcgaattgtctccgcatgtccatgacggcgacagagagttgcagttgatggtggctgatgttattaccgcattcatcatttccgataagaccaataaacttcttctgctctctctactaatggaatcagtttttgttttagaataacagtaacgttatattacgtatctctatagataatgccacaaggtgctgtggtgtagtggttatcacgtttgccttacacgcaaaaggtctccagttcgatcctgggcagcaccaattgtgttttgcaattttttaataagaaaaatgcaaacttccttttttcttttttatatacagaccaaaaaattggtatgatttactcaagaatgattgttctatccaaacaagagacgacgcctgaccgactttgtaaggttactactactagtagaagttgcctgtctcttcttttccgcagaagcttttgaactcccgcctgtctctatactttgacctgctgctgctttcttcgctgaacggtagaaatcggtaatgcttctttgtacacccattgttgttgctcttggtgttgctgtttcttcttcagaaacattcttctttttcgactctctcagtttctgagagttttaacaaacataaacagtcaaggctaagggaagaaaaggcatctcatagagatagcgagagactgagagatccaatgtattaccttctcatgtagaaaatgctctgtttcatcagggaaagcagactgaacaagtcctatgcattcatcagttagcaagaagcagtcaccattatcattttgcacctgaggttcatttaaaccatccaacggatcaacagactcttcttcttcttccaatacaacaattgattcttctggctcgctgtgactatgactataaccacttgtagatttgggttttctccaccttattacaaaggactgatgcccatatctagtttttatgcacttgattgaatgaaattcgtattgatcacacaacaaagcgtatcctgtgttgtttcttgccttttctctcagataaatggtcgacagcatcggaagcaacatttttctaacataagatgggtcccagtgcagtttgaaaaccatgagatccactagcattccagtatcaggagttccccaagacattgacgatccatctcctgcttcagaggtgcataaacattaggattcagaacaatgatcatgcaatacggacacgaagtcataaagtcagtgcaaacctgtcatcaaaccatcggatagataaagttcaataatctttctgttgggaaactctggcgctagagcaatcttatcgcagactttgatccaccaatcattggttttcttttgttcccttaaatctcgatccttggaacaaaaggagcattcacatctaaaccctaatggttttttaatgcaaccactatcacaaccgcagtgctcacaagaggacttaaaatgagttctcttgctgcccaggtgtccacaacgggaacagtgaggagatctttttttcatctctgagcggaattcttcaccatcatccccggatttgattccaccaggaactgcaggttgcaacccatttccaatgtcctgtagtctgcacgaaaatatatatcccaacacattcaagaaaatgacaagtcaccaaaaagcagagacaaaaagcttatggattataacctttcaagtacttggtcttcagaaaactcacgaacaatgcgcagtgctttatccacaccaatcccaagaacaccgcctgaatcataatcgtttcccaccaatagagaaatagcaatcaagtgtttccgcttcaaaccgaggccagactcgatatgtgacatatggtagcattcaaaaggttcctgcacacaaggaaattaagatggtaaagagacgataagtgagtcagggtaatactcagttacaaatgaatacttactcttgaattaggcttgatgtctttgatcacgcacatagcaccaaaaaggaaagcatcactatcaggagtaatgcaagcatccacaaaaccttggctgtttaactgtgcacagagagcttcagcctcaccattagctttcagcaccggaataccgagcaattcgagtagctcctagagaaccaaaaaaagtcataagaaaacaatgtgaaacaaaacaagcataaaggtttgaagggaaagccatcttaccacacattccctaacccattcagaaaacagcttgtttctctcaaccgagacaccatctttaatcacaggtagattacaagtatcaattccagaagaacggaaaaacctggagattctcgcctgagatttcaaaggtgatggtgttccatcaaccacaaaaaccgggtacgctccaaactgcaaaaccctaaaccgcattacaatcatctccatagaaaaaaatcaagatttttcaatcaagcgaaaacctaaaaaattcaaaaaaacccgtaatccacagaaaaaaggaacttttttagccaatgccaaaaaaggattaaaggagacgaaattgggaaattcagtagaagcataacaagagagaagaagcgcgcagcaataaaaaaaaaaaaaatgggacctttgagaagaggttgatagtacggaagaaagtgagtcggaggtgaggtttaaggacgaaacccttaacagcggtttcatgctgaacgatccagaaggagagatcaacagcgactcgtttgtttctgagaaaatcaaagccttgttgctgagcatatggtctcagcaaatcccagaaattgcctcccacacccattcaatcaaaatgccgtaatagcctagcggagcggagcggaagatcacaaaccgaaaagcctaaaccagcaaaaggcgaattaaaagaaaaggaagccgaaggatagaatcaatttctgaccgttatgcgagtcttgttggactcgcttgtgttgtgcctatctatttatggcatcgtcacatcacccgccacggttatgggcccaacaattagcccggatgatatctctgtagcccattaagtctattaagaaaaaataaaataaaaaactatttatacagatcgcccaccgtggggctcgaacccacgaccacaaggttaagagccttgcgctctaccaactgagctagacgggctttgttggttaagtattactctattcaattgtctagtagaaaaccagaaaagcattatccaaaaatgtgcaagtatggaccttaattggtgtctcgctgaggcctgcgggtaaaatagtgaaacacacgataaaccatttctagactgtagttatccttttttaaaagggtattgaattaaatgagaagatacgatgaatatctccgaatttcataggagtgaggacatcaaagaaaaaaaaaaaaaaatgtaagtcgtcggcttacgtgttcatacttggcttgaaagccagtacacaaagggattatgagtgaagtgtgaacaagcaatgatttgaatcataggaaatatagaagaaaacttggttatatggtatgagtaatatattaagtcacgccccaattattgttgcgtttgtcccctccctctccatttaatgtccacctacccctaccggcggtggaagctgcctgcattcctcgtccttcttctaaactactacccgttttcttttctttttttcctatttaaaactttcacggcttttttttctttttctttgtatagagtaaagattattgcaaaattcccacgtcttagatgaaaatttgcacctcataagactagacttgttcattacgtgttccatattctggtaggcaaatatttttatcattcaaactcttctataagtgatattaataaaaagcttgtatttgtttgtttttattggtaaatatataaatgaacccacgtcccctaaaggctaaagcaacattcagtaacagacggtcccgcacaagaacctcacaacagcgacagttacaaaacatatcatatatttcatttaaccttttcgtatatattactctttctagtcacattttcctcagctcccactgctcacagtattcacacgtcacatatatatatcttttatgtgttatatacccacagagaccagtcctaagaatcacatgtagatgcatcgctttcttttaatgctcttatttccctttagcgacaaccgtcccatgatgttcttcagatcattcatcgttttcttctttcttatctttttcgcatcaaatgtttcttcccgtaaacaaacctacgtgatccacactgtcacaaccagtaccaaacacatcgtaacttcactttttaattcactccaaacagagaatatcaacgacgatgatttttctctcccggagattcactatatttacgagaatgccatgtctggtttctccgcgactctcaccgacgaccagcttgatacggtgaagaacacaaaagggtttatctctgcttatccagacgagctcttatctctacacacgacatattctcacgagtttcttggtctcgaattcgggatcggtctttggaacgagacgagcctatcttcggacgtcatcatcggccttgtggacactgggatctccccggagcacgtgagcttccgagacacgcacatgactcctgtaccgtctagatggagaggttcgtgcgatgaaggcacaaacttctcatcttcggagtgtaacaagaagatcattggagctagcgcattttacaaaggctacgaatcaatcgttggaaaaatcaatgaaaccactgatttcaggttagacggttgaaatataaatgagccctctgttttttaacttcttttgatctcacattgtttagtctccaaatgttaatgggaataacgtgaagaataacttccaacttttaccaaaaaaaaacttctaccatatatattatgcaaatataactcgtataaacacataagatataattaaaaacgttgggtagctccataacgttgatccgaacatcaaattaccttcctcaaaaataattgatcaaaatgaaaatgcttttgatgacttttaactaaatattttgtttgttaattcaagatgttctcattaaaagttattactaatggagagcccttactaatggttccataggtcgactcgagacgcacaaggacatgggacgcatacagcctcgactgctgccggagacattgtccccaaagcgaattatttcgggcaagctaaaggtttagcttcagggatgaggtttacttcgaggatcgctgcttacaaagcttgttgggctctaggatgtgccagcaccgacgtcatagcagccattgaccgagccattttagacggtgtagatgtgatttcactctcgctaggtggatcatcacgcccgttttacgtggatcctatcgcgatagccgggttcggagcgatgcagaagaacattttcgtgtcttgctctgcgggtaattcaggaccaactgcatccacagtgagtaatggagctccgtggttgatgactgtcgctgccagttatacggataggacgtttccggcgattgtccggatcgggaaccgtaaaagcttggtcggatcatccttgtataaaggaaaaagcttaaagaatctgcctttggcgtttaacagaacagctggagaagaaagcggagccgtgttctgtatccgggactcgctcaagagagaactcgtcgagggtaaaatcgtcatttgcttaagaggagccagcggcagaacggccaaaggagaagaggtgaaacggagcggaggagcagcgatgcttcttgtgagcacagaggcggaaggagaggagcttcttgctgatcctcacgttttaccggccgtttcacttggattttccgacggtaaaaccttactgaattacctcgccggagcagcaaacgccaccgcctccgttcgattcagaggaaccgcgtatggtgcaaccgccccgatggtagccgcgttctcatccagaggacctagcgtcgcgggaccggaaatagctaaaccggacattgcggctcccggtctgaacatcctcgccggatggtcaccgttcagcagccctagcctcctcagatccgatccaagacgcgtccaattcaatatcatctcgggaacctccatggcttgtcctcacatcagcggaatcgccgctctaatcaagtccgttcacggggactggtcaccggcgatgatcaaatcagcaatcatgacgacggcgaggatcactgacaataggaaccgaccgatcggagatagaggcgccgcgggagctgaatcggcggccacagcgtttgcgtttggagcgggaaacgtggatcccacgcgagcggtagatcccgggctggtatacgatacctccaccgtcgattatctcaactacttgtgcagcttgaactacacgagtgagagaatactcttgttctccggcactaactacacgtgtgctagtaacgccgtcgttttgagtcccggtgatttgaactatccctcgttcgcggtcaacctcgttaatggcgcgaatttgaaaacggtgagatataagaggactgtgactaacgttgggtcaccgacttgtgagtatatggtgcacgttgaggaaccaaaaggtgtgaaggtgagagttgaaccaaaggtgctcaagttccagaaggccagagagaggttgagttatacggtgacgtatgatgcagaagcttcgagaaattcgtcttcgtcttcctttggagttttggtttggatatgtgacaaatacaacgtcagaagcccaatcgccgtgacgtgggaataaatttcgcatctattgattgccattttcatatttattatataccaaagaaacttattgaacaaaagcttaccctaaacttgtaagaatttgtcaataaatcaaaacatctcttatttactataatttttttacatgaattttccttctctgttgcaagaccagtctacagtatataaaaagctgttacaagagatcatagcattcgcttgtcacagatacccttcaacttaatatataaaaagctgattaagtcgtaaaacaacgatttcttggtagatatgagtctatgtagtcatgattattacaaatataaaaacaaatccaatgcataacaataaaacaacgcaaaagaagattctgcttgatcttctttcctgtcctataaagagttgttgctagatgaagaactagagagaaaaagattcagttttaattttccacctataaattgttcaaaacataaacaacaataaacccaaatgacaacgcagatccagaagacccccatgtagaaagcaagtgagttccaagaatatggcgaggaaagaaacttacaattaaagggaagaacagagccttatctttagccactcttgacccgttcgagttcttcttcagctgtttttaactgcaaacgcaatgtgtgtactttcctctccagctcctctacattgctcctgctagtggtaggatggtacggcgtcaagaacttatgtgaaaacgcctttaaggcttcaacccctgtcacctgtgatccaaacatccacaacaagtgtaaatctcaggatgtatattatataaggctttagtttcattttcgtcttgatcatgttccttctcatctatattgaatgtcatgcgttcttacctcttccggaagcagaggaagctttgtgatattaaagtcatcgtatagcatataaaactgatcaagatacttctgttgcatccgcatccttgctctgagcaacttggactccacatctacagaagacaagtgtagataattcgtcaaatttgtatgtaaaacaagttcaaaacgagaagatagacacgacagcaaataaataggcaccttcgtcgtcgtatagtacttggttgatgataatgttatgcgtgtcaatctcaaacttggcgagttcctgaacaagtctctctgtttcatagagagacaagaactcggggatgcagacacaaacgaacgtagtcatatcctacgtaatggagccaaatgtgtcaatttcttatcttaaaatgcagagtttgttagatatgtatcagaattttcactaatgcaaatgaatgctgtcaaaccgtatgctacagaacaatgtgaagaatctaaaactaaacttcacgaacagagttaagaaaacagtcaatgagtactgaaaatagcaaagaacttaaacaattgaaaaaatgttaccgggtctttgaattgccgatttacttgctcaatcacatctttcaagccctcaagtcttcccagcaaagcatcctctccgaactcatcctccatgccaaacatacggctcatctgcattaccaatcagttccatgaaaaatcagccaaagaagaaaccaaagagcaatatctgttgccaagcaaactgaatttgacaagcttaaagacatgcctgagtcatcaagccaccaaatctactcttcaatgacatcaacttcgaaagtcccttttctagtgtggccggaaactgtaacaggcggagagtatgtccagtaggagcagtgtcaaacacaatagtagcataatccattgtttgcaccaacctaaggaaacataaacatatcaaaatttgactgtgataatacatggataaaggcagatgattactagaagaactaaatggctatttacttcaacatctcagcaaaactcatagcctcatcgattccaggaatcgcatttgccaaatcagagaataaaccatccatcccgtctgtaccagccatgtcatcagtttcaacggtaggatctacctcctgagaaaagcaaacaagattcactcactatcaagagggaaggagtgtgaatcgtaaccatttgcttatagtatgtgtatatatatacatatacacacagacacaactaagagcttcaagcttagaagagtagccataaagtcatcatcaagcctgtctattagaggcgacccagaaccacaaaaaacaacttttttttttttttttgaatttggcataactagccatgaattttaactacaatagacaaaaattcgatttgatttggggacatcaaatcttcttcacaatccccttccgtatcaagaatacaaattggcgtccaaattccaaacctaatccccaaaatcagagtgggcatatgataagaaaggcacaaatcaaccgtatttatgcaagtactaaatctgacttcaaaatcaaaattgatccatcaatctgcggtttgaaattcgtgaatcagagaaccctaattcccaatgagattaaaatccaggagcgaaactaccaaattccctctaaaatctagcacgatctagaacaaaatcggagaaagcttaccatggcaaagagattagagaaaccttgaaccaaagtgggagatttagtgaagcgttgctgaaaggcatcactaagattgtgagcaggatcggtggagatgatgagaacggaggatcgaacactggcgagacaaattgcgagaattgaactgcatgtcgtcttcccaacacctcctttacctccgacgaaaacccatttaagagactcttggtccagaatgttctgtactgtcgcctccggcaaatccgccgccattgctaattccttgctcgtctctcttccactagtctcaatctaaagagctccttgttagatatttggcgtacggaagagtttaactgcggcgagagacttttaacgccgcccggttcaatattttggttctcggttttgggatatcacagcagtcttggtttgatttttttggttatcgtttttcacttgttcaatttttctttttttgttaaaaatttaaatttggtgtgtttaagttcataaacgctaaataagcccatacaaaagcccacatagatgaagccattacgacagcgtattgtgagttacgattgaaaacccctctctactcggttaaacccgtcgccggcatattgatcttcgccggaggatatggcgatttcagaagaagaagccaaactcgaaaggttcctagattggcttcaggttagatccggattaagtgttgtttttcagtcctgatctgctgctctatatcatggcattttgtgtttcgatctaatttcattcaggtgaatggaggtgaattaagaggctgcaacatcaaatattctgactccctaaaaggatttggcatattcgcttccacctccactcaagcttccgatggtatagtattgttcttaccatttcttgctgggtttttttccggggaatatgtatggaaagttgatattgaattctgattcagctctggaaattttcagaagttttgcttgttgttccgcttgatctggccattacccctatgagagttcttcaggaccctctcctgggccctgagtgtcagaaaatgttcgaacaaggacaagttgatgaccgctttctcatgattctgttcctcactttggagcgtcttcgtatcaattcttcttggaagccgtaagttttttttttaatctcttagcacacatttacgtaagcttaagggtattcatctgtctagaaatgatatgataggtatcttgatatgcttcctactcgatttggcaatcctctttggttttctgatgatgacatccttgagctaaaagggactaacttgtatcacgcaaccgagttacaggtctcaatcttgatcatttattcctgtcttatcatatcgtccttaaaatagcaaccacattttctcttttcatttattaaacccaataaccatcgtgtattcattctcagaagaagaagttgctctcgctttaccatgacaaggtggaggtcctggtgacaaagcttcttattttggatggcgattccgaaaggttgacatatttacactacttttagaccaaattattgttcattgataatcatattttgttttctctcttcgtgcagcaaggtctcctttgaacacttcctctggtatgtttggtactggtgttattccttgttagtagaaccagacttttgtgtcttgtaaagggctgcttagtgatcttgcgacttttttcaattatgccagggcaaactctgtattctggagtcgcgccttgaatattcctcttccacattctttcgtgtttccacaaagccaagatgataccggggaatgcacatcaacaagtgagtcccctgaaacggctccagttaattctaatgaggaaaaaggcaagtcattaacgtcggtctgctgaattctgtgtgaaatgcctcttttttaattattattattctatcatgtaacgacaatttcatgggtttcttcattttctgatgggtagaaattcaggctcaacctgcgccatctgtaggatccggagatacaatatgggttgaggggcttgttcctggcattgacttttgcaaccatggtatgccaatctttgtttcaaaaagactctattatcagtttctccgttccataatgttgatatggttaatgagtatatcccagtgtgatgtgatataatgacctatggttatggcagtatagatttgaagcctgtggcgacttgggaagttgatgggatcggatcagtatctagggttcctttctccatgtaccttctctctggttggccaaatatttgtttgtgttacctctcagctttctacaatttttcaatcaaacaatacagaacattctttttcctctcttctttttgatctgtatgcggaaaactaagtgctacaattctgtaaagcagttgctcaacgtcctatcccaaagaaggagatctcgatcagttatggtaacaaaggaaatgaggtaagatgttttgcagctatcttgtacaactatataacttgtctcttggtaaaaaatcacatctagccctttgtttgagtgatgtgccttcttgctgaatgcaggagcttctttacctgtatggctttgtgatagataacaacccagatgattatctcatggtaatatttacatccatcaacagttccctaccttttcaaccagtgatgtattatagaagtcttgagaatgatgacgagaaacataactttcaagatcaaggagatgctcgtcaattttgttctcacatctgttgttacgtttaacaatggatttattcaggtacattatcctgttgaggcaattccgagtatccctttttctgattccaaggggcagctgcttgaagctcaggttagcagtacaagtcttcgcactatcttacccgaagttttgattatagaccctataagacaatgtagctctttaatacatttatttccatgtaatatgtaactgtcgaactctaaaaaatatcattgcagaatgcacaactccggtgtctcttgccaaaatcggtcctaaatcatgggtttttcccacgaaccacatcagtaattagagaaagtgatgagaaggaaacagtgagatcctgtaatttcagttggtctgggaagcgtaagatgcccacatatatgaacaaactagttttcccagaagattttatgactggcttaaggaccattgcaatgcaagaagaagagatttacaaggtctcagctatgcttgaagaggtatgatcaccgttttttctttcttctgacatctgaaacccatatcctacacaaaaaatctccatctctgaaagagtgaaagtagtaacttgggaaacgaaggcggaatcataaatatccacagtttgtcttccactagataatgagacaaaagtattgttttcctgaaaagcttgttgagtcaagacaaggcgagcaaccttctgaaactgaggtcaggatggcagtatgggaagcatgtggggattctggagctttgcagttacttgtggatctccttaattcaaagtaagcagttgaatttgaacatggattcttaagggctaactaagatgtttgtctgtgggatgagaagaaaattacagacctcaatgctttttgtcctgacaggatgatgaagctggaagagaattctggcactgaagaacaagatgctaggctccttgaggaggcgtgcgtcttagagagccatgaagaatcgaggtacaatgtaaaaaatctgtggacatgtcgtttagatattgattaaaaatgtttataaaatatgttttgtggtagggacttggatgggagaaggatgagcagaaacaagtggtcaagtgtagtgtaccgtagaggacagaagcagctcacaagactgttgttgaaggaggcagagcatgcccttcacttagctctctcctctgaccattgactgatatctcatcggtgttttattgtagattattttaaacatatccatttcaaaggctaaataagcaaattgtgtgatataacaattattagtgtgtggcaccaaattaacggtctatatattttaaagtaatacccaaatcttttagctaaaccaatataaaatcttttcatctaaatcaaatctggtgcaaaatcaataggatttgcaaagattcggtaatggcaccacgccatttactcatttactcatatttagtgccgctactctttcttgatccttaagaaaaaagaaaaaaaaacttgcaactctggatcgagacactattgatgtgaaaacaaggcttcatgcatatatatatatatatatggaaatattgagaagtcggtttgtggtctaaacgggccttctaaaaacaaatttgtgtgtggcctaataattgagtcggtaatgttgtgcactttaatgatgatactcacttcttgtttttcaaactttctcctcttttacctaactcactaaaaagttggaaattaacttgtgcttgaactgctttgaatgttaagtgatgccatccgtctttctgcagcggctgctctcttttccctctgtgctgccattgctctcctcacttcctcctattacaacaagatttacaccaaagacaaagcaaatgttgacatggcttctccttaaatatcagactgagatcagattatacaaattggggtttgtgaagctaaccactttagaaattggcttctccttctccgcctgcgcagcttcggcctgcaaacacagggagggttagataacaagtctctactaatccgagttttgtttgaaaaatagaccctgattcaaaacgttacctgagccttcttttctcgggctttgcgtagtttcttcaactcctttgttcttgctttctgcttggcgtctttttctgcctgaacaacaatcaccgtcacgaatcaagttagtctgatgatggattcagactcccatatgcaaccacatgtctccgaaaatcatataccaaatcatgccagaacaaatatatacgacaccaattaatatagtatttggcagtcatcggattctaacacatgaccacacatacatcattaactccgggatagagctcaacctaaaatcccaatgcgcaatgaaaggactaactgcactagtcctattttgcctcatgcggaatccttaaccaaacttctaaattcaacaaataacaaaccaatgcaagtacctgcttggcagcttgagattcctccatctcttttgtgagcgggctgggtactttagcatcatgccaattccatttttcaaggtttaacgccataaaccgtctgaaagtgtttctcacttccttctcatttgcaagcatgtatggcgttctgcctctttcatccttagcacaaggatccataccctcctccaagaactccataactctttcacaatcacccgatttggcagcttcatgtaaggcagttgacgtaccagtaactccatcctcgatatcctcttctatacgatttggttcctctaagattatgttgctagaagaagtttcatcgggctcttcctttcttgaggttttgccagaatcctcattgtgggtctgcaccactgtattagctttggtgacttctggtcgattaacaaaaatctcctcagttacatgtgcaatctgagtcaactgattatatatacgctgtgattccttgaaggttggccgacggatcgtaaatggaacgtttcgtacagcgcagttttggctgctaaagtacggtttgcctccattgaaaagtaattgcctactgcttgagggagcatggacaaaaacacaagcagcaccatcaaaataaggtttccagctagcaagtagctcttgaatatcctaacaatagagagaaaaatgacaaaaattacacttcaaggctatgaattatctttcctagaggtaaaaaaatatataaacattttttctttatgttttccttcctatgatcctgatcccggttgataatcatcgaggaggcggccaatgtttccacccgtttaagagacctaaatcatgtttacaaaactatacaccacacttccgagttcagaattgcctttacaaatggacagagccgcatatattattataaaaaatcaacgaccttttgtaatctcagctgaaaagagaaggaaacagtagcaaaacatgtccagagacaaaccttttttaaagcaagttcattgtaacgacgaagtgaggctccggcagagtgtatacttctcccgcttgcatcttttgtggactgctttttaccagccttggctcttacaacatatctacacatagggaaagggaattagaggacaaaaagaggcaaaggactgtgaataaagttttatgaactgagaggaaatgagaagagaagtacctgtggaatgtcttatgagccacaaccgactttccattaaagacagtaccggcaaagtggccaccacttgcaagcaacacgacacgcatttgcctatcatccttattctctcgaatcaaatttctcaacctctcagtaacttcattctcgaccaagctaccacaacagtcaacagaaactcctctgtcattctcgaacgaaacactttcagcgtcgtccatgattaagcatttccagatagaaactttgtcaccactttgaagacggaaaaatagtttctttttatcaatacccttttgagcatcaaagtggaaagagggtggtctagtctcagcttcgtcctctgaacctgatatgctagacacgtcatagtcttggaccgactcagatgtcaactcatcaacatcttcctcttttaatatagccttgccagcaacactcagcttgatctacaaatcacagcaaccacattaaggcattggaaaacgaaattgtgacactttttttttccatataattgctcgaataatttagtcggaagagagaaatttgtacgttaaggcgatgaatatcggacttgaagtggtagcgttgatcttgaagagacaggaactcaattttacaagtattacaggtccatctgtccaaaatcacgccgtccttggaactcttatcctcctccgcctcctctggatcgaaagttttgggtggtccgaatgccgattgagtctccgaaggattcgacaaccgacacgagtcaaagaaatccgccgtcaagtcaaatatcgatcgaggctgtttatattctggattaccaatctcggtggtggccgccgcgccggtggtcgccattaattatgaattggacggattgattttcctaacaccggtaccgataccgataagtgtggatttgaaagctttgtgagataaacgattccgttttgttattttcttaaatggatccataatgtcattaaagtggcccatataaggcccaataatacaaggcggcgatgcagaaagatctcgaacgaacaaaagcgccaaaagcatcctagacgcgactgagaaaataaatatagaagaaagcctctctgctcgttttgcgtttccgagcaacaatggtgagtcgtttgtccattgttcgttcgtttgtcctttgttcgttctagtcagttttttttttaatatagttctggcgatatttgtatttatatgttcgagtttcctggttttgattattgcagtcggtaactttgcacacgaacctgggtgacatcaagtgcgaaatcttctgtgacgaggttcccaagagtgctgaggttagttattcactcagctcatgtttctcggtttcgatttgagctgttttctttgaattgtttacaaaatcagtccagttgaggcaaataacaaaacaatattcactaggttatctagtgtccaattagctattacctggtgctgggttcttgtattgtatggatgatttttcttctccttctctggattgtttttaatctttaggcgaaattagggttatatgaatgtcatgattggggaaattatttttccctcaacagtgttggtgtataggttcattatttttcaatgcgtattcattggatcactgagctatttctctctgacaattttcgcaagtttttccatgtatgaagcaccttgacctttagctttgatctttcatattggtgcagaactttttggcgttgtgtgctagtggctactacgatggtactatctttcatagaaatatcaaagggttcatgattcaaggaggagaccccaaggggaccggaaaaggaggaactagcatctggggcaagaaattcaatgatgagatccgagactcccttaaggtatctctattctcatctctgcttatactttccctttatccttcaaactgcatcttcaatgtaatgcaactgtctcatggcctgttggtgtgttacctcttattcagtgtcttcataatccatgttagcatccatccataattatagacttcttttagctcagaaccattattagtcttagaaaaccaaagtggctgagtacactatcctgatctgttccttctgactgtaaggtaaggtatcaatgtgttttagccaggtagtcatatgcatgccattaccctactcataaccgctagtgcaatccctcttgcatttaattccagggaagtagatagatttgagtctgttgcgaatggtcttatctatctctctagttgttcttgataatttaccagattccattctcttatgcagcacaatgcaagagggatgctgtcaatggcaaacagcggtccaaacaccaacggaagccagttcttcataacctatgcaaaacaaccacatctcaatggattatacaccatctttggcaaagtcattcatggcttcgaagtgcttgacattatggaaaaggtaaaccaacctcttaccctcttaaatcacctcgtctttctaagaagagtttgaactcttatgttttcttccttactgtgactgttgttagcctaaatcaagtgtgttaaagaagaatgcttgttagttgttggtgatatgaagcctggaacaggatttattgatctgaattttgtttttagaaaactcatctaatgatatgattgtggcctgttgcagactcaaacaggaccaggagataggccgcttgctgagataaggctaaaccgtgtgacgatccacgccaatccacttgctggttaagtctaatgtggcagaaccgagccaagccaaaagtgttgttctctttatttgtttcgatagagctgacatgtacactcagaaactgaactaagaccactgtttcacccaattaaaaagtttgtactggaggatttaccaattactgtcttcaaaggtgttttgtattatttaaagacaaaaataattttttttgcccaatacttgacgccgtattgcaatctcgccaacaagatttcaaatacacaataatctatctgctgagtgtgtaataataactaataagattcaacgtgggccatcaaattcgaaccaaatcatgtaaatgggctcagccaaacccgacccggatcgaataaaaacggatcccttccactaagccgacccgttcggcgcaattaaagcggccactacctctggctagtagggaccgaaccacactgcgcagtcagcacaaacctgaataagggtaaaaaggtaaaatacggtactctcttttgacaaaatgggacccgttgtaacgcaacgactgtctctgtcttcattcaaatactaaacgcgtgtgggcccgccaacctcctcctcctccatcactgttttttgtttaaacaaaaaaaaaacacaaaatgttaaaagaaaaaaatataacccaaaaattgacgaaacaaaattgagaaacaatacaacaccactctcttcttcttcgtttgaatttgttcttctcttttttgcatagagaagactattgattagaaaatggctatggcttcttcgagaaatggtgcggttagaggatccatgagaccagtctctggagctaattcatccaatctcagatcgtcttctttcaaatccaggattccttcctcggcgcctgctccccgtcggagctcctctgcttctatcggagccgcagacaatggaggtccgttttcatttctttatcactgatttgagttttcactgactgtcgattccgtgaatttatcaattttagctttgtattagttaagcaactctcttcctattgctggggtgctgatccctttccctttaattgcttcttaggagacgattcttcacttttattgattcgattcattcttctctactcgatgactattttttttgtttttattttgcttctgtagaaattgtgtgtttatgtgttttttttctggtaactgttttgacagtgcctgggagagttcgagtggctgtaagattacgacctcgcaatgcagatgagtcagtcgcagatgctgattttgctgattgtgtcgagttgcaacctgaggtttctctccacttcttaatataaacttgaactgagtcaggggtttcatctttatcactcaattgtttcaatcccttctctctgtgtgttagcttaaaaggttgaaactcaggaaaaacaattgggatactgagacctatgagtttgatgaggtgcttactgaagctgcttcacagaagcgagtctacgaagtggttgccaagcctgttgttgaggtctctttttctctccttcttcattatgtttatactcctttgctccttctttcttggttacccttgggagtatctttacagtgaaattgctttcgatttgtagagtgttcttgagggttacaatggaactgtgatggcttatggtcagactggtactggcaagacttttacccttggaagattaggagatgaagatactgctgctcgtggtatcatggttcgatcaatggaagatatcattggaggcacttctctagacactgattctatctctgtctcatatttgcaggttgggatactattgattgattctttagtttatttttattccttttactttaatatcttttcaaacttttctccagctttatatggagaccatccaagatctcttagatccaactaatgacaatatcgctattgtcgaagaccccagaactggagatgtctccttgcctggggccacgcatgtagagatcaggaaccagcaaaattttcttgagctccttcagcttggggaaacacatagagttgcagccaatacaaaattgaatactgaatcttctcgaagtcatgcaattctcatggtaattcacctctgtttagccttctcaactttctctggaacttcctaggccttagatagaacctttacgttcatctctattgttattttgagttgatgcatgatcaatagttcaggtacatgtcaagaggtcggtggtggagaacgagtttccagtctcaaatgaaatggagagctcatcccactttgtcagaccatccaagccattggttaggagaagcaagctagttctagtagatcttgctggttctgaacgtgttcacaagtcgggtataaacctctaataatcaaatgagatagcttgtcacagcccttgtacaaatcagatttactcatttcttcgttttccctccatgagaaaagtctaggatacttatttccttacgggagtgctcattaccaccacctttcttacaatgcaggcagcgaaggacacatgctggaggaagctaaatccattaatctctcacttagtgctttagggaaatgcataaatgcaatagctgagaatagccctcatgttccacttcgtgattcaaaacttactcgcttgttgagagattcatttggtggttagttatcttattgctcataggctaagtcctattgtcttgaattctgaattcctaataaatggacttttctatattaccatttgttgtttgcatttcaggcacagcaagaacatccctaattgtgaccattggtccctctccgcgtcatagaggagagacaaccagtactatattatttggtcaaagggtgggctcttactactttaacctaacccctagtgtagaagtctgttgagaaatttcaattcataagtgtttttaaatcttgggcaggccatgaaggtagagaatatgttaaagataaaggaagaatttgattacaagagtttatccaagaaacttgaggtccaactggataaggtgattgctgaaaacgaaaggcagctcaaagcatttgatgatgatgtggagagaataaatcgacaagcacaaaatcgtatatcagaagttgaaaagaactttgcagaggccttagaggttagttcatgcaaaatccagttaggctctccttggcataacctgaaagaatagaagaagaaaatcagaaaaatggtttcatatgtttggcttttaaaagcgggttatttttttctttacattctgtttacagaaggagaaactaaagtgtcaaatggaatatatggagtcagttaaaaagcttgaagaaaagctgatatcgaaccaacggaaccatgagaatggtaaacgtaatggagaggtacttgcccgcggaactctgattttcttttcaggtgatgggagtgttcgaatctttaaccagtaaatattactttgcaggtcaatggagttgttacagctagtgaattcactaggctcaaagaatcacttgagaatgaaatgaagttaaggaagtcagctgaagaggaagtcagcaaagtaaaaagccagtcaacactgaagacaagatcaggggtacccattgtttaaattctctatggcttcctctatctctctccccttgtcaatgatttaacatcttagataatatttaaccaagctctctggcgttttaggaaggcgaagatgctggaataacaagactacaaaaactgctggaggatgaggctcttcagaaaaagaaacttgaagaagaggtcaccatattacgaagtcaacttgtgcagcttacttttgaagctgatcaggtacggagtgtatgaatttgagtgtgtaaaattgagggtgtgtactgtaagggtctctttagttgctgtaaaacaactgtctctatacatcagctgaagaattagtctccttttgctcaaaaaaagaaagattagtctccattgtatgccctctttaaaaatacttttaaacacgcacggttagagtttctttgaactatctattgtgaatatgaggcatatattcacatatcactattaattgcttcctgtacttgataacgactgtatcttggtaataaatttggtccaatcttgagtttcttgaatgcgttatctaacagttgagtcttattcttccagatgagaagatgcttggacagaggtgccccagggaattcgtactctggcacagactcattaccatcacgacattcccaagcaagagaatctgtgaacggacagaaggcaccgtttgctacactatgtgagcaaggtaatggaaatttcttctaaactatttgaaccagagtgtatacaaatgcctttgtggttcttataacttcatatcctctttgaaacagtgggacttcaaaagatcttgcaattgcttgagtcagatgatgcaaacatcagaattcatgctgtgaaagttgtggccaatcttgcagctgaaggtaactatcatatatgcatcatctcaaaggttcaaccatagttttttttactctgggttcttactgttttccctttttctttttggggttgatacacagaggcaaatcaagaaaagatcgttgaagctggaggcctgacatcgttgctaatgcttctcagaagctacgaagatgaaactgtgcgaagagttgccgctggtgcgatcgccaatctcgcaatgaacggtaaactctcattgctactaactagtatttagtggttagacagacaatggaagcagaaacagactaattatatggcttttggtcacttggtggggaggtacatgctcatgtgtttagtttttttacggggtaacagaagtgagtcaacaactgatagtggaccaaggtggaatcagcttgctatctctaacagctgcagatgcagaagatccacagactttacgcatggttgctggggctattgctaatctctgtggcaacggtaaattaacatccccaacattttattttgaacaagaaaccgaccaatttcttaaaacctttttttttatgttgtttggtagacaaactgcaagcaagactatggtcggatggtggaataaaagcgttgttaggaatggttagatgcggacatccagatgttcttgctcaggtggctcgcggaattgcaaactttgccaagtgcgagtcccgagcaaccactcaaggtaatgctcttttccagtattccttcaaggtcattcagcctttagagagagagagagattggtttttcttgcgtgggtttataatgtgaagagtgtatgaaggtgtgaagagtggaagatcactactaatagaagacggagctcttccgtggattgtacaacatgcgaacgatgaagctgcgccaatcaggcgacacatagagctggctttatgccatttggcccagcatggttagtgcgatccttgtctttgtctttgtggtctttttgatccttgttgtggttcatcatgttcatttgattgtttggtgggggcagaggtgaatgcaaaggagatgataagcggaggagcattgtgggagttggtgagaatatcaaaggaatgttcaagagaagacattcgaagtttggctcatcgtactctctcttcaagtcccgtcttccgttctgagatccgtcgcctcggcatccagttttgacttgttttatgttttgtatcatataatcatcatctctctcaacgagattcacacatcatcaccatctgtattctattttattcattttatagtaactatttcatttttctttgctttttcatttactcttgattataaaaagaattactagatcacgttgtgtgattcattcaacctcgaaataaaacaaagaaagattgctaagacttattatgcaacaacgtgtcaaaaacacagactgtctaatattttacaatttacatataagaaagttaaaaaaaaaatccctcgtgaacactaatctcttcccatggctaccaaacaatgtaagtaatttgtgataaaaactcaaagaagacccaaacagaattatgatgaaaatcgagggagtaaatgaagaaatcttacagagagatagatagatatttagcagcaagagcggaggagaacaggtcccattgatgtctgaagcatatcactaagagctacttgtacctctcctgacccatgttcacagcttatcaacgtcgctatcaatggaaacaactccggcaagttcttcttgaacagtgactctcccatgtttcccaatgtctgaattgcagccaccactagcggagcccgcgctgttagctctttcttttttcctgaccccgagggaaccgcccaccttgaagactgctcctttgaacatgaaatatttatgtagaactctaacacctctctgcagaggcttatgaggtgggattctatttcagcctcgttgtaacccacaggctgatctgagatgaggttgtctaagaaggtcatacatgtttggaaagattcgttctccaggcgcagcagaggagcttcttgggattcaagggacgacccgagctcctggagcttggaacgtaagagtagatcagcgttgattttgtgagcgttggatccaatgccgtgcatagcgtcgaagagcatcaacatgtgattggctgtgagagacatacggtacatgtcgtagatatctgttaccgcctgaaaataaagagcaagtacacagacatacacatatactcatgagatcgattatgtgtgtatatatctatccatgcttcatcaccaaagagactgaagacttgactgacctgaatcacaaaaatctgaattgaagctttagatttggcatctgtgacgacagcatgaagctgcctgttccttcttctcagtgcgtcgttggaattatcgtttgtttcgtcctcattgcttacatcctccatcaaatcttcactggtaacgtatgagaagtcaggggatgtagcatctgctgcttctttgatacatgacacaacctcgagccattgttcgttagagaattgatgaccgacatctctcatcagacggacaagcgcagcaatacccgcaccagcaagactttggtgaggacgttttatcaagcttacaaataacatcagtaccttcttaaggagagggttaaccgtcttgtaaaaatttacaaagaggtctacaaccagctgtagagctaacgagcatgtctcataaagccaagactcttggtcgacttcaccattgtaacctctctgatctgttgaatcatcctcagatgggtcaacgtcctgacgcacatagtcgaatattcgaaataaaacagactcaaaaacccgttcccataacgccagactgaaatggtcaccatggttcctcagagtatcaaacaggactttcaatgcaaccttcctaatttctgctcttgggtcgaaactaagttcagataaacctgcacgggaaagaaagccaaaaatgtcaaggtgatgagaatgttgatttaagaagtaaaatcaataagacgaagtatgaattttggcttaccggctaacagtggaaaccaagaatacaaatgttcatcactttctagaaacttcccactatcttgttttccaatttttccaccctgaggagataatggtgggttcctcctcagtgacgaaccaacatagccttcagcaagttttcttgcgcaatactgaaggaaagcaatggcttggagactaatatctttctcaaatttacaattggtgaacgcaacaaggcaattcacacagtctgtgaaggtggttgtctctgtctccgtgatgtgtgggaagtagtctcggataatcttctcaaccatttcaaaagacaggaacacaatatttttatgtgcatcatgtgctgctgtcgtgaaaatctgcaagagcaaacagattttagtaagtatatctgccagcaagaacttagagagacatcaacgtaactggaagtttgatggatcaaataccatgaacatactcttccatcccgacttgacattgtcaacacgggataaaaccatctgtgagacacatcgtataatcaattccctgatctcaacagcaccacttttgcgcatgacaacaacaaaaggcttcataaattcattttggaagttataattcgccaactcttcccgctctaagaacttcatagacagctggcgcaaagaatccattgcaaaaattgcaatggagaggttatcagaacagccaatagtcacaaagaaatcagagagcacatgccagatgctcgaccagacaagtcttatgcggttcatgttatagtgcctgccattacaacaaacagggtataaataagagagagtgagcaaaaacaaaacagatatcgtaaagaaaagattgatccttacgctatttccacaatctttgttaggctgaagacccgtggatcagatggagatcgtaactcatccatggaaactttgcagagggctttaacaaagtcaattatggcttcactattcaatctttgactacgagtaaatatccgactcatgtcaccaacttgttctagcaagtttagattagatatcaagttgttcatctgttcagatgtcactgtattagaagcctttccagcaacaccagaaccatcgtaggaaccccttatcatagcagatgcagcatactgaagttttccaggtgctctttctttaattgcaggtacggaatttggcttagccagtggagagtttcctgactccgtttgaggaaatgcaaagaaagtggcatcaggaggcgctccttcccccaagagatgaagatgctcaaaccgtgaaacacaagtcagtatatgctcccaagcatcttgtagatagtttccttcttcctccgccagttttactattgcctatcagtgaacagaaaaaaacaatttatacatagaagacatttcttatcatccattggtattttcaagattaatcaggtttgaatgtcagctaacccaattatcatttccttgaactgagaaaagtgcaaaaagaaacattaattactttgtcccaagattttcagatgcaaaatgtgaatgctagccccagcataggataaacttaaaactaaatgagatttcccctatctcgttttgtaccctgaatataaggttgagaaaaaagttacaaacctttattgcttcaatgtttttttgcttgatatcagcaggagagtggagggaagtaaattttgctagtgaagtcacaaaggcatctctgtgcgtttttaaggacattacagaagtgacatggatggcatgatggaaaccctccagacataatgttgttattactgcatcatcactctggtcaagtggaacactgaaagctgccaacataggagcccaacaaacctcaaccataaatctgagtataatcacatccgaggctgcataataaactgacctacagtggaaaacaaaaatcagaaaccaagagatacactttttcaggtagttgaaagtataaaaatcatagctaaattaaaattaaaaaaaagaaagaaaaaaagaagtaacaataagagcagaagccagcagtgttgacctgcccagctactaactccaaaagagtgactatcagaacataaggtgaattatgcccaaacgagaaaagaatggaagcagaatcaacatgtgtaaaacagagcactgcacaagagtgcaaaacaaaaggttaaataaaggaagcttcttactcagatttgcgagccttttctttaaatctctcttgcatatgcctgataagatcatcactggtctccatgttcatatcgtcaccacgcctaggaacaacaatatttaagatagtatctaagccaagtaatctacttgagtttgtaggctgcttctgctgcggacccaaaccatcatccttcatctttatctcatttctagatatcctttcatataatgcacgtagatattcctcaggcaaatctttcccatcatctataccacgattgtttctaataaaaccatcagctgtcatctgcaagttgtaattgaaaaatttagtaatgagttactttgtttgaccaatcacaagcttcaaacaagatcgtattaagatattcctcaagagggatttcagaaagcttctaagcgaaacagctcaaatatgtaccttgctcttcaccatagggttatgtgcatctgtgttgagcaaaatgactgagtaagcgaggacatatgccgtatcagcgctagaaaaatcctttgggttgcatttacagaatcgctctgcaaatttttccattatacgatcgattttttgtgcttctcctggcagcctaaagccccggagaaaggctcgaattgcctcatcaaattccatgccttgaaattcgaaagaatccacatatgcatgcatcactttcagagataagtcttctctttcccccagataatcccctatcaaagtcttgttcaaccctgatgcatctttgagaaaagctgctatttcctctggcgagtcccccaccttgtttgccttgattaaaaattcaatacctttcttaggtttctggttgaaaatagaaataccttcctgccattaataaaaacaaatcagctaatcaggttttagctgaaagactgagacaaaagtcaatgagcgctgaatcaaactttaggtaaacttttacctgaagttcaagcttgtaagctcggcgctgctctattgctaaggcatcagaattcccactggacaattcagactgagagtctgatctttcaaaaccaccatggcctccatcccccttaccattttctactggatgacttccttcttcaagatttctatcaacaatttccagcatttttgccgaataaggatctggaagacgcaactgcttattcacccagtctcccatagaccttaaaacagcaactaagcatttcatggcttcaagcttcatggctgcttcctgaggtggcaacaaggtagtaactgtaccaggaggcactccttgagcagtcttaaggagaccattgaccatcctaaaaacaaggtcaagaaaaccaatacagaaatgaatgctacttcaaatagttcgcactagttaatgatcgcagctctgataccacaaaataaatagattcagggcgtaaagataagccacaacaagatattagatcatacctctcaaatatattggatgagttgacatcgcaatcatagttgatgaagatatctaccaaaatctgtgaatcaacgcagagcttgtccaagaaccgaagcactatcatcttctgttggaaatcaggttgagcaacattctctaatactcttagaacaatcatagggaagaacaccccaatctctgccttcagcccagcacgaaacctcgaaaccaagctaagtaaaatcgagcaggaaagctggaaaatgatcataagatttgaagcactgttcttcagcaaggagagacacagatactgcttgatggcgcctaagaacctgttccataatgagttgatgccaaattttcagaagaaacaccaaaagctaaattacattctgtccaagcaactatcaagcagaatgttgaaagctgagggaaaaaagactgaatctagagatatgatagtttaatctacctaacgtgggttataataatgcaagaagataaacaaaacaaacctatcgctggttctaaagacagcaccggcattctcaagcagaatcttcaataactcgagagccacaatcttccctctcatcaactctggatcttccttgggaggcgtcttcatggacagcttgcaaagtgccctgaaaaccaagaaggcgtctcttctcagcttattcccaatctgaacttcagaatcatcgtctttctccacttctccatcggccagctctccttttcttccctcgagggccgacttatacatactgatctcccagtacttggcatccaacatatccttatcagtagaatccaacaaatcagtaggattggcagtgccaggcaatgaagtctcgaaggccccgtcatggccgccgaatgtgcccttggcgttagctgaattgaagactccgtcaatgtcctgcataatcttggtaatgaaaccttgaacagactgcgtcgtagatgggtctgattcggatttgtccatgggctccatcagctcggccacgacgatgggctgaatggggacggtggatgaatctgcctccattcttctgaacacgataacagacatctgcacgagcgaggctttagcagtcgcctgattaaccacgtttctgcttcccaagtagataccataacaagtcctgacgatctgtagcaaagaatctccatggatcctcagggaaattgaagttaccgcagtcaagagcgtcttcagcacgagcaactcgagcccttcgtcgtctagctcgtgacatttgcagatggtttcaatgagcttggaaaggagtagcgcctcaggtccgccggtgggatcagcctcaccgcgaacgtagccatgagcaataagcttctggatgcaatcaacggcgggatcgacaatcttgagaacgccggtggaggaggcgttgatgagagggctgaggatgatctcggactcggcgagagagtattcggcggctcctccgtcgtgaagtggtccaggaatggaggatccagattcagagtcggcaacaggagaggaattttcaggggatctaaggcgttcgatgacggatttgcactcgtgggcgagcttggagtgcttacgccaggaggcgttcttaatgaccttgtccaaagcagggataacaactcgacctaagcgggaatcgacttccgtagaagccattccagattggtagccgtgacttcaacgaatcaccaatttagatctataagaggagagtgagtatctatctatgtagcccagagagaacggataacaacaacaagagcaacgcctcctcctctgcgatccaatcaaagcagtattcttatcagggagtcagtgaattacagacatctacgaagatgaagcagacgagacaaaaaaaaaaatggtgagcttgagtgaagtaaccaatataataaaaatccgagagaaccagatttggatcgccgtcctctcctctatatgaaatgacttatatatccttgaatagtggcggtaatgtctccggatttgagggcatagttggtattttcaaaatgacgaattctgtatctgttgaccgtcccggtggactcccccggtcatgagctttctagcttatttatcctaaataaattgcttttggtaatagtagtgatatcgaaaaacacccatgattaattcccaacaaatatgtaaatttgttttgcgagtaaagagaaaaacaccttcaacaatagtttttgaatttcattatcgccattgaatttcatttgcggaataatgggccataattgtaacggaggcccaatattaataaaaggcccatagtgaagtggtctctagtgttgtctaatccgccagacagaagtagagcagagcaaagaaagctaacagagtcatctccaccgctctaaattctaatctatccacaccagctctgtctatgaactttgcttggctcatctcctttatctccagtttctcctgagctctgctttttgtaagtaatcatcagagaagctcaattctgtacttgtatgatcctcaattaggcctttgaattcatgacttgttttctagagattaggttcatgtgaaatcatacggccgccaaatttaggtttttctcttttagttcttgaggtatacaatgggaatttatagctgcagcgcagtgttgagcttcggcttgaaatgtccattagttattgcaaggcataggctttaccatcgcatgtttagacgaaacccattacttgtagaatcccatcttaataggctctgtagttgcaaatgtaatgcgagtctggccattggcgaagttgtggagaaggaagatgcagagcaaagccgtagttttaattgggctgatgttggtctgaatctgacagaagaacaagacgaggcaatcactcggattcctattaagatgtcaaaacgttgtcaagcgcttatgcggcaaattatttgcttctcccccgaaaagggaagcttttgcgatttgttgggtgcttggcttaggaggatgaaccccattagagctgactggctttctattcttaaagagttgaagaatcttgactctccgttttatatcaaggtacttgctttcctccttccatgctcgattgatctttcatatgtatctaactcatgctaatttgctatccgagtttatctattgtcaccttcttgattacgtttaaatcattcagtcttgttacctgcatctccttaggtggctgaattttcgctgctccaagattcctttgaagcgaatgcccgtgattataccaagatcatccattattatgggaagctaaaccaagtagaagacgctgaaagaactcttctttccatgaaaaatcgaggctttcttattgatcaggtgacccttactgcaatggttcagttgtacagcaaggcaggctgtcataaattggctgaagaaactttcaacgagatcaaattgcttggggaaccactagactaccgatcctatggttcaatgattatggcctacatcagagctggtgtccccgagaaaggagagtctctacttagagaaatggactcccaagagatatgtgcgggaagagaggtttacaaggcattgttgagagattactctatgggcggagacgcggaaggagctaagcgggtttttgatgcagttcaaattgcaggtattactcctgatgtaaagctatgtggactgctcataaacgcatacagtgtctcgggtcagagccagaatgctcgtttggcgtttgagaatatgagaaaagcgggaatcaaagctactgataagtgtgtggctcttgtattggctgcatatgagaaggaagaaaagctaaatgaagcgttaggattcttggtagagcttgagaaagactctataatgttagggaaagaagcttctgctgtgttggctcagtggtttaagaagcttggtgttgttgaagaagttgaattacttcttagggagttttcatctagccagtctcaacccctctaacattgtgggcttttttcatcatgcttgaagcctctttcttgcagtgcgtattgttttttctgtccgccaaaacagcactgattttcttatttgcattttgtacgtatatattactcctaaatgttctgaactttaatgtatacagatttcattgccaaaaaatttgctgatacttagatccaacttaattagaacgaaccgaatcaaattgcaattgtaagactagacttattcaaaactaaacacggaaaattacgtgttgtgttgtgtataatcttgttttatatagatgcatgccagttcttgtatttcttgcaatttgtgcagtcaaattttctgacttggttgttctgaataaattagctaggaaaaaaatgatcccaaggcagcctgggatttaaaactattttggtcatttgccaaagaaaaaaaaagcaagagaagatctccccactcttgctaccaaacctaactcgaggatggcttggtaggcaaggtaggtatactttgttcatctctgaaaaagttttctggatccacggctgttttgactttgaccaaccgatcaaaattctctccgaaatactttctcccgtaaacctcagcttctctgtaactgtttgggccatggctgttgatcccgatatcaagatccctgtagttgagatacgtgtgtcttggattcttggtcacgaaaggagccatgtagctgtagaagcttctcgtcttttccatgaaactgctttcaacatcagtgcccgggtctttccagttcatcgaatgctggaccttgaaaagcctcttcctgtgtgggaacggagtcgccgtcgtagcaacttcgctcattttccctccgtatggattgaacactagccctagcttcccagcctccatcaacttcttacacaagaaatctaaaccgtctttgctgatctctttctccacgtaatccgattttcttttcaagaaagacgccgaatccggatttcgatccagcaggatctccggtttaatcaccgtggcgttgtcgttgttggcccaccacatcaccgactgtatccacgtcatctccgtgcaattctccggcttcagaccaagctcggggaactccttggtcagcagagacatgagatcgctctgttttcccaagaacagagcaactaccgacgcgcgaaccgtctgagtcgtgttccgggtcactggctgcaacattagcctcatgaagagatccgggctggtcttgggagcaacaaactgccatttatggaccatgtcaagtgcgttttctactagggtcttctccactctgaaaacagtcaccctcggaggaacaggcacgagtttgatcttgaaagataagatcacgccgaagctcgcaccaccaccgcctccaatcgcccaaaacaaatcctctcccatcgatttacgatcgagaatccgtccgttcacgtctacgattttggcgtccgtgacgtagtccacggaaagtccgtattttctgatcatgttgccgtagcccccgccgctaatgtgacctccagcgcctactgtgggacaaacaccggcgggaaatccgtgagtgccgtgagttttgctgctctgccaaatgttgtaataaacttcgccgagagtagcgccggctccaacccaagcagagccgccgtcgtcggacatatcgacggtaatgttacggagataggacatgtcgaggacgaagaaagggcggttagagatgtaggaaacgccgtcgtagtcatggccgccgctgcgagtcttgagctggaagttgagagatttggtgcagaggacggtggcctggacgtggcactcagaacgcgccgcgataacgagcagaggtttgggggacgtggaagtgttgaaacgagcgttacggatgtaggcacgtagggttggagtgaagctggcactgctttgaggcagaacgacgtcgcataacttctcaggaggagcacctgtttgattgctgaaacattggagaaagctttcatatatagatgtgttgggcggagcggtggcaagagaactcgaaacaagagacgatactatgagaaaaaccaaacaagagagcttcatttctttttaacatgaaactcccttgttcccccttttttttgttttgttttttccgttgtattaatactcttttagtatttatagtagtagtagattctttctgaattcagttatagttcctatccatagatagtcatttattatgatctatcgattgacagttaaagcgtgaagtacgggcttcttaaatatcttcctggttcagctattcaactcttcataaaatcaagtttaaatatagagaatgaaacgcctattttgctatttctttaccaatgggatagttttgtcaacaaagatagcccgttgaccaaaataataaaatactcttcactaattaaatatgggatagttgtagcgtagcgactagcgagagcctgcacttgggccaagcccatgaagcattagctttcgtctgtttatattttataaaaaggattcggccttttacttgtgactgtttctttggtctagtggtataagatatgcacatctttattcaaccaaccctagccttatctgcaaggatgaataactctctctttttttcgtttttctttaaccaaaacaacgaaataacacacaaaaaaagtattatacttagttaaattttgaaaaggattaagaaaatattgaaaacgtgttagtaaaacatatgtaaatagcttttgaataatacataacagttttaattttttgtatgaaaaatatgtaaatcggcactttttttcttcgattgtggcctacgaatactcagagccggttttgagagtagcctgagcttttttttttaccgaatatacaagggccaaagcataatgtatcaaatttgcgaaatgtattatgtgggcatgtggcaaaaacagatacattttttgcaaaataattaaaggctgaccaaaataacgtaaataaaaaaactccaaggctacacacaagagtaattgtccacttacatatgaaacagcaactccaaggatacacacaagagtaattgtccacttacgtacaaactgatgttatgaattatggaaaagcaagcaatctccaaactctttcctcatactctcatgttcagaaagaaggaagttgtttggttaggtcatttgtacacaagtaatcagactggacgtagctggaaacaaagtatatggcctactatatcacataagaagaaactgtttggttgttttctatcttttggcaagaagaacacccagagatggaatccagttgggaatctaaatcataattaagcacctctattaacggtctgcaaatgctcataagcatccgattcatcttagggaacaaacaatgtaactgttgttgtttcaaaacaagactggagagtttaattaccacctatttaccatcctagagatagatagaaccaaaacataatgaactttgtttggtaaacaaaacagctgcaccttaatgaatgacgtgaacatgttccctaataagtatctcctcctcctcctccttggtcgtggtcgtcgtgaaactctttgaggacattgagaatctgagcttccattctcctgacacgagcaagcaatcggttgcaggatctgaggtaacccttgacgttgtccttttggcatttatcaatgtaaacctccatgtccctgagaatctccatgagctcatcaaccacctgagaatactccatgacccgaccagggtctctctcaaccacctcctccaattctctcctggcagtttctaaccactcggcggataaacgaatccgggctttcaaggagtcgtagctgtcggagtcgaaaacgtccaagagtttcaagacggtacctggcttgattttgtagaagtgaagagctttaacgtaaccaggcttgctctccaaaggaagctctttgatagcgccttcttcttccaaatcgaggtggagatcaacgggggaggtgatgataggagggtattggtgtagacggaagaagaaccaggcggaagcagcgacggcgatggtggggatgatgaagtggccgccgccgccgaattgaggaaggggatgtttaacaggaggagaaggaggttcagaggaggagggagaagtgatggcgaagagggagatagggttttgaaggcttgaaggtctgtaatggtgaaagtgggggatgatgctgttgtgatgcatctggttacagtaatatgctttcactaaactccccatttctctctttctctgttgttgtttcgacaaattttgatgaaccctaaacccccaatttcatcgaacccattttcgatttcgccaacagatttcgcccgtcggaatacctttttcttccttcaaagttctaaattgggcgactgcgatttttgttgattaatcgggaaagaaataaaaaagagagtagagaaagaatctgattaatgggctcatcaagcccagttaaaatgttaaaacttaggacacaaattttaggccttttaaagcccattattaaatcatttaatacgtttggttaacatacatatgagagatgaggagactaattattatttacttctcattctcaaatgaggtttatcaacttaattaccagtaccaaaatgtttcttgaaagtgagaaacatgcatctctcttctgtaataaagagatactacaagaagaaggtcaaaacacatataataaacaaggtcaacatgtgcagtctgcaccgaccttagttttacatcctaattattattagtgatactatgtgttttttatttcttaattcaactttgattaaatctataatcttaatctaattattcttttgagatatgaacttattacgctgaaaccagtatcatgcagccctactaattggtatatgcatctaatacagtattatcagtacgtaatcactaatgttttgtaatatggtaaaaaaattatataatctcaatatctcgagaaatattaacatttgtttacaagagtgtcttttgtcatttcttacatcacatgggggccttgggcggttccacgttgtttttagtatgttttcctcatttgtttattacacagattttcttagtggttttagtaatagctgttttgttcgataacataataaatagtactgttattatacttaaataatttttggttactaaactcaaggtacgtgacgaaaagaaattaaaaaggtaatggacgtgtggacgcgtgattgatcattgtttaattgcacgtatagtatataattcattaatttgtcttgaagcctactcttttcctttcttgcccatgggaatctgagctttcagattaagttttaactcttaatttttaatttttaatttaatgatttactccgttgatgatgctgttcacataataactagaacctactagttaatgctacaaaatgcaaacaaaacaatttcacatcgcgacactcttaattaaaaaagatttattacttgatccccttgatccacaagttaatataagtagtatttcctaaagaaagaaaatgacagttaatgtgaatgacagaatgagtaagtaaaccccattaaaaagggccgatgatagaaaaacaccgtggaattaaacgagagcactaatctcatttaattagttacaggtaaaaagagagtcaactaactaattaatggttagatctctctctacttccccttgatttgttacagtttactctcttcttaaccatttttgaaatttgaaaagaaattttttgattggacattttttcttttaaaaaaagaaataataagattgttgatgtagccatagaaaccgggaggcacaaaaaacggcaaccaaagaaaggaaaggaaagaaagaaaacaaaaggagtccaagaaaccagaagattgtctcccgacgccattatccttcaccctcggagcttttcttgaagcagggattcttctaatcattaatccctacttctttctttcttttttgtttgttctcctttgagatctatctagtactagtagtaaaaccccctcccctccattgaatttgaattgaattgaatctctgggaatcaaatctttgatgtcgcatctggacgacattccttctacgcctgggaaattcaagatgatggataaatcccccttcttcctgcaccgtactcgttggcaatcctccgtcgccaagcttgccttttggtcccttgtctttttcggattgctcttcatcttcttctaccgatctcccatctccaatcccgattcctctcgccgctctcttcgcacctactcttggggcggtcccgcctgggagaaacgcgtccgatcctccgctcgtgtccgcacccgcaacggcgtctccgttctcgtcaccggggccgccggtttcgtcgggactcacgtctctgccgctcttaaacgacgcggcgacggcgttctaggcctcgacaacttcaacgattactacgacacctctctcaagagatctcgacaagccctcctcgagagaagcggagtgttcatcgttgaaggagacatcaacgatctgtctctcctcaagaagctcttcgaggtcgtccctttcactcacgtcatgcatcttgccgctcaagctggtgtcagatacgccatggagaaccccggctcctacgttcacagcaacatcgctggtttcgttaacctcctcgaggtctgtaaatccgctaatcctcagccggcgatcgtgtgggcatcgtctagctccgtctacggtttaaacaccaaagtccccttctctgagaaagacagaacagatcagcctgcgagtctctacgctgcgaccaagaaagctggagaagagattgcccacacttacaaccacatctacgggctctctctcaccggcttgaggtttttcacggtgtacgggccgtggggaagacctgacatggcttacttcttcttcaccagagacatcctcaaagggaaagctatttcgatcttcgaaggagccaatcacggaacagtggctagggatttcacatacatcgatgacatagtgaaaggatgtttgggggctctggacacggcggagaagagcacagggagtggtggcaagaagcggggagcggctcagctaagggtattcaacctggggaacacatctccggtgccggtgacggatcttgtgagtatattggagagattgttgaaagtgaaagccaagaggaacatgatgaagctgccgaggaatggtgatgtgcccttcacacatgctaatatcagttcggcacagagagagtttgggtacaaaccaagcacggatttgcagactggtctaaagaagtttgtgagatggtatcttggttactacaagcaggggggaaagaaagttgctgctgctgcttgaatattgataattcacaagattctttagtgtatagtgagtgagtggattgatacacaccataaagaagagacatgattcattcgagattatatattctttacatttgtattctgctttgtaatttcgatctcttgagtcgaatctctgatatttatttcataggaagttcacattaatctctgttattcaaccgatggagccagagagagtaatgaatatgatatatacattatgctataaagctgaattagcaaagcacaaagtgaaacaaagtgtgattgaagaagaaagaatgcaaattaagtagtgaataagaaaaactgcaggccttgggactatctgcataactaaaatatatggttcaaatccaatccaatgaagcattttaccaataaatctaattctaactaaaggatcaaattcaaagtttttcttgtaaacaaacatacgtaaaggaggtaagcttggtacatgagaaataaaaataatatttaagttagtggtgaagaaagaagggaagaagagctaatttgagaagagagaaaggaaatctattaatagtgttagtgtgttcccaatttgtaagcggagccatacaaacaatttgatgaattgatgatgaagatgaaaatgaaatcactccccgtctcctcttcatcttcttctgaattcgtactgtttggttaccaatgtcgttctccgattcagagtcatcctctcacggaggaggaggaggagattacaagttctttcgtcagatcagccgcgatcgtaatctccatcttaatttctgtattttgatatttggttgttgtttgtgaaaaaaaggctaaagggggatttgggtggtttcaggattgctccacgagatgcttggatctaccaaaaccggggattctaaagcttggaaggtctctctttctctctgtttcatatctattcgaatacattgattccttttggattttggaatttggatttggatttgaggggatatataaatacaaactctgcagatactaataatggatagagttacggtcaaagtaatgtctcagtcttgcaagatggctgatatcactgatcaaggcatttcctgtatgtcatttatttgcctccatcctttattcattcattccttattattattcagtttctaatttatgtttgtctcttgtgttcatgtcctgtggaatcatcatcagtggtagaagaactttttaagagaagggaaccaatgcctggcatggacgctatctactttatccaaccttccaaagagaagtaccatcatccttatctcttctccttccatccatggactatgtatactactatcaagaactcatcatgtgtctctctcctttttatcttgcagcattgtcatgtttctatccgacatgtctggccgggaacccttgtacaggaagtaaatacaacatgcctctttccttttatatttttttctctatatcatcaatcatcatcattatcatcttttctttctctttttttttcttcagggcatttatctttttcagttccactatccccaaagaattggtcaatcacatcaaaagtgattctagcgttttaccacgcattggtgctttacgcgaggtttttctcttctatgctatcatcccttccctttttacctactcttttatcgctttttggttcctaaattttttactactttctattcagatgaacatggagtatttccccatagataatcaggtataggttctattccctttactttctggagcgctaccatcttggagttggatttaatttgaaccattatgtttttcctcgaatattaatagacaatgcaaaataggccttcccctgatgatcttacctctttcccagggatttctaactgatcatgagcaagcattggaaacgctctatgctgaagatgctgagaattcacgccactttcatatttgtttgaatattatggctactagaattgctaccgtatttgcttccctcaaggtaaataccttctgcacaattcaccaaaggctgactcactacgtcttcctttcatagtcgtaaggaatttcggatttgctggcaagctgttctttataaggactctctcagccaaattaatgttatacggttttttaggaaacttaagcttttcccatttatctctcttttctgtgtttttaggaactaccctttgttcggtatcgagctgctaagtccactgcttcgagggacttggttccatcaaagcttgctgctgcaatttgggactgtatctcaaaatataaagccattcccaacttcccccagaccgaaacatgtgagctgctcattgtggatagatcagtggatcaggttttaaggctcatctactacatttactcctcaagtccatattgatagtttatttctctaaacgattgaggtgtaactgtagatcgctccta

SEQ ID NO: 3 - DNA, 107234 bp, Arabidopsis thaliana
gaattctcttaatgttaaagtaccacaaaaggctttttatcagttggtttattttctgcccacaacataatcttcaaagttttggtaaactctcatgtgcaactgatggaatagaagacactaggacactacataatcaaggttcacaagaatcttcacaatcattatcatagaaccctgtgaatacattcacacgttaatgttgaatactgtgaatcagaaaggccaagactcgatcttctggaagtaatcgacattcactccaccatcaatgccttgagttaaaatcactttgttgtctgaaatgtataacgcaatcccatcttcgattattaagtttgggttttatcaattcaatactgaaatacacgtaaggtctcttggtttaaattggtttaatttctggttcaatattcttagcaacacaccaccacaaacacgagaagctgcgacgtaccttttcccgcaacctttctcgtcggcttggtttggcggactgaacgacgaagaggagggtttggtaacacagatctgtgaaggtttaatcccacggcttcattgttttacctttccggtgacttgggtagtgctacaacggttcacaaacgagattttaggtactgctacaatggtttgactcagactattttttgtttttgttggcagaaaaagagagtcaagccgatttctaccacaaaaattgtggtgccctatcatctgagctaagcgagctaaattcaaacaaatcagcaattgaggagatatacagcaaacaatcctagagtttccacaacttggattacccaatcaaatcgataattaatatcacatacatcaaaagatataatcaacaatccactgaacagtacaaaaatctcagaaccagatcgatcctatagtttatcatcagctggcatgaagaaaaaaaacaatacgattgcactgtaaaactttgttctcctaaatcgataaaactttacaccaccgatcagaaattccaaacgatctataaacaaagagaatcgaatccaagaaataacaacaacaaacgagaagtatcgaaacagattcaacacagatcagcagaagagaaagaggcagatcgtagatggtgatgaaaaagcttacctcggagataacgcaagagagtaaagcggctagggtgaatgaagtaaggaataaagctatgatggggattcgtttgccaaattacaaacatacccctatcccgccgactattctctttttctttgggccttgaagagtcggtcgcgtttcataaaagatacgggaagatttggaacggaggttcatcgtcgccgtcgcctgaggagggtgacaagataaagagccgaacgacgtcgtttagttttagattttttttttccgctctgcggttgtttagatccggtatactttccggtttgtgtctaaaaaccgcaggaaaaaacattgaaaacccggtcaaaaaaacaatttaaaaaagccgcctctacttttctttattcaccgtacaatgttacatttgtgtatgctaactaaccctgagtaaagttctagagagggccttaaagcgaagtagtcaaaatcttagtaatgatcaacatgtccaaagaggatcccaccacaacattgatgagttggtgttggacttgtcttcaaggaatcccaaatcattgctctcaaaggacatattatcttgttcttgtttctgttgttggtccatgttataaatcagctctagtaaatttgatctttgaaattgcatattcaccatctccacttgagcttttgcaagttgtgcttggagttcactcacttgtctttgtaaatggtatatggcacctgcacatccatacactggatctcttattctagcttcggcttcatacaccatactgttgaccgcatcagttctttgtgattctggaagttcctgaaaatatagataaataatcaatcatgtgttcgttcataaaggtaaggatttttttgtatttaattgaccaattcgagtaaataccatttttctacaagactttgtgaaaggtgcatgataaggaaaacgttgacaatgacactatatgcaatactttcactttttttttggttatgtggtgcggcttttgtgagaagaaattattgacattagtcttatgacaaataactacgtaaggtccaattttcacatgacctatgaaaccattttccgaaacaaccatttcaatatatgtatcttcctaataagaacaagaaaatcattcccatctatatcattaatataaaatcgggtctttcttaatgtaattctttctaagaactaaagagcttatagttattacaccaatagatatatagataatttaggtacctgcaagaacttaatgatgttgctggctccaaagacgcggtgtgcaatagtgaacttggccggatccgttggagggaagtacggtgccaaaacgcatctctctgcacaacgtcgcctcaagattttgcaagcagcacatggactaagcactacccgcggtgaaagtgatggtggaggagaagaggaagaagatatgattggagtggtggcgacagaagcgtcacttttactctccataccaacgcaaaaactgtgaattatggggaggaagatgagaaatgtgtaagtagagtctttgagaggtgaagtgctttttggtggggaagtgtatatataggggagacacacaaaatgatgtagggaaggaggtgaccaccctgacatcacaagctcgaattatgacgtggcttttttgctaattgaaagttgaaacatatttccacgtaacggtggctactaaatttctctacgctttcatgtttcaacggtttgcttgactttggcacaattaattttcttcttaagaaacaaaaaattcttcttgtcttgtttttctccttacgtatagtttcaattatattagtctctaaaaaatcattagttagtccaatggtattctactcttcgtcttacattctttaatagtctttctgattatgaagaattgaagattaatactataatttgggagaaaccatagttaaaaacctcaattgaaatgtgtattacgctaggtggttcgataggtctttggaatacctagatattcaattctagagtacttctcttctagtgaagtttgattattatttttattcagtgcttacttaattgtaaattctactgaagtactgatagagaaattaacacaaaaggccaagtgatttattttaggttgcctaatttttgctgaaccgtattttgtttttattaaccattattcttgggactcatttttatacattagttatatctattgtatgagacttttctgtttaatttgaacgacttatacatacacattttttccaaattaaattaaccattttccacgtatatatatgcatggagaaaatgcaaaactacgttaagagtcgtcatttagaagaaatagaattccgagcggtcccaaagcatcatttattcaataagagagtcgtcttcacgtaccaacattaagaagaaaaattcggaatcaaatagagggaagacacgtaaccagttagattgctaaacgagttattgggtgtgcaagctcttgcgtccaccttcgacagattgctctctttctactatacgtatactctcaactaaatcttcaacaccttattgaaaatgacttaaggcttataagattttcttctttctagtatcatcaattcatcatcatttagtcttattgatttaatcggtcaaagattgtcttttgcatcgtgtacactgggagattgtttgttagtcagatttatctcaataaataatgtacgtctaacagtatcgtcatgattatcctcagatcaaatcatcaataccttttcttccaatcatattcttgggcctttttcaaataactctagtgcagttaaattctatcaaatcagtgataagattccactaatgttggaatggagacaagaaaattggggtcgttacgtgtgcattgaaaattatgctaccattcactaaaatgtaaatttatacatatagtaagcacaaaagcattcactagcgaaaaaaaaaaagtaaattgtgccatgcaacacatttcttgcgttatttttgttttgtttgtttcaaaatacaagttaataacacatcggtcaatacaattttatttttacaaattcaacaaatcaatatttggtctttgagaatcaatcatatcgatcgaagaatttgtaagcgattccctccggaaaggggaaatacataaaggttgccaaatgtacgtataccaagccacgggcaagggattattgattacaaccatctgctcaaatttaatctgatgatgtaacctaagcgtaccgaataaatgatatatttgactcattgactttgatttcaacgagtctgaaattacccagttcttaaattcagaatttatccgacgatgtagaaaaaaagaacaaaaaaaaatccacatttctgatttctggatactttcaaagttatctaagtaactatgtatttttctaaaagtcgtcgcatctttgaaaaatgtattattacgtctagatgaaatctatagcattacctctctctttttttgttttttttggttgtctttttgatattatagtatttttattcttttgaagctatagttgctttgaatttctttttaggctaaagtaagataaggattatacataaaacaaacgagacccacacggaatgaaagaggagctcagtaatgttacagccaatttcccacacacacacacaaaaagaaaaaagaaccgtttcgaactctaaatggtgtgaacgtgttcacaaaaagtcactccactcttcccttctctctactcgtcgctccaatctcatcttttctaaaacctgattacgacatagaccactcaagattcaagagggtcctaattgcagattcggttcaattcaagataaaaataagagacgtttccatcgacaacataaaaatagaaaaaaaaacggttttagagaagcgcataggcaagatccttcacctagaaaaggagtgctgaatgacaatcatttgaataacacttgacttcaagctctttactccctcggccgtgatcaaagcagcaaacactttggtaatcatagtggtgacattataagccagagccatccgtctcagctcacgccggtctttgatctaaagcatcgtctgatcaacatcgatggaatccgcctattcgggcaccacatcattacatgctgttgcatgtggtgatagaatcactttggattggtttatgggtatggaactaaaattcggtaagtgaactggtctagattggttttggaacaatgtcaggtttaccattgatctcgtagtacatagtcaaatcatgttatactaatacttctacttctgattaaagatttggctgtttatcactttatataggcaattagccactgtatcttcaaactcttaatccaagttctactgttattagagactaagcagatatgaatggatttgaggcataaatatcgagagaaattaattttattaatgtgtctaagcagcaaaagcgcaacggatgtgttcaaatcgcaacccaccgaaaaaaacagatacgtaaatccgagagtacattaagcaatcatatgacaaagttcaaatgcaatgcgacccctccagcccccaaccaaaaacagccatgactctcggggagacacacacacacacacagagcatacgtcacagcttaagcatcagcaaacctgcaaccaacagatacaaactcaaatcacaccactgaattaatatttactttctaaatgattcatagattcaggataagtacccaagctcagaaagcttcatgtgggcctcagcgtaatcagcgaaaaaggcatcttcatcctgttcacattgtcacaagaaaccatgagttctcttctctctctctctaccaagtgaaaaacagaaaaaagggaatgaaagacatacagcagcgtatttctcgaccaaaggacggaaaacagggtcgtccaatagtgctttgtcagagacaagctgaagaaggccttccttctctccgctcaagagttccctgcccatatataatttgattagtaaccatataagccactgaatcctcctacaagggaacttgggatactcacttgaagtaagagttgtcgaagattagagggtttgatgtccatgcaccttcgaagccagacctatccttgtggcatcgtccctgcgatatcatattttgctagcactcatcagaatttgtaagcttggagcaaacaaattttaaagttttaagcagttggagagaaacgaaccagagtgtgggcaccagataaagcgacaatgtctttgtcagataagcccatctgcttagcaaagacatctctcaaatggtcacaacccttggtagcatcaggaagacgaccctctggaggtggttggggcttgtcctgaaatcaagatatgcattttagaaacagaaaatcaagtcccacaattatcaatcagccatctctacaaagaaagcagaacacgttctctcgaccaaattgagtatatgataaccttagagacggcaaacaaatctacagcaatgactaacctctcttccagggtggaaaggaatgtcagggccaccagtaacttcaacggccacaacaccagcaagctgaatgatcaatttcacaccacaaggatatctagagttagaatccaaaccttacagttatcaccgttaaccaaatagtgctttttaaaatttaaaaccatgtacctgatggaaatcagcaaaagagatggtagggaattgctccctgatggggtccaacaacctaagagcaatgtggataccactgttggctccatgagcttgctcagcgtcaaacctcattgttccgaatggacctccagtccttgattgacaatcgaaagttccagcagagtgccatctgcagtttagccagacagatcagccatgagaaagttcataatcctacatacttcaaaaccacaagcaaatatggttagttacttacgcgagtcggaccatgatgggtgcacagttcttctcagcgatcaaacctctgagcttcctcctgcacttctcaacagccttcttgtaatcttcgctcacggttgggtagttcttcgtcatcttagctaagctctggaacaaatacacagatatatatacatgagcctcactactaaataaacgcacagatcaaatccaaaactcacgaaatccaactatacataacaagctgagaatcataaacaacaacagcctctaaaacagcttcatacgagtggaaaaaaaaaaaacctaaatcaagcaggagtgagctacagaagccaaatctctcaaaaactttcacagattcgtaagattagcctagaaactcagcaatatcgaaccacagaacagaaacgagagagctgacgataataacgccgatcgcagcaacgaatcgtggatctactacgaaaaacacatcattaagcacagatcaagccaagcataacaatgatccgatcgagtcaagatgaaaatggaagcagcaacgacggatcagagagggagagagagagtttccgtcataccttgtttcgaggaaggataataaaatctggagaaatgcgagtggctggcacgagtaagacacgagtactactttttatgagagcgttgaggagaagaaatgcgaaatatatagagtcatgaatgagaacgttctggtagatctgtagatgccgttagatgacggatatcgtgtggtcaaatttgccaatataattgacgatcatgattaaacgcacggctttaaaatggacgttcggatcttagggttggtggtatatagatgggaaaagaataatccttcaatattattaggaaataattggcaatatgcaattggaggatacatgcttcgtgtggagggcccactaactttggggaaattatcaaaaagggcgttgatgttgaattttcttcagtaaattgacgaaattaggcatcagaggacttttattgcgaacacgttgggcagtggtatttccgtgatttcatctgtcgcaggtgtgaacgcgtctcacgcagacgaagatcccaattggactaaggatatgataaagtcacagcagcagtgttattaggtttctcacccatcgctccttgattggtgggtcataaaccaatgcggtttagacctagcaatgcacggtttggttaattgtccacatttattaagtctgcgattcggaattttgaatcggttattagaataggtaacaacgaatgtcctctgtttcatggggaacaaattttcatgcccacctacttttgcttggcttgtcgaaagattcgagaaccggtgttgtttgataggaatctactcgacggaagtcgtgttttctctctactcatgttattaacgcaagccagaaaagaagataagccagttactgcagcaaaacaagtgagccgtatataatatagttcaatgacaagtctgagttagttagtagtaacagacgtctgctgtgctggtccttcccaagtgtatgtatctgttttcttgattcctcaattctattgtgtggcctacttttcttcttctttaatatctcatgaaattcttgtgttactactgatttctgcagacatggtcttatactcttatagggtagttgtttttggttaaggtttggatcataattgcggagaatgcaaaagcaatgtgagagccttttcatgagagaatttgcattgtttcttagtattttgactcataaaatgctgaagctaatttgaaatattcagtgatatgtttttgtggttcctgagccttatatcttagcttcagctacatctacataattatcaggtttgatcaccttctctgatccttaatatgtaagaagatataagatgggagaattggatcgataatgcaggtttgtgagatagtgaaaatgagttcagaggtgttttactttcacacaggttctgtttacttagcacacaagagagagttttgacattgaaatgagacttgagaataatctcgcttttgtatgtttaccactttgctttttacttactattggttcctagggacctattgatccacaatgagatagctttttctatagtatacttctcttttgtttcttttgaatttttctttaatgatgcagaagtcaagttttaaccttgtaataataattctcattcaaatttcgaagttcaacggatcaaataaaaaagtttgtcttcatttggcccaccaaaagcaaaaggtgccaccattttctctcctcttactcactgctttgcctttttaacggcaacaacagctacttgagaaacagtcttttaaaacttgcttccttttttaatcttaaaacctgtcttgatccgagttcttcttccaaagaagagatggagaaaagggaagatggagggatcttgacatatgatggtagatatgttatgtacaatgtactcggtaacattttcgagctatcttcaaaatacatccctcctattgaacccatcggccgaggtgcttatggtattgtctggtaagtctttatcactttcaataaaaaaacataccattcttgaatacaatcttaatctcaaatccttttttatgattacagctgtgctacaaactcagagacaaatgaagaggttgctataaagaagatagcaaacgcgtttgacaacagagttgatgctaaaagaactctccgagagatcaagctcctttcccacatggatcatgacaatgtaatctcttcttcttcactttgatgaacactcatatagttggcttattacgttcatattgctacacaggttatcaaaattaaagatataattgagctaccagagaaagaaaggttcgaagatgtatatattgtttatgagttgatggatacagatttgcaccagatcattagatccactcaaactctaactgatgaccattgtcaggtgatgatcagtggacacattcctaattagagcttttacataatgtttcctaacatttagcattgtttgatatacttttttgttgtctccagtacttcctttaccaaattttgagaggccttaagtacatacactctgcaaatgttcttcaccgcgatctgaaaccgagcaacttggttctgaatacgaactgtgacctgaaaatctgtgattttgggctagcaagaacgtcgaatgagacagagataatgactgagtatgttgtgacgagatggtaccgtgcacctgaattgcttctcaacagctctgaatacacaggagctattgacatttggtctgttggttgcattttcatggagatacttagaagagagacgcttttccctggtaaagattacgttcagcagctgaaacttattactgaggtaagcaaattaaaaccttaatccaaaatctatcattttggtttgtgtgtgtgtgtgtgttggttgttggaagcatttctctgttttgttttgggttgtttttagctcttagggtcaccagatgactcggatctcgacttcttgagaagcgataatgcgcggaagtacgtaaaacaactcccacatgttcaaaaacaatcattcagagaaaagtttccaaacatttccccaatggctctagatcttgctgaaaagatgctagttttcgatccttcaaagcgcatcacaggtgcttatcacgttgttttactactttgtgatgctataaatggaatgtgaaatatactaacaatatgttttaatttgacagtggatgaagcattgaagcagccgtacttggcaagtctccatgagatcaacgaagaaccaacatgtcctactcctttcagctttgactttgaggagacagccttagatgaacaagacatcaaggagcttgtctggagagagtctttacacttcaagaatatgtaatctcccaaattctcactctcttcataatttttaagacacttgaaagcttatttgtctaagctgtggggaatagtgaacatgactcgtattctcgtgtgcatgtgtttgttttgctgatggttggttgtgcaatgggaaaaaagttcttacccaaacaaacccttaagcgattgcaaataatttcaacccgaccaatctctacacaagataaagctaattcgaccatactctgcctaaatcaaatctaatttcaccaaattccttaaaagtcccaaagattagctaaatcgtcctaaagcaaactctcttatttacaaaactagctagctttttttaaataaaaatgtatgtaatgccaatcgattgccgaaaggtaattttcttgttttatattgataatttggtatatgatattagtagataatttgaattggaccaagcaagtcaacatcattgcatatgtatttttaataattaaacgtgaaaacatctccgaatgaaaccgtttgctacaaaagccaaacacgtcttggtttacggatgctggttccaaagaattaataaacaatatctttgttgaaccatacatttgtttatagattatgttcctttcttaaataattcgagctgtcaaactaagttctaatttaaacttatttcaatccattgttgattaaaattttgatatatttatagaaaatccattttcttaataaaaaggagttgactaggttttttaatgctggcccaagaggccaacagaaaggaaagtccacttttgtgcttattataaatttactgaaacaaatatcaaaatagtaggtataaaacatttcaaaaactctacaccaattgatatacgacatttttttccagttaaaaatgctaattatagccgaatacaatacaaattgtaatccaccaattaatgttatatacatgaattcttcattgtattaaaaaaatgaatcttcactttatctagttgaaaacttaatgcaaactaacgagcaatgggttaaatgaaatgactcatcagacgttgggccatcgtgggcttggagtaaactgaaaatggaatatcaatgttaaacaaatttctcgattactagaataataaacaccaaaaaagtttagtgagtaaaacattttttttttctttctgtctaacttactattttttcgaacagagcatatagcttttactatttttgccagcaaaggatggcctgtctctcataaagttattttacggcctaaaatgtcaacgtattgtaacaggagttgttaatgtaccctaaaccttataggtaaaagaaatgaatgagagagattaaataatcttctccgaagaacattaatatgtgccacgtggcgctatctgctgaaacgcggcacagttaattactgtacttggaaccataaaacaaaaaaagcctgttattaattaaataattttttgaaaaaacattcgacaacaaagcgcgtggagttaaaacgtgggacccacaatgacgtcctttttgttttcctcacctcatttgaaaatatttccaaaacggtgagtaattttgccgtcgtctaacaccgacgtcacccgtaaggcgattggtgacagctacaaaaatgttactatcatcagacttatctttcaatcaaatataatcataatccaatttaatctaccatacctgtcaaaccatcgagtaaaaaacgtgtttgttgtagctaataaaatttttaagactaatactgaaaattgacaaactagaaagatgtttggcagtatgaaaataattttatcaagaagtgacataatctttaatcactcaaatccattgctccattaacgccacgtcagatcgacggtgcttgtttccgaaccaacggacggtagatgacaaattaaaaagttgaccatgctcaagtgtttcgtgccattacgtggcgtcttctgatacgtttgtcttcaacactagccgtacgtttctgttctcctcaggaagaaacatttgtctagacgtggctggttttaattagacgcgctatatgtaatgtaccgtgaaccttgtcgtagacgataactatacgtttctctctgaaacaaagaaaattaaacaactttttttgattacgcgatataaaaaaaggcgaagaaattaagctttctctgtttgtcactaagctctctctctctccttcttcttcgacttttttttttcttcctctcttctctttggttttttggtgttgggttttatctgggttcctgatttcttcaacgaggaaggaaggaagaagaagagaaaagggacaagcgagaattactcttttctccttcaatttccgatgggttgtttcggatgcagtaagaaatcgagcaaacgatccgagactaacaaagatactgtcataaatagaaaaattgtcggtggtactacgagcgttgctaagagtgataagcgagacgatcagactcagcccagttcaggtatcgagtgattttgactaatttcgttattctctcttctccacaagctctcttttggatttgttgatttttttttatcggatacttatgtttaggtttttctgtatctgttacatttgggagagacatttaatggagattttttgtgatttttccccggagaattttgatgcatgtgtactattcaccatataaacgatgttgggtttttgaaatcgagctagttttttttggttttgtctcctccatgaggggacaaagtgtcaaaattgagcctttggtatcttgccgtgtctgtttttggttaagtcacatgataactggtaatcgattttgttactcgttccatgtgttgtagattcaacaaaagtcagtccatatagagatgtaaacaatgaaggaggagttggtaaggaagatcagttatctttggatgtgaagggtttgaatctaaatgaccaagtcacagggaagaaagcacagacttttacttttcaagaacttgcagaagctacgggaaactttagatcggattgttttcttggtgaaggaggtttcggaaaagttttcaagggaactatagagaaattggatcaggtacttgtgacaaagaaaaatcctatctgtttttatcaattggctgtgagatttgtcatagttttgaacggttggtgaaacttggttctgctgctaggttgttgcaatcaagcaacttgatcgtaatggggttcaaggaatcagggaatttgtggttgaggtattgactctaagtcttgctgaccatccgaatcttgtgaagcttattgggttttgtgctgagggtgatcagagactactggtgtacgagtatatgccgcaaggatcccttgaagatcatctacatggtatgttgtaagatcaaattcctatcctttgcctctgtattgtttgtctcgcagctacccccttttctcatctaacttttacattgttgttttgactgtttcaagttctcccttctggtaaaaagcctcttgactggaacacccggatgaaaatagcagctggtgcagcaagaggtttagagtatctgcatgacagaatgacgccccctgtgatttaccgagatcttaaatgttcgaatattttgcttggtgaagactatcaaccgaaactatctgactttgggttggctaaagtaggaccaagcggggataaaacccatgtctcgacaagggttatgggaacgtacggatactgtgctcctgactacgctatgacgggtcagctcacatttaaatccgatatatacagttttggagtagtccttctcgagcttatcaccggaaggaaagcgattgacaatacaaaaacgcgtaaagatcagaatttggttggatgggtatgttttgtctcttggctgtgactcataataatctttactgaaacaagactcatattttcacggtgctttttaacaggcacgaccattgttcaaagacaggaggaacttcccaaaaatggttgatccattgcttcagggacaatacccagttagaggactgtaccaagcactagcaatatcagcaatgtgcgttcaagagcagcctaccatgagaccagtggtatctgatgtagtattggctctcaacttcttagcctcttctaaatatgatccgaatagccctagcagcagcagcgggaagaacccttcttttcacagagacagagatgatgaagagaaaagaccacacctcgtcaaggaaactgaatgtgaagggtcctcataggatatccaataagagagtggtaaaaaatcaaatctaattttggcttcaccaagaaattggggaaaaatataaaaccaactcaggtacatttttaacatctattgtggatgtaaatcttgactcggcttctttgtatgtagaatgtttctgttctgtagaaaaggaaaaaaaaaaaaaaccattttgttttgggacatatatacatatattgaacaaaaacaaatatcgttggtcatatatatattttcccgatcaaaaagtctggtaaattaggattaagtaatgtctaaaaattcataatgatgaatggcaaaagtcgtaaatatgtaatagaaataggactatgatcacgtgatgcaacttatcccgcgtgaacccgttaagatttttgccgttaaataaccaaaacctaatccaagaaggcttcacaaatctcttctctcttatctctctctactggttttgtgattcttggaagagaagctacaagataagacaacaatggcggaaagatcattctctcagctcccgatctcttcttctcacattggcagaaggacaggaaacacccggagagggatatttccggtatcggagtattggatccatgcaattccggtgatcgtttttctctgtttcttcaccctctggattttctcccactcaggttccttatttctccgattctttaatctaagaaaagattttcccgagaaaatgagtctttctgattttggttttggttacagtgagcgtcatgaacgatggagagataatgtcgatacatcgtcttgagaaatccatggccgtgagaaacgagtctcatgtcagtttagcgattcttgcttcctctgctgtttcaccagcctcctcagctctcgtcgccgtcgtctctaccaatcagaatctcacaacttttcacaacgcaactcaatcgcagcaaaatgcaacccagtcggtgaacaaagcaaaacagccacacgcagtctaatctctgaacggagaaaagtttctttcagtttcttactgatttctttcatgaacagataactttcagggattgaatttttcttttctttgtatttgcttcagttgaaacaatagtttttgatttaggattgagaattgtttgtgaacgacgatacacagaatgttttcaacaaattgcatagtcatttgaagaaatctttagtgagtatatatctgaatcttgttaatgctgctgaggatgttcaagctcactgatctctccatctgcgcaatttccgacccaaatatacatcgtttggtttctcctactcggcaatactctgcaacaatccctcctcggtgactgcaccaaacacacaattttaacatcatgttatttcaacaccggtttattatatgatctcagccggttatctctgtcaattcactagccaaaaccaaaccggtatgactatatttgatgcaagttgttaataatgaagcaaagagaagatgtggaccaaccttgtgccatcggaggggatcaggtcgcttgagaacgacgactgaatcgatctttccaggcgaatcgagcctccatcggcacccgggaatccgccttgtcttgtccaagttgtagtatccaatcacttggcgacgtccttcatcatacttagccgagtttaagtaaaacacaaatggtctttggcacggatgcctcgacactggtctcgtgttaaacgcgtaaccaatgtagtcggctttgcggaaccagttgaggaatgttcttgaaggcatctcaagttcgcgaggggatatgatgcctcggattatctggactacgaaaccccatgagaccgagatggaccagaaccggttctggtcgtagcagatggactgctggaatatgctggctgggtcaagaactgctgaagacatcaagtgtcgtagtgcacgtgaccgcttcatctttgggaatatcggctgcaccacatcgatgtggtgcagcgacaccaagggagccactgggtgtgcacctaataaccccaataagtccccataaacatcgtactgcatacatagaaacattaaaattagacgtattcaatccagataaaccgttctaatccgaaccgaaaccaaaccgaagtaattaaacatcgaggaaacgtagaaaatgacacctggtgaaagccaggttctttggtgaggggtacaccaagttcagtcatacaagcttggatgcgatcatcactgccgtagagaccaggataccgttggatgcaacggtcctgcatccgcaagagctcgagggctagagcatagctgatggcgaacccaccgcctccaaatgccattgaatatgagaagaagatgttctgaacgtgagcctccgaggagctaccaacgtagtagaactgagtgtggtcgtactttgaaaggacgtttaccacattgtccaccacaaacactgtgtcgtcgtctcccatcacgaaccaccgtacaccttttttgcctagccgaagcgtctccgtcactactcgagatatcctcaccgctgatctgtcccctactggatgggtgtacctaaaacatgacttcttgatttgaataagagatttcttgtaaaacacgtcagatattgtagagatgagtaagtacctgaaccgtgaggtgtcttgggagattctgatttctggaaggggatcgtttcggtaagttctgactctcttgtcaatccagacaacgccacgagttttaccaggtcgccaccatgatttgatgtactcttttctcgtctcccacagaacagaggacgcggcaatcccgaaaacgatgtgatcaagcgtcgtgttgaacatccttggtcgctgcgggtaaagagcggggacacgtggaggcacatcgtcgtcttcttcctcgggaacaacagaggaagatgagtttgctttgtcgactagggacaggtggctgtaggtagaagaagagggacggcaggtcttgcgtgagccacctcctccggttgtagagatgagaagcaaagggaggaagaagaggaagatgaagagccatggcagaggagatcttaagaagcttaggtgagaggtccgagcagagttgctgtggttttgtgcttggtttctttggtggtgatgatcttctagaagtatgttcttagggttgctgagattggtgttagagctcgaactgtttcccatcgctaatgggaatagaaaagaaatagatcgacactactttgttttgtttgtttgttttcaatcagatttggtgacatctctttttataaatgataacgaagtttcagtagtaacaggctaaatttagctaaagagaaaaggtctcttcctaattttactgcaagagcatgaccatgaaccaatactaaaactgataacaagttctcacattcaccactttcaacatttaatcataaaagcaaatcgaaaatttgtatctttttcatggcaacaaaattggtgcactgaagcagctaaaggaaccactggtgtatccatatcagtgccttgtctgcgaaaattgaacaatacattgtcaaacacaaaagaaactgaaaaacaaaaacaaaaaaaggcagaatatttgagaaaaaaatagtagaataagaaaaaagttacctttcttttcttgaatggccctccccttttattacggccgaagcttcttggcttttcaccatccttatccaagaacttgatatcatcgtaaaagttctcggttagttcatgcaacctgattcagttgaacatgagtgtgtatcatcacataaggaccaattacatatcagacacttcagtttccaaccaaagcaaacacgtacccgctgcttgatttcaagcgcttctctctcttcttatcctctttagtgcgaggtgcccgggtaaagagctcttcttctgccttttgttgcctttcatactgtgccataaacctcttctgctcattgctctcaaccccataatagtctctaatctgttcatattcattcacccatttagttccaacatcaaattaatctctaccacgcatatcaactgcaaattaatttccttccaactcacctcttcaggcctgtcctccagatcgtccaacacatctttcatgtatgtattttcagtggcttgtctaaaaaagtgtttctcttttctggcagcatctctttcttgttttgaagtcttatcttccatagacataggggcaaatttcgggggtcgataaacaccatcatcctacatttacacaggcaaagaggttaataaaaataacacgcaacatatttcttcacaagtgttggaggatagtaaggtttcacctcttggtcatcctctttgtcagcaagtaagtcaggtttaggcttataatttgaaagatcttcagatttttgggcttcacacgacccctttccctcggaatgagctagctctgtcacaggcccaccggctgtggtgagcttctgaatctggtactgaagttttttgtctatgggacgaatctacacaaaagaaaaacaagctaaaactatgactccatgacttgttggcgatatagaaagtggaaaaagacaaagatgcaaaccttttccagaaacatacgtatctctacaaggctccttacaagaggatgaccatcaatagagagtccttttgctttccttagaatataatatacaagatcctggcaataacttagaagtaacagatgcttggcctcaagataacttatcccacccgctgtcggaaaactgtttgcttttacctacgatttgtaaaattaagaaagtcaggatgtcatgaatgacccattgtgtctctgaatggtaacggcagatgcagctatatacaatactttggttaaaaatcctcaaggagaagcaaacagtttgttctcgaagtcgtcaattctacttatacccaattgaaactagacatgttatagacgagaccgagtagatattaataaagtagaatccaacaaaaatatgttatcagattacgtaccaatgcagtcagagcttccactttgctcctaaccacatctagaacattcttcatttctctcaacacggatgctagctgtggagcttctctgagacagttacaataacaaaaacgagaccagtaaaaacatgaggcatatctaaatacacaagttattattttcgtttgattgtgagttgtgacaattaaagtgattcaacgattcattattcaagctgtattctttttttctttatggctaaaacagagaacaatttcatgatgggtaagaataactcacttcttaactattccaacaaggaccggtttggtgatctcctccatgattcttgttcagtacttgacagaagataagtctgtgaaaaaaggaaaacaaacatgaaagttcagagactaacccttgaatttgaataccacattaagatactcagataaactaaaccatagtaactgagaacgaaaagaatttaattcatgttgagattttggaacagagattatggtttggtccaacaacgtttgaatatctaagtaagcagccaaagagtagctaaataaaagtttcatcttcaatccttacgttttcctacaaatactgtctaccaatttactaattcatagaaacaaacattcacgataacccaatgctaaccaaaattgatgaattcccaacagagcaactatctctccgttttgactcgattaattgagctcagtggttgtcggtacaccaaatctagaagcggaaaagacacgaagaagaaagcactcaccggagatagtgaacttgaaggtgacagagagcgacgctaagaaaaaggtcacggcggccacaaagtaaaattaatcgaaagcctctctctactgattttccgacaattaaaacaaaaaaaaaaaggttttaaggagacgcatgattctaacatatttcaggccccatttagctttagggcccaataagggtggctaagtttaattatcgcaagacgcaagcaaataatttagcgcaatctatggttttggtggtttaatcattttggttattcagtttcgacaatatgattcttttcttttataatcaaataatcagattttattttaatttttgctgtgtcgttagtcacaataatcagttgagtttgagaacgaacactgagttctgattccttcagtctcctccatatagcccatataggactcgactaaaccaccaaatctttcatctgccaaaatctacttcatcagtgtcgttgccttgccattaccgtttatgttggttttaagagaaagacaaagctctgaatcaacactgaccaacatgtgtctcaaaaagaaacatcaaccataagttacagaaatgtgcgtacagataccaaccaaacgtttttctactgccgacactactacagtcacaatcattggaccagttccaaagtcttgaaagctatgcgttatttcttactccgaaaaactcaacacctctgcggattgactcgtgcttactgctaggttgccaaaacaagagccaatgggatcacataccatttaccattctcttcatctcggctgatcttctagaatctggttcttcaatcgctctctcggtcagcacatgcttaatgcggcacattgatctcctcacctatatttgtgagaggcaaacaaagttgacattcattaaaaaataatcataatctccctcggtaacaaagaacataaccattccttgaagaaaggattcatgtttcttctcgtagtatctattattttgtcaacaacttaattggatagagagtcaaagccaaattagtatcgattacctttggaatgcgttcagggttaggaaactgcatgttctgagcctgaagcatctgacgctgagtcatcaacatgtttttctctttgagaagaacgtaccacagcttctgaagatcatcccatgacttgagacgcagctctgaagctttccaacctcgacctaacaccagaagtttacaaattttcccccattaacaaaactaaacaatcctaattccaaaaactccatgggaggataacaaagttaagaagaaaaacgaacgattagcaagcttgactacagtcctaagctacagtgaattactttacttcttcactgtacattctatgaacaatcccactagtaaactagtattaagcagatgagtggcagaaaacagagagaagctaccatagacaacaggtttatcttcgtcttggcttctgtcgaactcaaagaactcttcgagtggatttgttggcgtccgaatcgtcgaggcagctgctgctgctgtagtggactccgatcgcgccgatgcagccgccaagaatctcctcccgacaaatcgcgtaagaaacattttaacaacaaacaattcctttgagcttgcagttatataatctgatcatcaacaacaatcagaaagagaaatcgagattggataacaaaatggtaaatggttaatgaaagtcgtacaaaatatttcaggcttccgaagaagtgagagatcgtgtacacagaaaagcacatctcgcagaggaataaataagaactcaccggagatagagagaggagagctatttcacggcgacggtgacggccacagagaatggaaaaccctctctcaacgtttctccgagaataacaggtttacggagacggaaacttttagggcccaatactagctctgttagtattgatactattattgggccaggtttcattttctcttttaaggcctaataagacccaacacttgcaaattattggaagacgaatgctgtttttgttttgtttttcaataaaacaacatctttcaattaaattgggagcaatccacgtcatcgatccgtcaagtattgttaacgatgtataaccattggatcagtaatcaacggttgatatgaaaaatcacacggatcaacgcagttttatatattaagacattagttagccacttcatatccgtcaaattcaattgatcctctctccaaatcatcttaaaagtatcttcttcttctccatctggtttattgttcgatcgtcaattcaattgattgatttggaaatctagcgtttctgttcgttaccattcactgaataatttttcttctgttcttcacagtcacagatctttgggtatcaagtaaaactgtgaagtgatgtcgggaagaggaaagggaggaaaaggattgggaaagggaggagcgaagaggcacaggaaggttctgagggataacattcaaggaatcaccaagcctgccattcgtcgtcttgctcgtagaggtggtgtcaagcgtatcagtggtctcatctacgaagagaccagaggtgtcctcaagatcttcctcgagaatgtcatccgtgacgccgttacttacactgagcacgctagaaggaagacggtgaccgccatggatgttgtctacgctttgaagaggcaaggtcgtactctctacggtttcggaggttaatccgatttgggggattagggtttatgcaagtttggggatttcttcttgtttctgagatctgtgttaaatggtttgaattagtctaaagtaaatctaggagtgttagctactgcttttgttttctattgtgatgtcgttgttagccaatgcggtgtagttgaaaatctttgcaaacttaaagctaagaaaatctaatgaggatgaacaatttactcgatatcttgtctcctggttttttaccatttttaactgtaatcccaaagcttctgggaagattcatgttgaatcgagaaacagagctacatttcaccctatcttcattggtactcgtaagatcaggattcaatcaactaagcaattaatgataattgataaattacagttgaattctgctatgagttcgttttttataatctatagacttggaactttggaagcagtcaatattgcaggaaggggaactaaacagaaaacaactagattactctgtctcacgtgaaggagaatgtatctttactctgatctgagtacacaaaatcaaatcacccaacaatgaaggcttgggtgaaacattcatcaatatttcatccatgaattatattgatttggaagcagtcaatattgcagaaagagagatctatctagcacataacttaggaagcataaaaatgaagggctttgttgaaacattcatctatttcaggctctttgtccgtgaaccaaatgagaagcaagttagaacatttttatcaaaccaaaaattatcgttttagaaaattaaataaccaacgccgaggtaagtaacaacgctaatttcagctaaaactaagagtctaataatataatgcttttgatttatttcttactcctccttttgcttcgtggaaagagtgcgaggtgagtagcggtagccactcgtacaccttcctacaaacttgagcacttcgtctataagaatcactggaagcgaaacagccagtaccagcagccactcgttcaagctcagtggcactatcccaaatacctgagccaggaatggcacgtacagtatcacaaagtggagcccgaatgagacagccatagccaggagtaaccacgggttcacccacggcggcatcgttaccaggctgccgtcttctgagagtgcgttcagggagttgaacatttcaatggccaccaacaccgagagggagagtgtggacgccttgattttcccctgctggaaatagtcgcaagggtttgagtcgaacgagaaagtctgagagcctgctgtgaaaggagacactttgaagccttcccatgaagagcattggccccaatgtgcgagctgtgaatagctcacaaggctgtgaccgtcttggctcaagtctatgcccatgaagctactgtgtgtgtaccatatgatgaatactcccaccgttgctactcccacgtacagaccaatcacctgtaggtaggtatccataatagtcagaaatgccccatacgatgaacaagagagagagagagacaaatcgatttttgcataccatatagcggaagaggatccaggcagtgataagcgagtcatcgctcctacgaggaggctttttcataatatctttgtcaggggggttgaaccccaaagcagtagctggaggaccgtctgttacgagatttacccacagaagctgaaccgggatcatgccttctgggattccaagagcagctgtcaaaaatatcgatgcaacctcgccgatgttggaagagatcatgtaccttttattcatcatagtcatatatataggcttagtatgtataactcaagccatcaatacgaataggcatatatatatatatgtgatagtagaagactcacctgatgaaggccttcatgttgttatagatggacctgccttcacctacagctgcaacaatggtgctgaaattatcatctgccaaaaccatgtcagatgcctcctttgctacctgcaaaatgcccagagctttagaaagctgatagagctatcatcatccggaattgaagatgagagaagagaaacagtacctctgtgccggaaatgcccatagccacaccaatatcagccaacttcagagcaggagcatcattgactccgtctccagtcatggcaaccacttctccatcttctttcagtaacctgacaatctcttgtttgtgttttggttcagcccttgagaacaggagccctccagtctgtcgtagatgattcttctgatcttgaacatccataaattctattcccgtcaagcttcttgaggagatatcttcatctgcttcaaatacgccaatttcacggcagatcgcttccgctgtgctcttgttgtctccagtaatgaccatgacccgaatacctgctgttctgcaatctgcaatggcttgacgcacctctttccttggaggatccttcaatcattaaaaaggtcgagcatcaatatttattaatgaggaactagaaagaaccaaaacaatatcacagtaactcacccttaaaccaacaaatccaacgaatattagattggactcaattgatgaataattggatgggttgagaagttgctggtgagcaggatggtcttcactgccatcataagtggcaaaatctgatggaacatctgagtaagcaaatccgagacatcttaatgcactcaaggacatatcacgtaggctttgtaaaatcagatcccttgagtattggtcaagctctcgttttgaaccatcaagtagctgaatatgtgtactcctttccaatacattttctaccgcaccctgcataatttcaaaattggtctcttaggtgctgaaaaagaggggacaatggttttatcgactaataacatgcaagaaccaaagcagaagccacttgatttcccacgttcgaccccaggagtcaggatatgatcaatgatgacaaacagaccttgaccagtagcagtttgtttcctgagctggaatccaccataactcccattgatttccggtcacggtcaaactcaagggtggcaatccgttgttctagttcactccatagccgacaacaaccttcaataatgttaaaaaaggaaaagtgcaggaggttaggcatctgtaaaactgcataaacataagtaacagatatagttcagaatacatacgtaagacatcgccatcggacgaagcttcattcaatccttcgggaaatcccattttctcaaccaaaacctgttcaaataaacacacacaccaatagaaagaaacatcaactaaggacaacgaatagagttttcttagtcaatttagttaagaagagaaaggtgcaagctagtgtagtagaccgctttaccttcaaagctgcctcagtaggcatgcccctagacacaaattgctgatcagattgctcgacattagcatcgttgcaaatggcagcaatttttgcaatcatctgaagatttgcatccatccgacccattggccaatcttcaatctttccatctcgaggatcaaacgaggtcccctcaacattgaaagatcgaagagtaccgatcctcgaacccatagcaacgagcttagaaacagccatctgattggttgtgagagttccagttttgtcagagcatatcacggtggtgcatccaagagtctccacactgggtagcttcctaaccagagcattcttctgagccatcttccgtgtgccaagagccaaacatgtggtaataactgctggcagaccttcaggaattgcagcaaccgccagtgcaacagcaatctcaaagtaatatgtgcacttctcgaaggagaacttaaagtttctgggccagccatcaacatactcccatgacagaaagtatttgacattgatgagccacactaacgcacaaattaacccaatgatcatagtcagaacttccccaaactcgttaagttttttcttcagaggggtatcttcctcgtgttgtgcagcttcctggatctgtgagtgaacccttccaatctcagtattcatcccagtatctgtaactaaacatatgcagttcccattcacgacagtggttcctgcaaacaccatgcatttctttccttgaatatcagcattctcatccacgtgcttggtggttttgctcactgcctcactctctcctgttaaggacccctgctcgactctcaaagttgaactgatcaaagcaaccacacgcatatcagcaggtaccttatcaccaaccctcagttccacaatatcaccaggaacaagctcctttgcaggcaaactggaaaccttagtcccatcacgcatgacagttgcttgctgagactgaatctctttcaaagcttccaacgccttctcagcattagtttcttgccagatgccaacaatggcattaacaattaagatgagaaaaataacaagcggctcaacaaatgcagtgatacccatctcaccaccttcgtcgccatcaaagaaggccaagacaaaggaaataacagcagccgccaaaagaatacgaaccaatgtatcattaaactgctccaaaatcagcttaaaaatagaagtaccctcaggcttctctaactcattcaaaccatagatctgatgccgcttcaacacctcatcactactcaaacctttctcacgactaacaacgaaatgttcttcacattccgcgacatctttagcccaagcaggaaacgtatccgaatttacaggtgtagaatttaagctttccttcttcacaaggtcttctgatcctttccccatgaattctcactcgttgcaaaacagattcgtcaaattctcccggaaactcgccaaagcttacggttttcgactgcaaattattaaaaaattagatcctctgaatagctgagaaattagaaaaacttcactctaagatactcaattataaaactgtagcaacataatcatcatcatctcaaacaaattacaaaggaataagactggatcgacgaatctatagagagaatctcagtcccagactaaaattcaaagatgagcttaaatttagatctgagacaagagaacgattacatagtaggagcaaatcgcaatcaaggatacaatcaatggagttgaagattgtgaagtagtaacataccaaagcaaatccggagctagagagaaagaaacttcccgctgcaagcaatcgcagggacgttctctgacgtctctctgataactcctcttattaattaaaaaaaccagtgattcaaaaagatgctgtttaagcccaatgggtcactgtttcaagtataagtgctactactcattctaatattgatcgtctttgggcctataaactttacgttgacatatgttgcagaccaaattatcatgataggtcacaaaacgttttggttaaaatgtttataaagtaggttatttttttttttggtaagtgaccgggcggcaaagagccccccgtttttattcaaacttaaaactaaaaattaccgttctgggatctgtcttgggcaaactatcccaaggtcatcctctcgccaaagtaactcaacaacattcggaatagagtaaaaaaagtgcaaaccaaaagctaaagaaaaagcatagtttgctaatctatccgcaagacgattagcctccctatacacgtgaacaattcggactatccagtccttcgataaaaagccatggcacaatcgtaccaggaaagacaacgggtgatgatcacttatccctgtcctcaagaactccacaactatcgcagaatccacctccaacactacctgcggtgctttcctctcccatgcgaaatggagtccgtaataaactccccataattccgccattggtgccgaacatctccctatattcaaagaaaaacctccgcaccaccttccctcatgatctcgtaatactcctcctgcagcagctaaacccggattcccacgcgaatccccatccgtattaactgtcaaccagccaagcaacggtttctcccaccctaccagaatctctacgcgcgagcgtcgacctccctgagtgaccaactgttgattagctgctgaaacctccttcgccaaatccctcacaaagcgtaccctgtcccgacaccttctattctcaccaaaaatattaccgcacctccacttccacccccaccaaactgctagtgcaaacatcgtggaccaaggcccctcttccacgttaacctgctcacagagattctcaaagagccactcaaataatgacttcgtaaagaacgcttgttgtttcctcctaggaacaatcctgctccatattcccgacatcgaagggcagtctctaagaacatgcaagatagtctccactccccctttgcaaacctgacaaacctcagaatcacacaaatgtctcctgtatctctcggcatttgtcatgatcacttgactaattactaatttgatggtgatttaaaaccggacgatggcaaaacggaatgtcaaattgtttagttgtgattttgggtcgtggataacataacagatcaaattgttgggttaacactgacaaatgtcaactattctacgacgcagcttaatataatgtcgtgatttggaataacaaaatggtggatgttatgtagtaactgaatacaagattattaattaatttacaagtgtttattaaaaatcatccacattctccgtgccaatacatgatcggatcaaacaagccgaagcagtgaccataaccgccgcgaaaatcgaaggcacaaacaaatcaaaacgcgatctcttcaccatattagacggcacgcatatactctcccctgcaaaatccatcggaatcttcacgaaaccatctcctcctccgcacgaagacgacaccgtagacacaaaagccatctccggagcaaacgaagcgacggccaccgtgaacattagaagcaccgtccacgtggcagcctgagcgatgaccggccaacggtcagagacactccgtagaaacggctccattagcgatggaagacggtgatacatcttgatcagaagaaatggggattgttttagcgtggatcaaaagaaattaggtgttggtttgcgaggaaacgaaaagattgtgagatcgatgagcaaaaaccagagcttgtttgattggtgcggtttatgtgtttggaaacggaaatgaaaatggaaaggctgcttctttgcacgtttaactaactactcttctttcccatacacacacagagagttgttaattacgaatttgcccttccctttgaactcttctcttcttcttttgcccttccgggtcgtctccgtcccctttgacactcccacgttttcagcaatatcaatttttgtttaatcgacggctgtattagttggttgttaagaaatttcagactcgttcctccataattcagatataggaggagaacataaactatattatatgattatggagtaatgacagtgatttatgctttatgttgttcaccaaaaactattcattaaaattaagcgggttcacctaaatctgatgcttatagcctgcttgtggcacaacgataacgataggtaattcaactactaatcttcaattttatctatttcaatgactccaatcatatcataattagactctgttcgttataagaaggtaagaaagcaacatcattcaaggaaaagtaggccaatttcgcgtatcaaataatataaacacacacatataacatatacttcaatagagacacatttcaatatagtgattaggtaaatgaaattgaaatggaaaaaaaaatcgttaaaaatatataatccaacattgaaattcataaaaggaaggaacaatcttctctacttcctagagttacaaagccacaaaatacgaagttaagcgaataatgcatctaatttcctacaagtactaaaaaccaaaccgaaattgaaatccctaaaaaccctaaccgggtctcttcaagagctagtaaacttggtaaccgccttggtaccttcagagacggcgtgtttagcgagttcaccggggaggacgagtctcacagccgtctggatctcgcgagatgtaatggtcggcttcttgttgtacctagcgagtttcgaagattcctgagctagcttctcgaatatgtcgttgatgaaactgttcataatccccatggctttgcttgaaattccgatatctggatgaacctgcttcagcaccttgaagatgtagatcttgtaggtttcgacgtttttcttagatcgcttcttcttcttgtcaccggcttcctttggtggcaatttcttccccgccttgggtttcttctccgccggagccttttcagcagccttgttctcttccaccggtctctcagcggcggtttttttctcggcgggcttcttctcggctcttggtgccatcgtgaattttctttctgattttctcgggaaaaggaagttgattgaagtagtttagtggtgaatggtgataatagtttagattttatagagaaggaacaaacgtattctattggatagaaatcttcacgaggatcattgacgtgtatatttctcattcgttaaatttatcaatgctcaaattagatctgacggctgagagaaacatcattcatttttacaggttcaagttatagctttgataggcttcaatggtcgtgacaaagaagcccattgggcctgaaatgaagcttgagacgcagcgcataacacatgtcaattggtttctttgattttccctagtataaaaagcgataagaaaactctagctcaccttctcttcttcctctaattgcttttctccgtcactgagtaccttgcctctcgagctcccaatcttaaggtacaattgatcttcactatagtcgttcagaatctgatctgcttatagaaatattcagaagtgtgagatagctgctaattggtctttactttgtttttttctcttgcttcacatcagaaaatttaggatcttagagcttttcatagtgaacttaagaacgcttttcgaattagtcagtcttagctctattttgtctgtgtgtgtattttctggacacgagacctttgtttcaatttctataagtgatttcggtttacattttaaaagcttgatttattcccattgaaataaatattcatgatgagtaaatctgtgcatttgtatcaaatttttagtgctttgcagattttattttaacgcaagctcttgtttgttgtttgacttgtttagtagaggattgagcttaaggcaagatggtaagaaacttaaatatttattttgaatatttgatcaattatctatctttatgaattattgatcaagaaacaaaatttaaagaacatccgggacttgaaaaagtagtggaaatttcacaaaaccgaaaagcaaacggttaattcggttttacaaagaccaaacagaaaattcaataattcggtttggttcggtttaattacaccgaacaaaaaagttggtacattcgtttttatttttccgccattcttgtcgatcttcttcagtcgtaaaaccgccgcgtctctgctgaccctcctcttctcatttcatcgacgggagaaaatcccataccatctgagatttccaacagtgaaattaagatgtcaacaggtattattcttctggtttagctcattgggagaaatgcagataacttgttcgatgtatttactcaatgagcttgattttgttttctagtagtgattttgctgctatcaatctgctttagtgatgatccattttcatattatattgtttgcttgacatgttcatgcactaataggaatctcgattgtataattgtcttgtaaattcagagtttgtgttgttttgttaatagtgagctttattctaagatcagttgatgaagcaagctttcttatttttcctcaggaatatccactgatctccatgtccattttggagctctaaatttctcaaaaacctacaaatctggtaacttttcttgacttttagtttttcttcagatttcactagaccttctgtgtgtgtgattctctttgtttccggctaattactgaagcttgccattgatctcttttttcctactggatttgtccaggtttaagcaatcgaacggtgtctttttcgagagtcgggtatgctcagaacaggaaattgagctgcagtgtttccaacacagagaatgtagctcctaaggatgatgaaagaggaaaggatagacctttggttaagatgtgtggcatcacatcagccagagatgcagctatggcagttgaggctggtgccgattttattgggatgattatttggccacattcaaaacgatctatttctctttctgtcgcaaaggatatctccaaagtggccagggaaggtggggccaaacctgttggtgtttttgttgaagatgatgagaacacgatactgagagcagctgattcctctgaccttgagcttgtgcaggttctctacattcttatcgatttttattttgctctcaccaaagtgattttctcaactttattaacggttgatagttatggtttcttacagcttcatggtaatggttcgcgtgctgctttctcgaggttagtacgcaagaggagagtcatatatgtccttaatgcaaatcaggatggaaagctcttgaatgaagttcctgaagaggattgtcatcttgctgattggattcttgtggatagtgcaacgggtgggaggtaccaagaacaacttttcaatttctttcgcattgtaatgtactccttagaagaaaaatttaagcaatcactctagtacataaaaccatttgtctttcacgaggtgattgaaatatcaagagtgtgataggttcaatcataacaatttgctgcagtggacacggatttaactgggctcaattcaagttgccttccgtcagaagcagaaatgggtggctcttagctgggggaatcaatccaacaaatgtttcagaagctctttctatccttcaacctgatggaattgatgttagtagcggtatttgcggtacagacggtatccagaaggataagtctaagataagctcctttataactgcagttcgctctgtacactactaatggcaagcaatataaaccacggtaatttatcttgtaactatagttttgagcatcaacctgttgtttccaatccatgtcattaagttttgaattgtaactggctgataataataataatgcccttttttttcatcagtagtagatttaaattaaaagcgttgggttgtcaccgtaataatgtcgttgggctctcaagaacaagatccttgtatgaaatgtattctactgatcatatattatttcatttgatcgagagttttaccacaggtttctacaaattaatgcttttttaatctcgaaaaggctttacaccaaaacaaaaagaacataatgaatgggccaagatgaatttatgtaacttgtctgcctggttcactgcagtatgtcctcatgttctttgtccattgagttttggatctgcctcatagtacacgacatctcctgtatcgcttacgaaatggtcttgtttcgcattgcttaaatggtgataataggtttactcgaggcttttagattttatagagaaggaacaaacgtattctattggatagaaatcttcacgaggatcattgacgtgtatatttctcattcgttaaatttatcaatgctcaaattagatctgacggctgagagaaacatcattcatttttacaggttcaagttatagctttgataggcttcaatggtcgtgacaaagaagcccattgggcctgaaatgaagcttgagacgcagcgcataacacatgtcaattggtttctttgattttccctagtataaaaagcgataagaaaaccctagctcaccttctcttcttcctctaattgcttttctccgtcactgagtaccttgcctctcgagctcccaatcttaaggtacaattgatcttcactatagtcgttcagaatctgatctgcttatagaaatattcagaagtgtgagatagctgctaattggtctttactttgtttttttctcttgcttcacatcagaaaatttaggatcttagagcttttcatagtgaacttaagaacgcttttcgaattagtcagtcttagctctattttgtctgtgtgtgtattttctggacacaagacctttgtttcaatttctataagtgatttcggtttacattttaaaagcttgatttattcccattgaaataaatattcatgatgagtaaatctgtgcatttgtatcaaatttttagtgctttgcagattttattttaacgcaagctcttgtttgttgtttgacttgtttagtagaggattgagcttaaggcaagatggtaagaatcagtgttcttaacgatgctctcaagagcatgtacaatgctgagaaacgaggcaagaggcaggtcatgatcaggccttcctccaaagtgattatcaagtttctgattgtcatgcagaagcacggtatgattatcccaccagattttatataatagagattcctaagattctcggatgttgttccttaaattatgtggttaccaatcaaatgcaggttacattggtgagtttgagtatgtcgatgaccacagatctggcaagatcgtcgttgaattgaacggaaggttgaacaagtgtggtgttatcagcccacgttttgatgttggtgtcaaggaaattgaaggttggactgcccgtttgctcccttctagacaggttcgctcttcttataaactttctagttacagtggccttatgaattataagatcaagatttggaaatgtttttgaatcactttgcatactgtcccgaaacatcaatagtagtagctttgtttaatgctcgctaatggtattaatggattgaagctattaaattgtgcagtttggttacatcgtgctgactacatctgctggcattatggaccatgaagaagctagaaggaagaatgttggaggcaaggttctcggcttcttctattgaagttttattttatggggaaacagattttcattgagttatttttaacttttgtcctccattttctctgaaactacctttctctttctttcgaattttgtgataactttgatggatagtgttctgaaatcactctttttggtttggagcccttttttagacttcggatgcactcgtaaaattattctaaaaatctctgatttggctagtctcttaccttctctttaccggctataatctctaagttgcggataatgctctaattagtcatacgagttcatgtatcaaacgacgtcgtaataactcggaacaaaatcattgttgatctacatcatatcatctacattgaggcttaaaacatcatatcaataccttaggatcatttagaattcttagaactgattaactgtagatgaaatcacagcaacggattaatacaatatgcggttataagtaaaaagaaataagaagcaaaaaatactgacaaatcatagttgttatatcatcaagaaacgtggaaaacaaaagaagaagaaaaaaactcttcaagaaccaaatgccaaaggaacatagttgcccaatttctaactctagttttcacccataaaatggatcacaccttattagaaaatggtcttacggatcacacttccttctccagccaaatatggcccccgtctcatctcatctccggcgatgggagctcgaaagtaccttcatgtatttagatatgtaagagataagagaggagagaggaaggtttgatgaggagcatccattgttgatggtcttttcgaccttatcaaaggagaagccaagtgagagagacgtttcattttgggtttatagaccaaaaaagtggtcatttgtgagagtatcttcgaaagcatatgctttgaaccattaactaagctgacctgagtcccattattactacttttgattttcttcttcttttttctcttttgttagtatattaaaatctatttaaattattgaggcgagtaacatgggttgcttcgccacaaatcaaaagtagaaaaaaagtgaggtcctcttttcttcgcctagttgtttctcattggactgcttccaactcttgttggttctgtcaattttacgaggttaccaaatttggttcagttttgtgaatcacttgggaattaggttacgttggtattcttctgcgtttataaaacgtgcctatgatctaagtaactacccaagtcattgtctccagctagtggaaagcgacacgttactgatgttagagttgatatgatttgcatattttcttgttttaaagcacattttgtgtttgtgtttacaattttacatgaaacgaaattaacattccaccaaccatcaattatacaagtgctattaaatacaagatttaggtcagctgtctaatgcaatggaacttagcagcaattttgaaaaaaaaaatatggtactaatagcatattgttgtgataaatattactatctgatcatcacagtcattcaagtggctgtagtttagtggtaagaattccacgttgtggccgtggagacctgggctcgaatcccagcagccacacttgttttggttattttttcatttttattttacatgggcatgtgattagctttctgctaaagccccttaagataaatgacactgatgggcctaagtattttctctcggggggatataactaagcgttatgatatatatttttttgtttttgtcatctaagcgttatgaatatgcaagttagatataataataattaggccaaaattaattacatatttatccatgttaaactaatccttaataacagcaattctttcaacttatccatcacgttgctcgttggattaaattaaaattataacagtctgttgctacttatatttctggataaatcctttacaaaattagagaatatacaatcctgtcagcagatcccatccttaaaaaattagcaaaagaaatataaaatcagcgattaccttagataaaaaaaacatacgatttttgaattcatcctttaattttatctttaaggtaacaaaaaaaggaaaacataatcttaaaatcaccaaattggaaagaaatatggtgacataattgagaaaatatttacaacaaatattctgatgattcgatttgaccaaataatacagcacttttagtagatttatttaaatgtctcaattagtatttgtttatgaaaaaaaaacgaagaacgtgatggattaacaaaaattatctcctcacaaaggaatctttatttggtaggcaaaatataaattatatcgtgggcataaagaaatggataaaatttggattaaaaacgttaaacaagaattatccacaagtaaatcgtaacgcaatcaaaacgccgaatcagtctctctattagtaacggattcaccctaagcctctcctatataaatacgtgtcgcatctctttcacatttcacatcaaaacttactacttcttcttcttcttcctttaccaaatcttttcttctttactctttttcatcgtcgagaaaaaatggagttggatcttacacctaagttgcccaagaaggtttacggaggagatggtggatcttactctgcctggtgcccagaggagttgccgatgctcaaacagggtaacattggagccgctaagcttgctcttgagaagaatggcttcgctgtccctcgttactctgattcctctaaggtcgcttatgttcttcaaggttcgtttttttctataaaagttttctactttattgcgatccatgcgtttttgtataatgggtttgttcgatttcatcactctgcttcttcttttgagggtttttgatcttttctatgttctgatcttctttattgctttaaaagttgtcaactttatggtaattcatgcactttgaccactgtgattaggtttattgtgatgctgattctatgatctgatttttgttgtagaaagtgaaaaatatgatagtcaaatagatcacgactactgtgtgcaagaaaaaaaagtagtctttagctgtttttgttttgcttaatcacgtcttaatcgttgatctgatcaacctcgcgtgtaaggaattgaaagcttgtttatttgactctttttcaaatttctgtttcaggatctggaactgctggaattgttctcccagagaaggaggagaaggtgatcgcaatcaagcaaggtgattcgattgctcttccctttggtgtggtcacatggtggttcaacaacgaggatcctgagcttgttatcctcttccttggtgaaacccacaagggtcacaaagcagggcagttcactgagttctatcttactggcacaaacggtatcttcactggtttctccactgagtttgttggcagagcctgggaccttgatgagaacaccgtgaagaaacttgttggttctcaaaccggtaatggcattgtgaagcttgatgcgggctttaagatgccacagcccaaggaggagaaccgtgctgggtttgtcttgaactgtttggaggctcctcttgatgtagacatcaaggatggaggcagggtcgttgtcttgaacaccaagaaccttcctttggttggagaggttggctttggagctgatcttgttcggatcgatgcacactccatgtgttcgcctggtttctcttgtgactctgctcttcaggtgacttacattgtgggtggaagtggaagagtccaggtggttggtggtgatgggaaaagagttcttgagacccatatcaaagctggttctctcttcattgttccaaggttctttgtggtttctaagattgctgatgctgatggcatgtcttggttctccattgtcaccactcctgagtaagaacttttctctgcactttcctttttgaggtttgaaattgaaagaaactaatatgtttgaaacttttttcttgtgtgtttgtagtccgatcttcacacatttggccgggaatacatcggtgtggaagtctttgtcccctgaggttttgcaggcagcgtttaaggtggctccggaggtggagaagtccttccgatccacgaggacttcatcagccattttcttccctccttccaactgaagaaggagaagaatgagaacaagaaccagcttttatcttttatcgtttgttgctttccctcagagatttttgagggtttttacttttcttgtgattcaaggaagtttcttagtctagttgtttaattctcttcctgccttttccccctggaccggttcttgttctcgttgttttaaaatattaaaaaatcaacctttcctatattttacagtcttccttcttttcaacttttggaaaaattgaatcaaaagaaatttgtcttccttcaaattctcactttcatattaaacttcagaattttgatggttcaaaaagaaattccaattactgtaaacaaaaattccaatcaaacgaacactatattgaaaagtaagttcatgtaacgatgactgataaaacattacaacatgtgattttgatgacatgaaaagtaagaatggtttgataactactattaaaacctttgacaaacaggaacaggtacaccacacgcttctaaaacttgtttagcagatgtcatatatggagcaatcaatgggtttttcaagtactcacaaaaacacgactttttatctttcaattttgtgcaacattttgtcgatggtggggtttcgcctattatatctggtaggcatgctttgagatctgtcacgacgcatgccgctttctcctctgctttggtcggagccattgacgagagaacaaacgcaacgaaaactaatgtagtgaacttcatcttcatgtcttgtaagttgtaaccttaagtttctccttctatctaatttctagtcttgcttagaaaatgcttgaaataatcgattacgagatttgtttaagaatggagtaatgttttgcagtataggctgatgtgtgtgttttaggtatatatatagtgtcgactgtctttaattgttgattactggaattaagctaacaaatttgaaagcactgccttttatagaaactggaaagatttaattataggaaatgaatcaatcagttcacatgtgtatatacagtttggaaatgttcgaaaatacatatagaagtttgatattaacaaatgatttcaatcaatgaaaatcttcaaagatttaatataaataaaatttctttggaaagtaattaaataggaaaaaaaaaataagagatctggaaatttataaatttatttggtttaggttaactgagtatcggtttaaaattgaggtgaccaaggatgttaaaatgggctaaaagtttagggccggtccggatccgttgaaaaatataagctctgggcctgataaaattgaatgagagattttcgggctaaaacaaggctggccctatttgcggttttcagattggggtaaaccgggattaagagtctgggtcgtgaaaacgaaccggaggctaattggatttgttcttccttctccacattccaatttgagggcagtggaggtgtaacaacaatggcgcctctcaaacatctggagaaggaaaatccaatcatcgacgcatgtttccaagatttctgcgcctctcatggaattttaacaagttgtgttctacatcttctcttcttgtatctcgttttctcgtatcgattctatttgatttctcctgtttgcctgcaaaaaaacgactgtggttggcatatgaacatgagaaacacaattgcttagtccaattactgtaagttcactttaaaaagttttgaattctggaatctggatagtgcgctgtttgatatttgatcgtttaagctaaaggtgttcgacgaattagatttttgtagttatagagtcggattcggtttggaatgtttgtgttgatggcttttctcaaaattgcagttgaggatttccttctgcatgatctctacgaacttactgcattttctcaacggcagacaaatgcagatagattgaaagaggtttttagctttttacttaacgttactgtcgatttttgaggtttaattgtgtgtgtgcgctcaaaggtatgtgacatatgttttccttcggatgcttcagggtatcactctcatcctctctttgatagaacgtcagtgtcggccattggtgaatggtttaaaactgttggaggatctacaccgtaataaacatactctgtcgactggagacaaagagacggactcattgcttcaaggtggattccgtgagggtcagcttacagaacttgtcggaccttcctcttctgggaaaacacaagtatgtattttctgttaggcatttcactattcatgtttttgtcttgtcttctgtgtgaaaattattcatagataatcgttttaaatctttaggaattgtagattgtttcattcaaacaaagagactgttcctagaaaaaaagtgttgtctttgcttaccctttttttgtgctctctctttacattgtgtgatttcttatgaatgactagttttgcatgcaagctgctgcaagtgtagcagagaatcatcttggcagagtcttgtatttagacacagggaactctttttctgcccgacgcattgctcaatttatctgctccagttcagatgctactttagggcaggtttatttatttcttgtaccctagcctatgacccagttctttagtcaatcaccaattatttatgtttttaatcttatggacaagaaacgtataagtgcagaaagtcatgagcagaatattatgccacacggtctatgacatatatacactgtttgatacgctgcaagatctagagattactttgaggttgcaggtattaagctagctaaaagatgcaatctcctcaatgtcactttaatgtctatattcttagtgttaaccatgagttatctatttcttttcacttgcagatgaatgtgaatgagtcccgactacgattgttagttgttgattcaatctcttctctgattactccaatccttggaggcagtggctcacagggtacatacccttgtatgtctatcactttttcttcacctcaatggttaacagttgtgcgggtgattatgaagaatgactcagaaattggtgtgtgcaggacgcgctttgatggtggcaattggatatttgcttaagaagctggctcatgaacatagcatcgctatactggtattaaagaagtttcaggccattaagcgtgtccttgtgctttaaagtcaaaaccttttttttgtgtctccttgtgtattgaaggtgacaaatcacacggtgggtgctggaggagaaggtggtaaaaccaaaccagctcttggggaaacatggaaaagcatcccacacgtgagactttcgctatcacgtgaccataagaacagcaactgcaccatctccatcttaaaacacacatccttggtacgttgctaaccaaacaaaatttctgtatctcttagtccaacgtcatttcctttggttttacagtttctgtgtgtgattattttctttgtagccttcaggccaagctgcgaagaccttgactcgcaaggagaatcaacaatgtccataagcctccttggctatatattccacgcccatcgtttggatgtgcaagaagagaaccacataaatgaatgatcagatggatttcttgtttcggttttacatgtagaattatactgcagcaatgaaaattaaaatttgttgaacaaatgagtggtgtgtatataaggatcacatgaatatagaatcacattttaaaactttgcgcgcacaccaaaaaataaaataaaaataaagctttctagtttattccgagtttgcatatttaagctgaaacagagcaaaggaagaagacgaagagaatccgatgcgtagaagactatcttccgtgctaatcaacaatcagtgcatcgcgtcccaacgccattaccacacatctcgacctgagaaacccacaaagaaagccagcagccatgaaccaactcacaaattcaccaggaagccatgggaggaagtgccatttctcaccgatctcaaagaaatcgaagacccagaggaagctctttctctcttccaccaataccaggaaatgggtttccgacacgactacccatcttactcttctctcatctacaagcttgcaaagtcccgtaacttcgacgccgtcgaccaaattctccgccttgttcgctatcgaaacgtccggtgcagagaatccctcttcatgggattgattcagcattacgggaaagccggttcggtcgacaaagccatcgatgttttccacaaaatcacctcctttgattgtgttcgcacgattcagtctctcaacactctcatcaacgttctggtcgataacggcgagttggaaaaggccaaaagctttttcgacggggcaaaggatatgcgtttgcgtcccaattcggtgtctttcaatattttgatcaaaggatttcttgataaatgcgattgggaagctgcatgtaaggtgttcgacgaaatgcttgagatggaggtgcaaccgagtgttgtgacatacaatagcctgattggtttcttatgccgaaatgacgatatgggtaaggcgaagagcttgcttgaagatatgattaagaaaagaatacgtccgaatgctgtgacatttgggttgttaatgaaaggtttatgttgtaagggagagtacaatgaagcaaagaagttgatgttcgatatggagtatcgtgggtgtaaaccgggtctcgttaactacggaattttgatgagtgatcttgggaagagagggagaattgatgaggcaaagcttctactcggcgagatgaagaaaagacggataaaaccagatgttgtgatctataacattctggtaaaccatctttgcactgagtgtagagtccctgaggcttatagagtgctgacggaaatgcagatgaaagggtgtaaaccaaatgcagctacataccgtatgatgattgatgggttttgtcgtatcgaggattttgattcagggttgaatgttttgaatgcaatgcttgcaagcagacactgtcccacacctgcaacgtttgtatgtatggttgctgggctgattaaaggcggtaacttggaccatgcttgctttgtgttagaggtgatgggaaagaaaaacttaagttttgggtctggtgcttggcaaaatctactttctgatctctgcatcaaggatggaggagtatattgtgaggctttgtcagaagtaatttccatctaagcaatgacctttttaaaggtaagattctcatccttgtttattcatgtctgttaaaattaacagggtggacgaatttattttcttcttaatctttggttaattcacagtttcacacaatggaacttctaaattgatacattcaagatcttgtggtgaagttatagctgaagtgttctggctttttttttcttctttcttttctctatgtttcttctctaaaccgaaccacccatataatggaaaagttgtcagtatgtcacctactctgtttcatcaactacatcttcttatatcaccaatatagctcattttatatataaatgctcctctagaatcaacgtatataaacacacgagaattagaaacaattcaactccaattcaaattaacaatcttagtctctgatctttctacttgtcaatggcaggctgcaaagtactcttcttcctgattttagctctcgccattacttttgtctcagctgctcggcttcttgatgaagaagaagatattgggttggtccctttgcctaccacgagtcctggtcctttaccaacagttggtttaggcccctttcccactgctaattcaggccctgcaactggtatcgcttcaggtacaggttcagcctcagggggtttaggttccttgggtaccaatactggccccgggcctctatcgaccactggttctagtcttttaccagttgctagttcgggtaccttgcctgttactggccccggtcctctaccaaccagttctggtctcttaccgggtgctagttcgggtaacttgcctggttcaggttcagggcctttgcctactgttggttcaggtgctgcagctacgggtctgggcgcaggtgcagggtcagtgattggtggttcagttcctgacaacactttggttttcttcatgcacgatatactcggtggctcaaacccgacagcgagggctgtgactggagtcgtcgcaaacgcagccctcagtggccaaattccattcgctaagcccaatggtgcaaacctccctgttagtaacggcgttccatcagacaataacaacaatggaatcctgaacaataacaacgtcccacttctcgtcgggcttggcggaaccacttccaacattctacagaacaatggaaacaacatgttgaacggtcttcccgtggctaacggcggccagctcccatcgggttcgtctcttcagatgctcatgtttgggacattgacggtgatggacaacgaactaaccgaaggacacgaactcgggtctggtctgctgggtaaagcccaaggcttctacgtggcaagtgcccttgatgggaccagccagactatggctttcacggctatgtttgagagcggtggatatgaagatagcatcagtttcttcggtgtgcatagaacagctgcatcggaatctcatcttggggtaatgggcggtactggtaagtatgtgaatgcgagaggcttcgcaattgtcaagacttttacgggttcctccgggacccagcagcagcagccgcaccagttcacagatgggctcgagactgttctggagtgcaccgtttatctttcttactagtttcttttccctcttctcttatcttttttgtctaccaagaaaacgtgaaaacctattaatttgacaaccaatcccttgttattccaacttttactcttaagaacaaaaacagagaaaaaagttagttaccactgtgactgatcatttaacaaactatacctctaaattaagaaagacaatgatgtatacatgcatgtgttttatccatacaacctgtaaatttcagtctaaatttaacacaaacaatttgttgtcccaaaatcaaagacttagaaaacaaaatgagagacataaacggatgaccagcgtgtacattttgacgaacttggaacggctccaacaaaaaaaaacagtcgccgaaacaagaaaccgaagatggtaaataaataccccaacaccttaagacccatttcttcaaacccaagaaacaatggtgctcttgaaacccaccaccttatcaaaatcctctaaggtcgggccgcaacagcaacagggcttctccgagtctctaatcggcgatagtgtggaggcagctgacgccttcatatgccaatgggttactccacacctctgcgactcttcttcttcttcatgcagcctctcttccctcttctccgctcaaaaccgcctagaaggcagacgcttcctcgaggttctcggcaagttacaatacgccattcagagcaccgttgctatgaatccggactccgctaagcttgctaaaggacaggatttgatgcggaaagctatgaagcatttggagaaggagttttaccgggttttgaaatcgaatcgccgctttctgagtccagaatccgtctctggttggtcttctgaatccaacataccttcgagatcaagtggaaccgcttcggattcttcatcagatggagagctttactctgaatcctcatcggaattaggtaaagacataggaggaggagggaattctgatgctattgttgatttgaagatgatagcaaattgcatgatctcctctggttacgagaaggattgtgttaaaatctacaagaagtttcgcaaaaagatcatcgtcgacacattgtctcatctagggttcgagaagctaacctctacacagatgcagaaactggaatgggagattctggagaagaagatcaaaatatgggtgattgttgcgagagtagcaatcaccactctgttcaacggagaacgaatcctttccgatcacattttctcctcctccgtcgctgaatcttgcttcgttgacataacgctacagagcgcgttaaacctcttcatcttctcactaaccgtagcgaaatccagaaaaactgcagagaagatcttccctacgcttgacgtttaccagacgatcttgcaactgactcccaaaatcgatcagatttttagctacgattcaaccgctgccgttagattacaggcgaatgaatctctagagaagctatcggaatcggtgaatgcaatgatgacggagtttcaatcgtcgattacgaaggaatcgtcgaaatcggcgatttctggcggcggagttcatcagctcacgaggtatgtgatgaacttcatcgtcttcctcgcagactacagcgattctctcgccaccattctcaaggagtcatcgttacctttaccggaggattacttcagtagcagcggcgaagagaatccaggatccggtgatcgttctccgatggcggcgagactcgcgtggttgattctcgtcttgctctgtaaaatcgacgccaaatctcggctctacaacgactcggctctatcgtatctcttcctagcgaacaacctccattacgttgtgaccaaggtccgtacatcgaatctcagactcgtactcggagacgattgggtagcgaatcacgaggttaaagtgaatcaatacctcgagaaatacgaaaaaatggcctggggggatgtgatagcgtcgctccccggtgattcaacggcggggacggaggcggaggagtctctgagacggttcaacgaggcgttcgaagaggcttacaagaagcacaagacatgggtcgtacccgacccgaacctgagagacgagatccaagcgtccatagcgagaaaactaatgcccgggtatacgggtttctataagaaacacccggtcgggtcatgcaatattgtcagatttacccctgaagatctaaataattacataaccgacctatatgttggtttaggaagatccgtgcccgtatccaaaactaagaagtatatggttagcccaagccatacgacggatttgaagtaatagctccatgtaaaaagccctcatacgtgtaactctgtgaaatcaacgaatcataggccggtcctaggctaaaagcccatatatcaattttgggcttcaaattatagaccatagatataaaagtctacatttcatttgccatattcagaatcagtgtgtacttgtgcttgcttttgttctctattgatctgatcttcttgtacgtgtgttgttcacactcacgcctaaatcacattcttctttataaatctttttgtttaaccttttcttcgcaaacccataacgtgtagggtttagtttccttgtagtttttagtttattttaggattcagtttggttcggatttatgcgtttttgtgactaatagttttaaattttgtttggcaatcgaatggagaaacagtcatgcacaatagtaaagcaaatgacttgttttatatttttcgttactttgataatgttattatggttagctatggcctatgcatgcaggcggatttgaattgagtatatatttgttgaaacaaacatatttttacaaaaatgaaagaaaaaaagtactccattgacttttttgtaaaattaaatagataaatcatatgatagatgaccgacaaaataatatggctcgttgctaaaaaaggccatgattcgtcgcaggaaaataaaaagaattgtggttggaagttaagtagttagatgagcaagtctttaatgatgatggatttattttagtattctgtatgcaaacgtaggagacgtataccagttttcccacgatgtatctgccatttccttaaatttttcagtggcaacatgcaatgttaacttcaaattctattgaaaaaaaaggttaacatctcaacatactacttctttttgtccatattttgcctgcataaaaaatattaccatcacatatctctctgtcttgcaacaaattaaccaatatacatttggccaacgatctagggtttgaaagaaatgtttttaacacacggacacgtaacttgaatgccgtttatcattataaagaaaacaaacaatatacaaggacacttaatcactaagccacaatgaaagagacatttgattaataatgcattcacacgtaaatgattgtgaaccagtgtcatctctccatttgctaccaatcgaatcgaaaattttggtttatttggataatcttaagaaaagtcaaacttataaaatgaaatgaccagctaactaaaaacaccggcaaacattaactcctgtaattatcaacttagaaagaaaaaaacattaactcctccattattagaactaacctcaaaacaacaactcttaatgctttcacaaagtgtttccaatcttctcgaccatttttataaagcaaattgacacgcagtaaacgcgtgatcgtcattgacaacatataatgcgtccaaataaatttaaatgatgtataaaaaatcatagtctttgtagaattaaaagagatggttatgaatttgaatcgatcaattaaataagagaaaaaagtaaaggacgtagtcgcacgcggatagtgtgagtaagcgttacgttgatggctttgtagtaaaagagagatacgtaattaagttggtggaggttgagatgagagctttcatcacaacactctcacttatatccaaaaaagttcattatttcataaacctgtatattgcttcttcatactagctcactttctcaccaaatctctttattgctctttcacctacaacctcaaattttctatatagcatataataaaacatattaattaattttgatacccaatatatctaaactttaaaacttaatttggtccaacaaacgtcaatcgatacaatcatgtgttcttctagcttatggattctatttgacgacatcatgaagagtttgtacaaatcaattaatttggatattacataaactaaaaatatgttgtttttttttacggatgatcttttaataactgaagatgaaaattaattttagttagaaatgtcttgaataataattaatgtcacagaaaagtcagaacgtaccaaagatttccgcgtgtattaaacttaataaatagacacaagccaagtcttagcagtgtactactactaacacacatccacatcaatgtgtcatctttgttgtatgacacaagttagtatgacaatcagtgtttgagtagtgatggtttaaatggaatgtttgagaatccaatacaattggcggtctgctaatggccagaatatctgccaaagttattttttatctactgcttataaatcgtacaacaatctatttagttctctttagttttgaccttgaagtccatgaatcttaaggacctcttctccacatcattcaaattcacatatcggaaacacagtactgcttgaatgcccctcccatacaatatgtctatccactgatccacaataactcgatggtgcatgtgtgtgtgtgtgtgtgtgtgtgtgtgtgaacttcctggctgtaataaatttaataaatacttaaatagacaggcgaagtcctcgtccacttttctacacctagcatcaatcatcaatgtgccatcttattgtttcaatttttcttaccataactttgtccttgcatgtaacttttccaattaaatacaagtctgtcttttattaacccccgagaatttactaaatgatattgacataatctattggacggaatgagttgtcaaaaaacgagagctgtcttttcctgctccactgtcctcttatatatcccacaacaatctttgctacattttcatgcatttttaatcactcctctttctaactccaataaaaacacaataatggatcttcttgttatgctcctctctcttctcgtctcttatctcatcttcaagatctggaaacgcatagactccaagagagaccaaaactgctacatcttggactaccaatgtcacaaaccttccgacgatcgtatggtgaacactcaattcagcggtgatatcatccttcgaaacaaacaccttcggctcaacgagtacaagttcctcctcaaagccatcgttagttccggtatcggagagcaaacttacgcaccaaggctcttctttgagggccgtgaacagcgtcctacgctacaggatgggctctcggagatggaagagttttacatagacaccatcgagaaagtccttaagagaaacaaaatttcaccttcggagattgacatcctcgtagtcaacgtctcaatgctcaattcaacgccttcactatctgcaagaatcattaaccattacaaaatgagagaagacataaaagtcttcaacttgacggcgatgggatgtagcgcgagtgttatctccatagatattgtcaaaaacatcttcaaaacatacaagaacaagcttgctcttgtcgtgacctcagagtcacttagtcctaactggtacagcggaaacaaccggtccatgattcttgccaactgtttgttccgctctggtggctgcgctgttctcttgacgaacaagcgtagtctgagcaggagagccatgttcaagctaaggtgtttggtaaggacgcaccatggagccagagacgattcattcaacgcctgtgtccaaaaagaagacgagctaggacatatcggtgtccacttagacaagactcttccaaaagcagcgactcgtgctttcatagacaacctcaaagtcatcactcccaagattcttccggtaacagagcttttaaggtttatgttgtgtcttcttctcaagaagcttcgtagcagccctagcaaaggctcgacgaacgtgactcaggcagctccaaaggcaggggttaaagcagggattaacttcaagaccggtattgaccatttctgcattcacactggaggtaaagcggttatcgacgcgatcggttacagcctcgacttaaacgagtacgatcttgaaccggcgaggatgacgttacaccggtttggaaacacgtcagcgagtagcttgtggtatgttttggggtatatggaggcaaagaagaggctgaagagaggagatagagtgttcatgatcagctttggggcaggtttcaagtgcaatagttgcgtttgggaagttgtgagagatcttaacgttggagaagctgtagggaatgtgtggaatcattgcattaatcaatacccaccaaaatcgattttgaatccgtttttcgagaagtatggttggattcatgaagaagaagatcctgatactttcaagatgcccgaaggatttatgtgaatgttttcttgggaatcattgtaaacatacatatacagttacttcaaactgcaaatcccacaaaaggtgactatatagtttattttcctctttctttcttttattttatttaatgtggattctgaattgctacattttactctctctttctttctttttctttttttctaattggatgggaaagaaaatatgaatgacaaagatactgcgatatactagttttctctcatttttttaaataaataattctttgggtgtaataatctatttattgtatcctttggtaaataataataccccaaaaattttaatgttacgcttgatgtgacatatttagttactaactaaagcttgtcacatatttatttttgttagcttgtcacgttacatgttcatatgccacttttagttgttgttcaaacagaacattatcatttgttatctttttttttatcgcaactccttgtaatctgttgttctattcttcattacggtgtattctcttaagcaagttattagggtttaaaaacaaaaaaaaatcagggttttcttttagaaatctataataattgagaattagataataataattgagtgttcatgattatgaaaactgtcttaatgtgctcgagagctattgcctatatatgtgtatacatgtcattttaaattgtattatgaaattggaataatgtgtcagcattcgattggtgaaaggaaaataaaaaaggaaaagagagttggattggtaggatgtgcattaaattcgcattgatttcaccacccgattcaggtcccatatattccaccaacatatatttcacggatcagcttaattaatcaaatattcagccgccacaattatctaaactaaaccaatggtgattattaattgcgaaatagtaacatttatattatgtcatttttaacgtattcagatctagaattagcaaaattaaaattgttttcttcaatggatgcttactacttgtagatcattttctttattttttttcacaagattttcagatgtttgaataggaaaatattcgagttaaaaaaaaagggaacttttattgtttggatttcactatcataatctaattctaacggtccacaacaattttgacccaaaagaaaagggtccacaataattaatccgtaattccaaaaattatctttgaaaattgctttcacacaatatattaaactcgtcattctagaataaaccacatttaaagcagcagagcagtcaaatagagatgatgcaccatgtccttttgattgtaacaaaatttacttggattggctatatatttattatagcatggattggtcaatatgaaatccatgtgtggctgaagctttgagaattagaagaagactagtggttagagaaataagagaatagtgacagaagatttttagagaagagcagagacctgatgatgtataccattaccaaataacataaagcagcatatttaagtggttagaatgtattaatgttgcctagctacttgtaggcttctttatttgcatgaagctcttctgtttgtcactcacttttatttatcttaaacttaattcgtcttttctttgttaagaaaatgaatttatatttattgcgccgaaccaatcttccatttattatttgaggtggccgagaagtttacattattatttgggtcgaagacttctgttacctacaacgcagagtcatatttaaagaataataatttactacttaccttagcttcaaagatcttggactgccaaaatattttcttggcctcgagaaagccttcttttctaaagtctcttgctcacaaaaacagtaagattttaaatatagctgatgaattagatgtggttaagtcagtgttaagcttctaaatattataaggagaacactgtggattaagttaagactctttttaattgaataatatataaacatttgattttgtttctaacgcctaacctagttgctatcatgaagaaaaaaaactatcagatgtgtttggtatcttattatttgcatggaatggcatcgtttgtcataatacaaaaaaaattgaaaaaataaagagtaacaactaaaaaagaaagcgaaagcgcacacgaggtcgaaaggtcaagagagtggaaagcaattgcaaaattgaacgattaaaaactttattattgtcatactgatacatcaaattttacttttaatttccaaacctgcacttatagaaacgatcatacatcaaagctaagaaacgaatctacttgctatttttaaaaataatgaagtagagattaaaaagaagaaaacattttataagattgaagagtgtcatgatcactacctttcaagaaagttgcacaaatatttatgttttagattcgttttcgtttattggctgatggattcacatacaaaagtgattgacgttgctttacatgtgcctctcatgtttcttattaaactttattaatcttgtttcttccactttgtcttctttctttctacttgttgatcttaacaagaagcaccaactttttttttttatgtcattacattttcttgtatatattcaaagtatcatccacaagagctgtctctgtaatattttacattgctgcctggtatgatcaatcattcttcttttttttcttttgctgcttcgtagatgagatatcgaacaaaacccataagttttctgctaatatccaattcgtgggtattgttttttgttttttccgaaagatttggattgttttcttgattacatcgatggaaatgaatatatttcggtcaaactttgttgttattcaaaaagcttaatgttttcaaagattgtgtgcatcactaagaccagaccagactcataatgtgcagtttataatctttttttttctgccttgtagaaagagagtgattgatcgtttcatcggattcttttgaaagagaggttttgtgactgtatcaaagatggaaggggaagaagacactgtggcgggttctagcataccaaagaagaaaatgatgaaacagctgacaggaaaacgcgacgacactctgcttcattcagcagtgagacacggaaacaaagacagagttgttgagattcttacgaaaaccagagagtctgagttgaatcagctgttggggaaacagaaccagtcaggcgaaaccgcactctatgttgcagcagagtatggtgatgtagagattgtcaaggagatgatcaactgctatgatcttgctctcgttgagatcaaagcaaggaacggatttgatgctttccacattgctgcaaagcaaggagatctcggtacgtgtaaaaccctttgaaaattgccactaaaaccagttgattgcgtcttaagcattagttcttttggacttttacagatgtgttgaaggttttagcagaggctcattcggagttagcgatgacggtggatctatcaaacactacggcactgcacacagcggcaacacaaggacacactgaagtggtaaactttcttttggaactgggaagcagccttgctggaattgccaagagcaatggtaagacggccctgcactctgcatcaaggaacgggcatgtcaaagtcattaaggctctcttggcatccgaacctgcgatcgcaataaggatggacaagaagggccaaacagcccttcacatggcggttaaaggaacaaatgttgaggtcgtggaggaacttatcaaagcagataggtcttctatcaatatagccgacacaaagggaaacacagcgttgcacattgcagcccgaaaaggcagatctcagattgtcaagttgctattagccaacaacatgacagacacaaaagctgttaaccgatcaggcgaaaccgcacttgacacagcagagaaaattggaaatccagaagtggctcttattttacagaaacatggtgttcccagcgccaagaccattaagccatccgggcctaaccccgctcgggaactgaaacaaaccgtaagcgatatcaagcatgaggttcacaatcagcttgagcacacacgcctgaccagaaaacgtgttcaaggaatcgccaaacagcttaacaaaatgcacactgaaggtcttaacaatgcaatcaactcgactactgttgtagctgttcttattgccacggtcgcttttgcagcaattttcactgtcccggggcagtatgtagaagacacaagtaaaattccagatgggcattccctcggggaggcgaatattgcatcgacgactccgttcataattttcttcatctttgattcgatcgcactcttcatctccttagcggtcgtggtggttcagacatcagtggtggtaatagagagcaaggccaagaaacagatgatggctgtgataaacaaactcatgtggcttgcctgtgttctcatctctgttgcctttttggctttgtcgtttgttgttgttggtgaagaagagaagtggctagccatttgggtgactgctatcggggcaactataatgattacgacgttagggacgatgtgctactggataatacagcacaagatcgaagctgccaatttaagaaacattagaagatcctccatcaacagtatatctggatcctgggggattccccagcttacggattctgatattctccagaacgagtgtaagaaaatgtatgcaatctgacttgacgatactcaatccgttttcacatttatgtacacggcaagaacttgatgtacctttttctgatacggttgattcaatgagttgatgcgggtgaagcactggtatggaggagttacctgagatgcttcgaacaggagaaatcgaataaggattagagcagaaaggaagagagtaacattaatgtaacaccgattctaaatgggggaagaaatgtgcattggtttaacctatagcatgaagaatttcagctatatatgatcaacaacaaaagttaccaggagttaaataaaccaaaaagctaaattccgagaaaaatacatgttggatactggttcctgttctatgaatttcctaaccaatggatactttggtaggaaagttacattataaatactgaagaaggcatagtttacactcaatgttgagaatcttgagaaatggatggtcttttttccagcatctcgtaatagagaacaaaattttcctgcaaagaaatgattttggggtattcttcagaggccaaatgaagaaagatacgatgagcagaatttggatgtactcaccttttgaacgatctcaaatgagtttggatcaaaacagtgatatgatcctctttcatacgcatttgttttcacgagaggttccccgattctaatgaaccacaacctgtgttctttgtggtagaaccaacccctattgtaactgcaaaacaataagagttatgcagctttatccttcagtgcattgcaatctgataccaaaccaggaaattaagacagaaacccattttcaagtcatggagaagaaagatggaatcaaaagttgatgttttgctttcatattccctttctttttcaaatgtgaagacaaattcatcttcaatctatattccaagtttaatatatgacaactgtgaacaaaaaactccgaagaagcattttcatatttacaatactagagaaacaaaaatatattatgatgaaaaggacttacagttcattagccgcatagagttgcgcctcatctttcggcatgctgcacgacaaaaattgttatggttcctttgacaagagagtgaatcaacaagtactttcaattccaaagacatatacctatagaatacgtaaaacaatgtttctaccaataattttgcaaagagcccttgctgcatccaccaaaaaaaaattaaaagttaaaaacagctaatgaaaagaaaacacaaacccagatggacaaatgaatgatggtactgatgagagactagagtaaattacatgtagaggtggagggttttttgcgtagtaacactgcggtacactgaattctggatcaactttagagggttcattggaccaaggcgagccaaaagtcttatgaagattttctgttgagttcaaatttaaccccagtgttgtcagatcaataccaagtgccaaagaagtcaagtcagggtcgctcatctttatcacactgagcaaaccgagtaagccaaaccgatcaggatttgactgtgtcgattgcattgattttaatcctacatctctgaaaggttggctagcagctgacatctgctgcaagcgatactgggctgagttctgttggtgctgatattgctggatgagctgctggtcataacccatcccagtgatagaatttgcagaattcatagatcttaatccaatacccggagctccaccagtctgaaaccaatcaaatataccttagaaagaacaagaacgttggtttcatgaaataaaaccttaaatgatctccgcctgttttaaaatattacagactacatcatacctgtgagtggtaaggcggatgcgaagatgagaagatgtcagacccatgtaaggaaacaccactactactcacagcttgagcatgttgttgctgttgttgaggacggtgtgatgtatatgctccacctaagttaaacccaccagaccttcccatctgcaaggagccgcactagaggataaggtaaatgttttgaggaaaactttcaatggaagagaattaaacccaatgacattttttgacaagctactcacagataattgttgagattgcatcattaaaactgagttctcatggagttgttctttatgatgcaaatccattggataatcagcactactacctgtataaaaccgatcaatcttgtcatgactgatgactataccttaatctaaaatctatttatacgaacaacaaataatttgaatgcagacaccatgaacgtgttggaaaatttaatagacagactctgtactagtattatgatgagatattaagagagtaatgtcacattggatcatgcagatcattagtaattcagctgggtgtgattacaaaatcactctcaaatctctcaacaccaaatattatgcgaatgtggaaggtagatggttccttttggggtatgaatgtcaaattccataatgcacacaaatatgacccaaattgagacaatttctatccagttggaccattttaaaaaagttgcagatcagaagggtgacctttgtatcctggcaatgctggaaaatcttcattttggatgctgaactcttggttttgctgaactatagggctgattccaaggccttgtttcaatcgagaccctaagaagtttcagaaaacagcggagtatagttttgcttcaaaccaataaaagaaagaagatagaattaaagggtttttcttacttacccaattgtccttgactgcccgcagagctggggcggcttgtgagctgaggaaaatcattattaatatcaaacggagaagtgtcgttggagttcatatcattcagcaaacccatagagcttagactgttcattgcttgaacatgattttgggaaagtcctccagctgaagggtaagaatttcccagcatcgaaagaacctgcggagatcctgaagagaaaggaaagaatataagagtgtaaagatatcataaacgatgtgacgaaacgagaaatttggggaaaacatgaggccatttggttactggagttcgactgattaggaaattcaaacaaaatcatgagttattcgattaatgatttctaaatactagtagaaatccggtgttgttcatttaatgataaaggatttaacatcaatactaacggaattgtaaatcaactaaaaccatacaaatgcataacctatttcaacaaagagcagaaaaggatataaatcatgaagtaccttgtggcaagaccccacccatcatgcgattttgtccaatatttccggatccgctatttactgccaaatttagccgcgaaccaagactcggaatcgacaatcctccaccagagctcaaagtcctacccattgtgcctccaccaaccatattccccatagaactcgtcattcgagaacctacatttcccaatattggagaaactcccaatcctggaacagtaaaccaattaccaatggtggtagaggtaggaagagttcaggaatggaaccaccctattagtgtaactactgaattaaggttttccaacagtatttatacctcccctattagtgagtcctgagtgtccatgggagctaccatgagacatctgcaaataagaatccaaaagaaaacttttaagcagagccaaagcaagggttcatatttgcattatttttaggataccaacacataagcataactgcacctgagagagtgcaaccggaatattgctggatgcaaatcttccattcgaaatacttccattttgttgttggacaccagcagatggaacaccatttagacttgaatttctcgatccaagacttcccgccaagttgggaacattaaagtttccatgaatattatgaaggccctgaatagatcctataaaaagaaaaaaaccaatataagttcagaagaattacgaaagaaatagcgccggagacgtctacccaccagcatgatgaaaaactggagacgctgccccagactgaccggagaaagaagaagtaaacgtcctccctgaaccgtctgacaaattcgaggtagacccgtttattgaggactgaggatatcattgaaataaccacaagtcagaacgactgataaacattatttatcctagaagctacattgacaatactgcaacacactgatataaagatatgtggaagaagtacattaagtaaacttgacatttgcagagattaatcaactccagaagcaaaagttcataagcaaaccaagcaggaacccttcagtgagctcaggaatgtgagattgcagtcgtgacctgaaaagaaggattatatggtgagacagtaaatacatggaaaggaacaaactttggattcatcacagaactataaacagtaaaacttcaacgtatctgaatcatacattacaaacaatcaaaaccctttcaacaaccgatcaagggttcaagagaaagtttaaccattgcgaaatcggaaaataaacaaaaaccctaaagcactcagatttataatcagcagtcaaacgaaattagaacctgataagaatatggacccaaaggatgaacaaagaaactcaatctcgaagctccaaggaacgaaattctcgaagatggagaagaaatcggaataaaaaaatctgatctttttgtactactgaccgtttttagtcttatgtgtttaggaccccgtcctcggaggcgaacaaattaaagggaccttttttttctctacatagtaattttatttactttcagggtttactagtaattaaccatgttattaaggtaaattatcaataattatagtgactaataaaattaggttgactatatccgaatgagatagtttcttaattgatcatcataccatatgagacaagttgcaatctggtttaaagatcttgcggggaccaaaaatacttatcaagtaaccaaaactagtaagctgtcactgcagattttgcacatatatactataagtatgtgggttatgaagacataaaggcaaacaaacaaaagaaagagatcaaaatgttgcatctgtcttattcagtatgacatcttacaagaagaaggatgatgctgtgttgttcaatataagttacatcatattcaatgatttgggaaaggtaacccaaagagtgcggttttgtcgaatgttcttcaagattccgaggatgtatatttgagaatagctgcgtcgatcctctccttgtctctagttgcaaatgattctaagagaactccgtttttgtagaagtggaagagaggaaccgcctgtaagattgtagtatatcaaactctttactacgctgttcagttaatttttgagtgttgttagtaccaaaattctaaagagggattaccttgatacggagcctttctgcgacttcagattgttcatcatattcatctaccacctgcaaatagcagcattagagctattaatggattttttctctacttctttattgtttatacatcaaagatgagagatcagaaactcacattatgcttaaggaagataacaggagcttcttggtcaccagattgcttgcacagttttgagaagccctgctctatgtatttacaactcccacatgcagtgcgataaaaatcaaccacaaccaaagaattagtttctttcgacttttcaagaacgctaagcaattcatcatctgtcttgaactcagtgacacactccacaggacatagatcatcattttcatcagataactccactaggttttcctgacttaagctttttgctatcccacgctgaagcgtacaacccatagtgatgtttatagaagactcggctcttggaaacgacaacctgactccgttgttgtgccagacccatctatggttttcaacagtgtttatgcctcccctactagtgagtcctgagtatccatgatagctacagtgagatatctgcaaattagaatcaaaaatcaaaattttgaagcagaaccaaagcaggggggtcatctttgcattgaaataatcctagaagttacataggtaatagtgatataaaggatatgtggcagtacattaagaagacttgacatttgcagatatttaaactaactccacaagcaatagctcatcagcaaaccaagcaggaacactttcagtgaactcaggggtgaaagatagcactcgtagttggttgagtggcctgaaacgaagaattcaatggtgaggcatgaaaataaccaaaacagagatatgacatgtaaagggaacaactttgaatccgagtacaacacagagttctaaacggtacaagatcaacgcatctgaagcataaatttcaagcaatgaccccaaaatctaaaccctttcggcaactagatggggattaagacaaaacatggaatgaaccttctaatgtcagcaaatcagattaaggattcaactgaaagatcaaccatccccaaatcggcaaaaaccctaaagcaatcagaattgtaatctactcacccgtcaatactatggacccaaaggatcgaactttcgaaataaaagttgcgttcttttgaaagtacaaaccgtttttctgtagatgcgcttgaaccgtcctacttgggacggaaatcggaacccagacgaacttggtatcgactttgtcagccatgacattgaaagaacctgttgacctattttcaaccacaaatcaaaatttcgtatcttagttagattagatgggcccatgcaacaaatggcgctactacgacccttattattttgaataattacatttatgtagaggcagtaaataatttgtggagaatatatatatttagattttatttgataatgaatctaataagacttctattttcagaaaataaatattgagtttggatataaagataactaaatcttatctcctcaattaaatttaagataaatctaaataatatttcagagattaatgtaaatattttaaaattaagatattttacatccttctcactttctcagtattcatgtttcataattttgatctcatcaaaagataaaaattataaaaagtcagtttcactgtaattaaactcatcatcaaaccaagtttgttttaaccaatttcattattgagtttgatactgtccttacaatcaagatccgtaagagaaataatcaatatgtacacatcgcaaattcaaaagacataacacagaatcaagtgatcattaactaataaaaaatcacacagagaaaaaataaaataaatctttgagctcccaacgaggtggtgatatatagcggtgatgttgtttagacatgatcatctgctttagcagtctgatttcccgatgtcccattaggtttttcagcagtagtacctttagacaacaaccaaaaaatgtgttagcaatttattaataactttactaatctattgagaatgtataataagttacgttgttcagtacttttagccttttttgctttgtgcctgagacagcaaactaataaaaggcatataacaacgacgatcacaatgaaacccacaactgctgcgatgatgatcccgatcaaggctccaagtccaacagtcaatgctcctattttaaagctcttaagtttctttttcgcacctgcaattttgtccaagtttgtttattatatcaaaattaatgtacctacaagagtacatggtccaaacataataacatgaataagctcaccagccagtgatcctattttcttatctttttctttcttcttcgaatctgcaatttaagtttgtatactgtatcaaaactaatgtactgaaaaggcttaataataactggtcgtaacataataaattaagcgatctttctttatagtttaggaaacctttttttttacttttgcttggagagctctttgaacttgatttattcacaacagctcccgagcgaacgactctggttagaagacgacgaccttttactacatcttcaagaacgaccattgaagaatcttgatcactcgtagtcataatataggattcatcgtcttgtctaaaacagagagaaagcagaacaatatgtttatagttagttgcagctttaagaacgtaacacaagtgaaaaagtagggttttgaggtgttcttactttgagacagcatctctcgtggaaaaagaatatccagaagctaaagagagggacacgagtacgaggaggacgatgaggagaagattagaagccattgaagtcgtcttcttgtgttttgtcaatgtaggaaatgtacgtataaacatgagaaaagactttgctatatataggaatttctctatttgcatatctctctaaatgctcacctttttttattaccaactgataattgtataactcagatagttgttggatgtgctttatggaccgattggtaggctgtctttttttttttttctgattatatcgtttgactagaaaaactcctctaattttaaaaatgtaatggaaatattttattttttaatatatcaagtagctagtaacagatttccaggaaaaaaggcaggaagtttcaattttctacaacaataattcaaaaaaaaatcttataatttacacaaactatttttttagagtttgacaataccaatacgtttggggcattaagatcctatatctatatctatctatctatatatatatatatatatatatatgtatatccaattcctgattaaattgattgctgcatttaagggtattggattaagatttttgaagagtttgatcttttaaaaaaaacttttgttattcaattgatgattcatagttatcttctcttttttttttttttttacatcatagttatcttctcaaatctgatgttattgaataaatcaacttcaattttagtaaatatgtttataaaagtttttgaaatgtgaaactttatgtacatctttagttaacaaaaactgacacctatcaatcttctttctaaaatccacccttcttggatatagaattcttaaaaacaaatatcaaaatcttgttttactggatatataattatttctaaccaacacgtaataatttaaaatcccccattatttcaattgttgaataagttctatcttttttaaaatgtaaaattttaaagatatcaaagtatttagttacaagcttttgaaattgtgtgtaatgtaacgacgacaacaacagagattaaagatcatcatatcacttatagcaaaaacaaaatcttgacaaggaaaaaaaaaatcaagagaatttaattattgtttcaaacatttttgtttgatcaattattgtttcaaacattggtgtcaccatttgaaagctttcctgctggagcactcatggtcatggcaactgttttcgtcttcccgtccattccatagcccatctctttagctcccaattgtcctattaaattacatacactcttcatatattaataagattctttagttatcctaattaatctcgataatcactacgatatttaattatttacatacgtccgttgcatgttctaactggggttagtgtttaaatttcctggacagatcctacctataattaggcccaattatatataattcggcccaactatatggttcgattaaaccaggaaaaacaaatcttaacgaaatcaatgttccgacaaaactctgcaattaatccagctggtttgcgagtgaaatggtgattgaatttatttgtttggtttggttggaattataatgttgcatcatattacctggataggattggacaatagctgcgttcataaccttttgtcttctgacgcagcaaaaccagattccaatggcgacaagaataagaaagaagagaccaacggctaagtctataatcgtcacgaaaccgttgtttccaccgttgcctccaccaacagtagtttcacaattaagagtgatcctaccaaacttatctgcattgtctagactttgtcgtgcttgttcgtcgtgcaagtcttcccaggtgggagatgatgatgaatcacaccccggttctcctaattcgtgaacgtaggttaatttataatcaaatgaattcatttcagtaatatacacggatataccacatataataaggtacaagtgcatatatttttgttgtagatgtatatctaagtgtgataagaataataccattgatggatccaacaatagctatcaaagtgaagagaagtagaacaacaagggtacggagcgagaacattgttgggtctagaaaagatgattgatcagtctttttacgttaaccggagtgtgtgtccatatgtatacagtatatatatatataaaaagtttaaagtaatgtgtgctataatgggctgcaagtcatcaacttaccctattttatccattttaaagtttgatccaactatgattttatacatatttaaacttttgtgttataaataacgctctgtagaactagtccaatatacagtactcttttcggttagaagttttgaaaaggcaagatgagattttgatttatgaagtagtccaatatatatgcacctactttgtgaagttttcatgtttagtctttaggttgcatgtaaatatgtattgtttgttgagtgcctaataaatgatatatactcattgaacaagttgtagaagctcacgactgcgaaattacaatttatacctgaacaacactatagatggagaagttgtgtgttgttctttaacaaatgcatatatatggtggtgtgtagaataatgggatgcaagttatcaaccttgcctattttatttctaactacacaattagaattttttatgataatcttatagctttcattactgactccgtccaaaactaatattttttattactatggttcattttatttttgaaaaaaaactagtgaatgaatgaattaaatgtaagtgaaagagataaaaaaacaaatgagtgaaatataagtgaaagagatataaaaaaatataagaataattttgtattgctcattcttcagcataaaaagagagagatatttttctttaaaatttgcctatttttagtagtatattaaacataaatagatattagcaaaatatagataattgctttattttacatcttatctttctaaatgggcaactatatacttttcatatatatatttttaaaaatcaacataaattttttatttttcactagtattatatttgtcgatcaacttgggaaatgaggaagataatactttttgcaaacaagttttctgactttccatttaaaggtcagattcaatgtgaaaagcaactagctataataccatttaaccaatgatgtgtcaccacgtgtcaatattggcgtggcatagccagtcccatgtgccacgtcacgtggcagatcccatcgacgttggaatctattttgcttctccgaaagcaaatattcgcacatttaatgtacatctacacttaataaaagcttatttaaattaaaaatcaccccaaaaatttaatatatttacagtttcagtcccttaagtaatagacatcaaaacgtgcgattttacaaaacggaaaaatgataaggacttactttagagaaagagagacagataaggacttaaatgcaatatcttatcagatcgtgttgccgtcactttcctggaaagatacaagccattatactctaaaagaatataaacaaaaacaaatatattattcaacattggaatatatatactgtatgtaaaggcttccttagagaagtagaagaagagaagtatctggagagagagaggcgtgcgatttccgcatcgaagaaacagtacggagttttatccgctccgattctggtgagtttttttttttgccgatctcgttgtccgtgttcttcgctttctcggaatttgagtgtttttggattcttcgtatattatatgttgctttgacactgatctctgatttgatttatgcggctactcgatttttgaaatttgatcgttgttttattcgaagattcgtcgtttgttttcaatctctgttttctcatagtgtaacttgaagctgacaattagatttgaatgattttgatctctttgacagtggaagataatggggaaaggaggtgaagattgcgggaataagcaaactaatagttctgaattggtcaagtctgatacttttcctgcttggggtaaagatgtgtcggaatgcgaagagaagtttggtgttagtcgtgagaaaggtttgagcactgatgaggtgttgaaacggcatcagatctatggtttgaatgaattagagaagcctgagggtacttctatttttaagctgattttggaacagtttaatgatacattggttcgtattcttttggcggctgctgttatttcctttgtcttagccttctttgatggcgacgaaggtggtgagatgggtatcaccgcatttgttgagccgcttgttatttttctcatcttgattgttaatgccattgttggcatctggcaagaaactaatgctgagaaggcgttggaagctttgaaagagattcagtctcagcaagctaccgtcatgcgtgatgggactaaggtttccagtttgcctgcaaaggagcttgttcctggtgatattgtggaactgagggttggtgataaggtgcctgctgatatgcgtgtggttgctttgatcagttcaactttgagagtcgagcaggggtccttaacaggagagagtgaggcagtgagcaaaaccaccaagcacgtggatgagaatgctgatattcaaggaaagaaatgcatggtgtttgcaggaaccactgtcgtgaatgggaactgcatatgtttagttacagatactgggatgaatactgagattggaagggttcactcacagatccaggaagctgcacaacacgaggaagatacccctctgaagaaaaaacttaacgagtttggggaagttctgactatgatcattgggttaatttgtgcgttagtgtggctcatcaatgtcaaatactttctgtcatgggagtatgttgatggctggcccagaaactttaagttctccttcgagaagtgcacatattactttgagattgctgttgcactggcggttgctgcaattccagaaggtctgccagcagttattaccacatgtttggctcttggcactaggaagatggctcagaagaatgctctggttaggaagctacccagtgtggagactcttggatgcaccaccgtgatatgctctgacaaaactggaactcttacaaccaatcagatggctgtttcaaagctcgttgctatgggttcgaggatcggaactcttcgatctttcaatgttgaggggacctcgtttgatcctcgagatggaaagattgaagattggccaacgggtcggatggatgcaaatcttcagatgattgcaaaaattgctgccatttgcaacgatgctaatgttgagaaatctgatcagcaatttgtgtctaggggcatgcctactgaggcagctttgaaggtaaagcggtctactacactagcttgcacatttcttttcttaactaaattgacttagaaaactctgttcgttgtccttgattgatttctttttctattggtgtgtgtgtttatttgaacaggttttggttgagaaaatgggatttcccgaaggattgaatgaagcttcatccgatggcaatgtcttacgttcgtattctacactatatctgttacttatgtttatacagttttacagatgctaacctcctgcccttttccttttttaacattattgaaggttgttgtcggctatggagtgaactagaacaacggattgccacccttgagtttgaccgtgaccggaaatcaatgggagttatggtggattccagctcaggaaagaaactgctactggtcaaggtctgtttttttttatcgttgatcatatgctgcctcctgaggtcgaacctgggaaatcaagtgacttctgctttggttcttgcatgttattagtcgagaaaaccactgtcccctctttttcagcacctaagagaccaattttgaaattatgcagggtgccgtagaaaatgtattggaaaggagtacccatattcagctacttgatggttccactcgagagcttgaccaatactcaagggatcttattttacaaagcctacatgatatgtccttgagtgcattaagatgtctcggatttgcatactcagatgttccatcagattttgccacttatgatggcagtgaagaccatcctgctcatcagcaacttctcaacccatccaattattcatcaattgagtccaatctagtatttgttggatttgttggtttaagggtgagtcacggtcaccgtgatatttttttcgttctttctggttcctcattaataattattcatgctctaccttttcaatgattgaaggatcctccaaggaaagaggtgcgtcaagccattgcagactgcagaacagcaggtattcgggtcatggttatcaccggagacaacaagagcacagcggaagcaatctgccgtgaaattggcgtatttgaagcagatgaagatatctcctcgagaagcttgacaggaaaagaatttatggatgttaaagatcagaagaatcatctaagacagacaggagggctcctgttctcaagggctgaaccaaaacacaaacaagagattgtcaggttactgaaagaagatggagaagtggttgccatgactggagatggagtcaatgatgctcctgccctgaagttggctgatattggtgtggctatgggcatttccgggacagaggtagttgtttctcttctcccttctgaaaggacgggatgattatagctctatcagctttctaaagctcttggaatttttcaggtagcaaaggaggcatctgacttggtgttggcagatgataatttcagcaccattgttgcagctgttggtgaaggcaggtccatctataacaacatgaaggccttcatcaggtgagtcttcttatgttacatatgtatgcctcttcctatgggtggcttgagttatacatacaaaccttatatatctgactatgatgaataaaaggtacatgatctcttccaacatcggtgaggttgcatcgatattcttgacagctgctcttggaatcccagaaggcatgatacccgttcaacttctgtgggtgaatctcgtaacagatggtcctccagctactgctttgggattcaacccccctgacaaggatattatgaaaaagcctcctcgtaggagcgatgactctcttatcactgcgtggatcctcttccgctatatggtgtgcaaaaatcattttgtttctcctttttatcctttggggcttttctaactgactattatgggtacctacctacaggtgattggtttgtatgtgggagtagcaacggtgggagtattcatcatatggtacacacacaacagctttatgggcatagacctgagccaagacggtcacagccttgtgagctattcacagctcgcacattggggccaatgctcttcatgggaaggcttcaaagtgtctcctttcacagcaggctctcagactttctcgttcgactcaaacccttgcgactattttcagcagggtaaaatcaaggcatccacactctccctctcggtgttggtggccattgaaatgttcaactctctgaatgcactctcagaagatggcagcctggtgacgatgccaccctgggttaacccgtggctgctcctggcaatggctgtctcatttggactccactttgtgatattgtacgtcccattcttggctcaggtgtttggtattgtgccactgagcttgaacgagtggctgctagtgctggctgtgtcgctgccggtaattttgatagacgaagtgctcaagtttgtaggaaggtgcacgagtggctaccgctactcacctcgcactccctcagctaagcaaaaggaggagtaagaaaataattcaaaaggcattattattagactcttagttttagctgaaattaactttgttgctttactcatccttgctatatttaattctccaaacgataatttttggtttgaaaaagaaaagtttctaactttggttcatggacacagcccgtgatagaaagatgaatgtttcaaccaaaccttgattctttatgtaaacttttatggtcgaccaaattggtttttaagactgatggtaatttattttgggcacaaccttaagagatcagagattcaatctctttatcctgtgagagaaatacgtattctctgcttgcactcctggacacatttctgcaatattaatgactgctaagtctataccttaaaaacacctctcaaaatgaacccatatcaaatttgactgtagtttagcaatgctagcgtcgttgctaaaagcctaatcaaagcttgagagaaattaccgctgcctcatatgaatgatctcataagatggtgaactagatttgattgctttcaacaaccatttgtttagtgtctatcctaagagatgaggagacaaagaaatcaagcaaatggataattctcattagattttcttagcacaaagcttgcaaaagataattaactactacatcacattggctaataacaacgaaaaacgagaaacaaaaactaactcctgaatttacttttgactaattcaaaccatttaacacggatctcagaaacaagaagaaatccccaaacttgcataaaccctaatcccccaaatcggattaacctccgaaaccgtagagagtacgaccttgcctcttcaaagcgtagacaacatccatggcggtcaccgtcttcctcctggcgtgctcagtgtaggtaacggcgtcacggataacattctcgaggaagatcttgaggacacctctggtctcttcgtagatgagaccactgatacgcttgacaccacctctacgagcaagacgacgaatagcaggcttggtgattccttgaatgttatccctcagaaccttcctgtgcctcttcgctcctccctttcccaatccttttcctccctttcctcttcctgacatctctttacttgatacacaaagatctgtgaaaaataacagaaggaaactattcagaaaccctagatttccagatcaatcaattgaattgagaatcgaaacatttaaactcttcgaaaatgtgacaaatcgagaaaaactttgaagaaattaagctaacattaaattgaaatctacgcctaagcaaggcagaaatatatgaattacctgtagatttatggaatgaaagttcttcaaaaatgtgattgtaaaaagtatgttacttcgagtacaaagtggtgggattaacttgtatctttctttctgttgtattatcgtagcttgtatcaactttcctctcttgaggctttgaggccttaatgaatgaaagttgtgttttgacaaaaaaaaaaaaaaaaaaaaaaaaagtggtgggattaacattttataaaggaagtgactacccaggacatatattttcggccgtaacgattcatcttctttcaacggtccaagattgcgatccgcgtgaaatctgtaagaagaatatggatcgttggttcttaaagatcaacggtagtagatggctttcgacttttcgtcattctctgtgtaaactccattaaacaactaaaaaaagcctccaacataacagataacccaagacttttttctaatctaaaggcccatatgtgagtagtaggcccaaattgacccaaaaaagggagcaaaaagctcacgtggcagcaagtaccctacacacgaaggtgcatgttgtcgaccacgtgttgagctcaccgtaaagagagatcctatgtgaggtttgatgatgagcatttccaaggatttcatcggatcgaaatcagaatcataagactgggaaaaaatggcagctaatatgatgagaccggcgtttgcttacactgttgtgtacgtgaaggacgtagctaaatctgtagaattctactctagagcttttggtcacaacgtccgtcgtcttgacgaatcccacaggtttgtattatgaattgttactattctctacgttggattgtcttaggtgttgttggatacgatcataggaatgtaaacgacagaatcgtattaggtcatgaaacaaaactctcgggtttgagattctattggtgcgatgtcctataatcaggtccgatccgctggctaacatgctaagcaaacacaccaaatatatatgtttgatgaatgaaagaaactgatacatacaggtggggggagctagagagcgggcaaaccacgatagcgttcacaccgcttcaccagcatgagaccgacgacctaaccgggaaggttcaggctacgcagtcagcacgtgaaagagcacccatcgaagtctgcttctgttaccctgatgttgatgccgctttcaaggtagaaatcaattattatatacttatgtctatatttgcctgttactcttcaattcgtacgtgttgataaaccagtgagatgctgcgttgtgcagagagcggtggagaacggtgcggaggcagtgagcaagccggaagataaagaatgggggcagaaggttggatacgtgcgagacattgacggcattgttgtacgcatcggaagccacgttaagtgaattcaaaataaagactcgtaaaatatgatcattaactagtctatatacatatgaataaatattacaagatactttggtacctttgttaattatggttgatgtcttgatgaatatatttacttaaagcaacatgtaaagtaaaaagatatacaaagtgtccagcctagtccccacactcccctctctcaattcgttttttctttgttagtatcgttacacaaagtaggaaacgatgttatgatcaaaatcataatagttggatttttctcctatcctagttatcttaaacatttatcaaatgattccgcgacccaacaaaataacaaacgaaagagagtgtaaagttccttttaccttttttctttttatcttttgtcgtagtcgtagtttcgtatgtttgtgagtactttggctttccaaattaatacgactggctgtctatcaaagtagctaaaccaataatgtaaagatctgtcgtatgtggtctttgaaacccaaatcaattgtttgttttataacaataattgattcttgatttttgtcaaatagaacttatcaacaataattgatgagactcgattatccgctgaaaatatttttataattattttaggaggaaggtatcatatatatactacttttcattgtttgccggctaaataattttaggaattgctgacacttagtataaaacattgaacataagataagaaacttgtttaatatttaaaattctttacttcctatttcttaatataatacagaaatatttgtatctttttaacaaccaaataaatctttaaccaaaacatagactagtactcttaaagcaaaacatagactaatctcatacaaggactaatcccaaaatcgcttggggatataatttctgaagggtctctgtcaaaccttaagaaaagatatttaaaagtagcactgggtcctgatataatatacataatgtttacattacagtattacacacacacatattagaatgggctgaagaccaaaatagttaagagaacatgacaaagtacagcaaaccttattaaatcctgacgactaaagtggtcaataagctctagcttctcatccatcaccacttcctaaatgtttctctctctatatctcttgcaagctttctcgcagaagtgataccatattttattattttgtatagaaaaaatgatatatttacatcgcatatatttcatcatcgtcctcttcacactaattttccatgggcgtcttggtttttccgacaacaataaacttcacgaggccgaaggtactactataaagattcttcctctagtcctgtctctcgtctgtatatgtgtgtgcatctctatgatttgcaaatcaaagcactttttttatctttgatgatgatggttgtttggtatggtttgaaattgggaagtgagggcattaaaggagatagggaagaagctagggaagaaagattgggacttcaacaaagatccatgtagtggtgaaggcacttggattgtaacaacttacacaaccaaagggtttgagagtaatatcacttgtgattgctcctttcttcctcaaaactcttcttgccacgtcattagaatgtaagtttcttcttcttcatcctccttccctttcttatcttcctctttaattttacccatttatggaaattacaaatatctttagcgtgtcggtgccaagtcacgaatattggatttcacagtctgtaaaacaagtgtacgtaatacaagtatggagaatttcacagtttttatttttcggtttgtttgtgctaaaaataatttcacaggttagaattcctttttattttcatggaatatgtttagcattaattagtttaagctaaaagaggggaattttagggtaacagagtagtggctagtttaatgatggtgacaatgaaggggaaaaccactaaattccttggtgaaggttggttgcaatattgactgcacaactcacactttaatgacaaccactaactatatgcctacaacgtcacgttctcttttatatagtactaaaacttattctactgtacttatataatcccttgttgatagttttactatcttactatttcttttttatgacagcaccatcttactaattaacgttttgtattaaaggtaaatagtaaacgataatttgaagcatcggttttaagataactaataaagtaatgagtgtaactaagagttaggtggatgtaaattcacatgtgaagtaagattaaaaagctttaagtttgatttgtctctttgtgacgacaagtttatacttgccaggctggtcgttgacccgttgaccaaagtaaacgattcaatagataatagcgcgtttactttcgctctattccataactagactttatataaatcgccagataaaaaactatgatttacataattcaaaaaacatttagtgttagtaaaaattagttatatatttgtgtctctttagactgtttgatcattttttaaaatcataattctttttaaaaaattgtcatcaaaatcgtaacaagtttatgatccaaaataatataagaacaaccatgatctgtaattctgtattatcaaacagtaacactactgtaaatttgtttcattttgagatgatgaaaaatcagaaattatttttctagtacaaatttcagttttaagaagaataaaacaaatttcataccgatgcgacaattactttaccagtccattaaatattgttttaatttgtttccctagcttatgcttaagtatattacaatatttgtccccgttgttcttgagaagtttatcttccaccccaaaacttctagttctgtaaaagaagacctaatcagaatcaaactgtcaaaaagtaacaattttaatagtggcaatttggttggcagagctctgaagtcgcagaacttaacaggcattgtccctccagaattctctaagcttcgtcaccttaaagttttgtaagtgatcaatcagaaagacttgagctttttcattctttctcaaagttttaactttagaaattggttctcaacgcatacaacaattttggtgcagagacctaagccgtaactctctgactggttccattccaaaggaatgggcttctatgcgcttggaagatttgtaagtatctcttctactttgcttctctaatgaaatcaaatccaatcaaaatcttatctttgttggttttgatgtacattacacagatctttcatggggaaccgattgtctggtccgtttccgaaagtcctgacccgccttacaatgctcagaaacttgtatgttgttgttaactcctttactcttgttttggttcatgaattctattagagccttatgtttggattataactgtagagtttcctagtagatttatgtatatgtgtgttgatcatctgaaattatgcaggagcctagaaggaaatcagttttcaggaccaatccctcctgatattggacagttggttcatttggagaaactgtaactttcttttatctatctcttttgtggctatctattgtatctatagacattgaacaatctggtgatggtctagtcactaacaaactagcatcactagaaatctcaagtcttttggtttcttagttaatatcttatatcctcttctctgtttttgcttcagtcatctcccttcaaatgctttcactggtccattgactgaaaaacttggattgctcaagaacctgactgatatgtaagagaatttagtctgacatgttttgatatgacaaacataaaatttagtctttgttggagaattctttaattattgtatttgtggggtgtcaggaggataagtgataataatttcactggaccaataccagatttcatcagcaattggacaagaatactgaaactgtacgatctattctttctccataagagtactcgcatgttcccaagaaaagacatatgaaccaaaaaaatgttttgcaggcagatgcatggttgcggtttggatggtccgataccttccagtatttctagcttaacaagcttgaccgacctgtaagcctttaaaaaacttcttttcaaatcatctccttgtcaaacaatgacacacgagacattatcatataatttttttttctttggtgggttgtgattgataggagaattagcgacttaggaggcaaaccgtcttccttccccccactgaagaatttggaatctatcaagacgctgtgagttaatatacaatatgtatgttgtgtttgcgatacaggcttgctagaaaacgtttttaaccaatctcaaatgcaggatactgagaaaatgcaaaataattggcccaattccaaaatatattggggacttgaagaagctcaaaacactgtaagtcatgtatatacattgagcaaagaagagctttaaaaatgctttatatttccatgagatgaactctgtatggtatttatgtttactgtgtactgtgtagtgacctcagttttaatctcctaagtggtgagattccttcatcgtttgaaaatatgaagaaagccgatttcatgtaagtatgtatggtatttagttatatttttcccaatcgtgaaagtttttctgagtcttttctatcagttatttgacaggaaacaaattgacaggaggggttccaaactactttgtcgaaagaaataaaaatgtgtacgaatacatgcctctgttaacttttaaacgtaccaactttaatagatttaataaactgtatttgtttttcttgatgtgcagagatgtttcttttaataacttcaccgatgaaagttcaattcctagccatgactgtaaccgagttacttcgtaagtttattcattgtactcttatatttcagaacactatgttcataccctggctgaaacaacaattttgtgcttctattttctagaaatttggtggaaagcttcgccttggggaacaaatcgtaagaaaccagctctctgtacaaaaacgactcatcatagaaaactgatttatgctcatgacttcgtagtggtcttttaaatcttgtcctttcagttatgattagtgaactgaaccgaaaacggtctgtattttccctctgtctttgatgttacagacacaagggttcaacctgttttcttcaacgcatgccttgtgttcatcctaagagatatcgtaagcaacaataaagcttgtcttgttttcatcatattctagtactagctattaaaacttaaataaatgtgaagcaaatccttgttcttgattaaaaaattgaaaccttcttgtagatttatataaattgtacataaattgcggaggaggtgaagtaaaagtggataaagaaataacatatcaggctgatgacgaacccaaaggtgcttctatgtacgtccttggcgctaacaagcgctgggcgttgagcagcaccgggaacttcatggacaatgatgacgatgctgatgagtatactgtgcagaacacatccaggttatcagttaatgcttcctctcccagctttggactttataggacagctcgagtctctcctttatcgttgacttactacggaatctgtcttggaaatgggaactacactgtgaatctccactttgctgagatcatctttaccgatgacaatacattatacagtctcggcaaacgtttgtttgatatttatgttcaggtacgtctatgcagtcaatattcttttacttactctgtagaaaaatataaatcagaacataatatattcttgcatgtttatctgctcacaggatcagttggtgattaaaaactttaacattcaagaagctgctcgaggatcaggtaagccaatcattaaatcgtttctggtaaatgtaacggaccatactctgaagattggtttgcgatgggctggcaaagggacaacaggcattccgattagaggggtatatggtcctatgatttcagctatatctgtggaacccagtaagtttttgtttttactcaaaagtgtttgctcttttatataaatcatttgtaacctctttgtcagattgatgaccgtattttcttgtggcagatttcaaacctccggtatattatgacacaaaggatatcatactaaaagtgggggtacctgtcgctgcagcaacacttcttttgtttatcatagtgggtgtattctggaaaaaaaggcgtgacaaaaatgatattgacaaaggtataaggtttagttttcttatgatgttgtaatgtttttgaatcttatgtaacttcttatgtattctggtgcctaaatgtcaaattttttatgaatgaacagagctaaggggtctagatcttcaaactggaacttttactctacggcagataaaagcagccactgataatttcgatgtaacaagaaagattggtgaaggtggatttggctctgtttacaaggtaattcacttgaattctgcgacattgttagctctatacgaaattgtttacagaagatgtgtacacattttggaagaatattgagaaagtggtccttctcttggtgcagggtgaattatctgaggggaaattaattgcagttaaacaactgtctgcaaaatcgaggcagggaaatcgcgagtttgtaaatgagataggaatgatctcagctcttcaacatccgaatcttgtgaagctatatggatgttgtgttgaaggaaaccaattgatattggtgtatgagtacttggagaacaactgtctatctcgagcgttatttggtatgttgtttctctcgaatttgcatctgcggaattatccggtggaattactgctcagaatctttgtgtgggtgatcttcttttgtaggaaaggatgagagttctagactgaaactagactggtcaacaaggaagaagatttttttggggatagccaagggactgacatttctccatgaagaatctaggataaagattgtacacagagatataaaggcaagcaatgtgttactcgataaggatctcaacgctaaaatttctgactttggtttggcaaagctgaatgatgatggaaacacacacatcagcactcgtattgcaggaactatgtaaggctctttctctttttactcataagctcaagaagagaattcttaagaatacaataacagaagtttgatgttttcatttgcattgcagaggttatatggctcctgaatatgcaatgcgtggttacttgactgaaaaagcggatgtttatagcttcggcgtcgttgcactcgaaatcgttagtggaaagagtaacacaaactttaggccaaccgaggactttgtttaccttcttgattgggtaaacaatctcataccattcatccaattaataagtgtgattgagttatataataaactaaagtatcaaacttattgcgtcaaatacatgtaggcttacgttttgcaagagagaggaagcttactagagctggttgatccaacgttagcctcagattactcagaagaggaagccatgttgatgctgaacgtggcattgatgtgcactaacgcatcaccgactctaaggcctacaatgtcgcaggtggtgagtctcatagaggggaagacagcgatgcaagagttgctgtcggatccgagcttctcaacggttaacccgaagcttaaagccttgaggaaccatttttggcaaaacgagctgagcagatcgcttagcttctccacaagcgggcctcgtactgcctctgctaactcactcgttgatgcagaggagaaaaccggacttttggattaagttcttaaaattccaaatttttagtgaaattcgcgagagtaatgaagttttcaccaatgaaaagagtttgcttttaagtgtatatatagttggaagttctttagctcaaaatagtgttatatgaactaaagtgatctcaaaatcagacgaaagactaatatatatatataaaggcggtagtgtttgccgcagccgctgccgctgccgcaaccgccagcggtaatgaaacgaacaagctcaaatataaaaaagattcagacaaaaataatgcttggcactatctctgttcctcatttttgtgttcgctacttgcttctctttatctgcagatcaaaccttgtttaaacgtgagctaaatcagataaaataacttgaatatagcatagatctctctagacataattatgtgtcaatatactaaggacatttcgaaggacacaatcaaaccaactttgataaaaagtttgagtcgcacaaatgcaacaaaagatatatatgtcccttgattaacatcgaagggaaaagaagtaaaccaaaatgaaattagaccctatgattccagttatttcttgacaaggattagataccaatcactatgtttttggaactctagctaaagctctagttcaattattccaactggaatatgtaatgtttctgttcacgtgtgaagtatttgtgagtgtgtgtgtaatttacattttacagggacaaagattaagaagtaagcttttgcacagaagatatataaaaaaggcttaataggggaaaagctggaggggaggggagggggggacggtgccattaattgacaaggaatcagattcccacaccactaatgttctttacttttctttcctgtccttatcatttcttccacgttttttctctattgtatactatactattaccaattattaattgatgaatatgaatattattatcattttgtagctacaaccctagaaaaggggtcatttgtgatcgaagaaaaaagagagtcattcttgggtactaatatatatgatgagaaccttttgtatagaaaaatatgtgaagactgaagagagttttttttttttttttgtatgtttaacgaaaagagaagaatcttttctataaattatgaagtagttaataatcagaatattggcgtgagcggcatacgtgatttacaattgtgtagcatcaatatcaaaaaggctctacaaaagttatggatcgttcaataaccctctcgttattatatgttagttatacgttacctttttttggataaaatctaatttatgatacctgcaacagcaagtcagtagtatatatatacatattacttcaagaaattttctggaactgaatttggaaccagagagttacatctatatccggatttaaagaaaaaaacaccatgcggaaattcaattatagaatcgacaataatatcaaaatttttagtcttgcgtatgtatttgcgatcctttgcaaggctaatcatgccactttctaaatgttgttttaattcatattttcagttaattttgatcaaggtatacgttaaacatttatggtaaaaaaaaaagtattgaaccaacaaatatttcttgaaacaacactatttagttttatacgacgtacaattagcatattattgtgactgcgaattcatcaagtgtgtacatgatgatatcagcagtatgatatcacacatctaatacacaatttccaaggaaaagtcggaaatatctcaaatgaacatttatccaatctaaagggccaaaggagaagaagaacgataagagtgtacatgatggttttggtatatgaaaaggtagtcgtgatgggttcatgcatgaacgtccttttttttttgtttattgagaaatctagtttttttagattattcgcggtggagagttttgccccactcgaagcagtgtgttataataatgtagcaagtaggctatctttggcggtccctttctgaaaaagaggtttagcaatttataaacgaaacgagtgatcaatgaagagataagagagaaaagaaacattaaagtagagaaaatgtagagacaaactgcaaaatggagagctcttttaacaagtagtacgttttgttacacaatgttttggaccaataaataaaagttgtaatcggaaacgagcgactcttttgtttcttctctctttaaaaaccaaaattcattatttactaaaggtctagaagaattaagaccggtgatgttggattttcttcgtttccataaaataaaaatattaggaaaaatcgttagataaattataaatgttcatccattcgtctaatatgaatagttgtaatttttttaataaatttgtgcattcctaatattaactacacattcatgatttcttatgtaaacacacgttaaacacacctccacacacctctcttaaggtgaagcgaatatccttaattggttcaaacttcaaaggtagaatagaattaccaaacttttttttttaagttatagaaactactatctatgatgacatgctgttaaatctgacactgatgctactgaatgcagaaaagagagagattaatttacaccattgcataatagacaagatcccaccaaaagtgtaatagagaatgatgatgatgtgctttatatatggcatatggggcttgccatctgaattatattataaagaataaatatgataagaaattatttctttttataagcttaatttgctccaataataacacatccatcttttctattagacactaattcgttttttttttacagaaatgtatctagagagaggcacgtacgtgagagaaagaggaagagagggatataagttgagtgtttggtggtggtgagcttccataaggaataaacggcagtttgggcttaagatttcagagatgatttagattttgtgattaaagatttctgaatttcaatgaaaattatgacagtggttaattaacgtttagaatgttaaatttactttagattttgagattagtttatatgatttagattaaaaaaacaaaagtcgatgatgaaaatgtgaaaacaacaatgttattataggatgaacacgtaaattttctaaaaattttaaaagttctgattttttttttcttaacttataaaacattgtaaaatattgttctatttttttgtttggtcaaggaaaatattaatggagagataatgttatattactgaaatcatatttatgttgcaaaaaaatatattatgtttcttcacctatatcttatggagagataattttatatgttagatagttttttcttacaacttcggtataatttcatagtacttttcttcgtctatatatatacaattagtccatagacgcataggagaggaaccttataggcgaagaaacgtccccacacaaaccctaaaaatgggaatcgcaaataaaaaataaaccgtaaatgaagtatagacgcgtatacacatgaagagatggtatagaattattatatagcaagcataaaaagaaccgaaattccttttcttttttctcgttaaagaagcatttatttccctttaatttgtctttgttctccatctctcttctcactttcctttttgattttgtgctctcttcgcgtttctctttggtcgtcttgcttcctctctttcgttttgcctttctttttttttgattcccccaccaagtttttttgctggagttctttccattaaagatccatcaaactttattaaagaaggaagaagaaagagataaaaaaaaagggtagaaggaacaatggctttcccatctaattggtcacaggttcacttctttgatcttccattactaaatgttctctcctctttctctctttttgtaatttctctcttaaattcttcattgatgttttgattcgttttagtaataattttgattcatttccaaaagatattcctattcccatcttcttttctaatccgctttctttaatattccaacatctatatatatggtatttcttcctttataaatacgtattgataatttgttacactagttgtgaattgagtttcttggttctttcattaattttgatttggttttgtagcctacgaattcgaatcatcagcatcatcttcaacaccagcttaacgaaaatggaagtataataagtggccacggactagtactctctcaccaacttccacctctccaagcaaaccctaaccctaaccaccaccatgtcgctacctctgctggtcttccgtcaaggatgggtggatcgatggcggagagagcaaggcaggccaacattcctccactagcgggacccctaaagtgtcctcgatgcgactccagcaacactaagttctgttactacaacaactataacctcactcagcctcgtcacttctgcaaaggttgccgtcgctactggacacaagggggcgccctgagaaacgtccctgtaggtggaggctgccggaggaataacaagaagggcaaaaatggaaatttaaaatcttcttcttcttcgtccaaacagtcttcctcggtcaacgctcaaagtcctagctcaggacagctaaggacaaatcatcagttccctttttcaccaactctttacaatctcactcaactcggaggtattggtttgaacttagccgctactaatggcaacaaccaagctcaccagatcggttccagtttgatgatgagcgatctagggtttctccatggacgaaatacttcaactccgatgacgggaaacattcatgaaaacaacaacaataataacaatgaaaacaacctaatggcatccgttggatctttgagcccctttgctctcttcgatccaacgacggggctatacgctttccagaacgacggtaatatcgggaacaacgttgggatatctggttcttctacttccatggttgattctagggtttatcagacgcctccggtgaagatggaagaacaacctaatttggctaacttgtctagaccggtctccggtttgacgtctcctgggaatcaaacaaatcagtacttttggcctggttcggatttctcgggtccttctaatgatctcttgtgagatttttgtgtgttttgtcggatcattaacgtatgttacgacttacgacgtggagattgattaaaaggactaccaacggtcaggattaactgcatgcatagtctgtgctcaagacgatgatcgtggagaagtacaaggacaaactaaaaggtatcttaattagagattgtggttttacaacttaaattcgatacttatttatataatcaggtgtgtcatataatttgtttgtattgcgtgatttcatggttgatctgatttctcaagttgctatatatgcctcaatacatgtgtgtaacagtccaatttgtatactctttagactgaattttatcgaatatataatatttttcagtttgttctagtcatactcaatttccgtttataatttgccttaccaaaccaagtggtgcattactaattatttatcgtttatttactgttcttatgtctatatataaattaaagccaaggatagttgataaagtaaaagggttgttgctgacaaaggaacttgatcatagaattccgcgtctctctgaatgctgcgtttttaaactcccaaaatataaaaaattctcatatttttaggagcttctttttcttttacagtcatcttgtacgaatctgtgtgtcagtgtgtctgtgtgaatgcatgatcctctataaattttccttaattatgtatgcaaacatgtttatgtttacacgtagacattattaaatcaagaataaaactttctgcatggattgaagcatacttacgtatcttttcttaagactatttaagcaaacagtatacttgctaagcagatctatgaaatgtttatatacacagtaaacaaaacaagccaaaaccaacctattttatagattatattgtcgcaactatatattttattatttgcattgcacagtttggtttacttctgattactaattttctgcagtgagtatgacgagtatctattggttttaatccctcagtgagtacgtagtagagctaatgtgacaactgacaactttggcgtctgattgattatgtgcaatttaacaaatttatatggaagaaaacgtagctttagttgtgttggtagtttgcaatgaaaacaataattttccaatgatataacataatacgttaggaaaaggtggaatgaatataatggagaaaacgttaaagaaaagattgacacggaaaacaatgcaggcatagatttgtatatccttgcccccaagtactttttgtgttagtcccactttttaacggtagggttaaaatcatttgaaatgcttttttgactgtactttgtttttactttttctttcttacttacgactttctgttttctctttttacctgactaaataatgctaatgctacatgatatgtgatcgcataagttgataacatcttaccaaacaatattagcttgataaaaaaaatatgattctatggcaattcgaaaatggtctatttgcatgtgggagaaaaacgtcaattagtgaaaataatggtgatggtgttgatttcaaacacatcgttaaaataaagaaaaatttgcttatattggagagttgaaggaattatggagatttaatgagatggaagtatcagttgagatcactgttgttaattcgtgttgtagtcagtgtgatcgtgagtgttgaaggccgatgttgcagaaaattttactagtattgaagttttatcattatgtggagttaatgtatatgatattcttgtccaattcattgactttataaaataaaataaaatcttgattcataataactaaattatactatatatgtacaatgttaagttctatatctcattatttattttttaaatataattgaaaattaagaaaatgataccaaatacgttaaattctaatcaacccacatatctccggcaatggaggttcttacagcaaagacagaccggatcttacaccctcttctgtgagggaattggagcttgcatgttccagaagaacgagctgtgccatctgtctacttgtgccccatccatacggtaaattgatgcattgacatcaatactctcaactaataaagcactagagtgtctcatctagatgattaggcgcttcatcaatctttcttagcatttgcgtttttcttttctgtttacatattatagtatagagttttctttttctcttcgttctaaatgatcaatgcactccagttattaattgaagtaattggcttataccaaagtctattggatttggctttatgttctgtaatacaaaaccgggattttctctttgcgggagataatgcatgatccgcaaattgcagaagatggattcacatataaaggagcagcgatacaatcatactatcatggttcataaacgggcacaagacctctcaatgaccaatctgaagctaagtagttctgcatctcacgccaaaccacggtttacgccttgcagagccaatcttgaaaattgtacatacatttaactctaaggatccacttgtatgatgtatctatgcagaatgtacaatagacaaacgctaattaagcggttggatatagacggacgttaattgattgatgatgttgacccaacgccactaaaatggacttgtttcttcacaacaaaacaatagtagttattaaaatacgttgtggaagtagtcagaatctagacagtcaaaataagccaaccaaaaacggtagaaactaaaaatggacagctaacaaaggtaagaaacaagttaagtcaacattgtgaaaagcaagtgtaacataaagacaagaagttacataaaacataaagatccaaatttaataaaaaccaagttccctgaaatggaaggaaccagtacagaaaaacaaagagaggccaacagaatttggtgaaacaaaaaaaaaaaaaaagagagagagagagaggaagtgaattaaatggtagggaaagtgaataacttcttgaaccactactgctacacgtactcattatctcataccaattaccaaacatctttcaattccttcatttacttctctattcacatacagttagtagttggaagaaacttacacattcaaagaaccaacctttgacttctaatttatgacacaattggacatctaagtagttgccaaaactttttttatttcctgtttatatcaacatagtacatgattcagagttgatgagagatcgatctctgtctccatgaacacaccaatttgttcttgtgtgtatgctcatagggattgttttctatacacaagatttccacattcttccttctaaagagatcactactattgaaacatcatcgtgataccgtcttcgttcaccttgtggtatctctagcaattcatggaaatccatacctacaatacacaaataaaacatcaattcagataacaaatatttactgaaatcgtttttttcgaatgtatgaatgttcaccataccagctttcttagcagctctaaacaaaagctcttgcacaaggtgttgagctggatccccttcaggttgtaatgtgatgaagagctcaacctctgaaacagcttcttcgtttgtgaagtattggtagagaccatccgatgatagtattagaaaccggtccttggaccctaatctgtggtggtagagagacggtaagcagttgatgtatggagacttcccaacgtaatcaatttggaacatctcaagaagtgcattgttccatttaggctgcaaaataacataaccaaactgtcatcagactgaagatcacacatactcaaacatcataactaaagtcagatgaatatttcatacctgcttaaggaaaccagcaccaaacgctcttgtgacctttaaggagcctttaacccgttcattcgttaccgcggtaacatcatcgggatgctcgtttctgattctctcaacttcctaagaaaccacaagaacataacaataagtaaaaaccaccaagattcactgagcaacgtataccattgttttgtttagtgtttacttacttcttctatatttgtgctgtgatcaacagtgagctgaaaagccgataaattcgggactaaagatgattgatctccttcacaaccttccaaatcattcatcatcgtttcctcgttaatccgttccaaatcctgtctaatcttagctaaccagtaatccggttctgatttctgaccaagcacagctctactatcaccaacattcatcacataaatatcttcacctttcattaacatgaccaaaacacaagaacccatcaaagctagttcaggattttcgtcgagcatcttatctgcagtatctaaatacgcttcctctgttttcctcagagcttgtgacagagcctctaatacttccgaatgattcgttaaccgatccgacccacttctccgactaatctgttcctttaatcgacggtcaagatcttgactttcacgatcccattcacatctccaccatcgctcacaagtctcatccttttcctgatttgaacaagattcgtctccgttagacctttctaaatcctgagatttggattcgacatttgaatcgtcccataacaatcctttgagctctcgatgaacgacaggatagagatgagagagaagataatccggcgcatctggaccgttgaatccgtcgtatattccgacgaagagccacccgtgctcctccgatacaaccacgtgtactcgatcctcaccggcttttccctgagcccactgaagattctggttttcgagtgaaacgtcgtcgtctaagctaacttcgctgctaaagttcaagctattcactgtgagattctcgttgtgcaaattccggctcttttctgacctaattccccagttatcggaatctttaacggatttgatcggagcaacgatcgagttttgccctcttgacatcgttttcgagattgctctacggaggatccgaaccaaagatcgttttcttgacccgacccgtaaagctaaaccatgagagaagctacgttggaactgatgatgatgatctgagtttggcttatcaagcggacctgagaataacccgacccgatcaagaggacccgacatgaatcctctttcgatcggacctgaaaggaaccctctttcgatcggacccgagcctaaaacgatcggaccggagcttttggggatcggttgaagagggattgacgaaaatgaagtcgtgctttcgaatgcggcggcgcggtcgatgtgaccgtagggatcgtagagagaagttgagagaggagtagctgtgttggcgctaacggaagcgccggagattgtacggaacgttgtcgtcgttgtgtcttcctctgaatggacttttgaggaactgattagagtcgggtctggtcggacgtagcagaaggagtgacctaaaccttcgtctaaaggatccggaagaagaacggagatgtcttttggccggagacgttctcctccaccgcctgtgaaacatatactcagttttgttactccgttacccatcaaaaacgttattaatttcagttttttcttagattcgcaaagtcaatagaggatttgggagaactcaaagctgagattgattgttcatcaatggaagaaaatccaaagagagggcaaagagaagaagaagtaaaagagagagagagagagagttgacttatgtgcaaagagaaaatgatttttctaaccaattgttattaattaccagagaaaggaataaaagaaaagaaactgtaagagatattattcgggttttgtctgatttaaatctgcgagaagaaaaattggtgtcaaacagaaaataaatactagtagatgaaaagtgtgacgtcaaaaacaagtaaatgacttttggttcgcatagatttgttgtaagaacgcgagagaggcgttgactaaaagagtctttaactcaggggtttctatttaaatggggaaagatgctataaggaccactctcaactaagtgcgtgaattgcacgcgactctgctggttagtaccgtatgagaggagtcgaagacatgcgtgtgtgagaaggatcaatatacgttctttaatttatagagatgtaatctatacgttagtaaaaactatctaatcctgttagagaatggatattccaaaatattgaattgtggaatctaattgatcatcaacgttgtgaaaaccttatgatgagttatcgtatgtatgacatatgatgattactataatcatatactaaacggagcttctaatgtgagaacaggggcaaagaagttactagtgcaaataattcaaaaggaaaacatggtgtcaaacgacatgaccggtcattgaaaatacccggtacacgcctcagatcgagcgtgggcttacgcgtgaactccaatagcaaataaagacttgcttataaacttagctgcggaaaactaggaaaggctaattaaagaagttgttgatatgttgatatagatcttattatgggctaagacaaaaaaaactctattaaaagtcaaaagagtgtgccacaaattctcatttgttttcgtttcggccgtcgccgttggatctcgtgtaaggatcaaatgggctatgagcctaccacgtgtcatattatcactgaaggcctcgttttcttcaatctctcgacaactttcataattccctttctcccccaccactctctccctctcttacctcattcatattataaaatttggacttttattcttttgttaacaatgtgttaatgggggggttttctagttcatttttatgagtttggtggcaatattcatttactttggttggggcagttgtgatcattactattcttaatcacgccaatccaactaaagtctttgacttcctttttcttattacgttttgtttaagattaatatgataggaacatactgcttattagaatatcagaaaagtaacaatctaatatacatataaatcgtttggtagcggccacttgctaacgaaatgatataaatcttctctctttctcatttgccttttgaatatatttggttgtctaagttttccttctagtcggttaaatatgaagcgtgattagggttttaatcttccaagtcaaccttagcttccaagtcaattctggcttgcatagtactatttatatataactagatatacaacattctgttatcatttgacagaattaatatttacagaaaacctaagcagccaaaaagatggcctacctcccatacaaagagtgtcaacaatttgccacaaacacaagtagcctaacaactaacgtaactactcatccctcttgggttgttcacatactttaccagcgcaattttagaaaccgttaatatatttaaatttggttacgcacaagatatttgatatgacgacaatttactggatcacaacttttgcttcttctttaaaaagaaaagaaagaatcagcaacaatttactggatcatatttgcatagaaaatatcaaatataatgaaaaaatcattaatcatataaagaaacaaagcggatggagtacttaaattattcaatatttacaacagaacattattttaaataataaatctatgaaatctaccttataaacgtgcactaacaaaagaaatgatacgtacgtatattcgtagcaataaatataagggaaactattttattaaattctgaattacaagttgaaaagtactagatattgaatttagtttagaaaaatacaagtgtttcaatgaggaaaaaacaaattattcatgtatatttctcgtggcgtgtgagcgttatatatatagatgaaacagacattttgacagttttctacaagtagaccgggccatagttggcgggtaaagactaaagtagaaccacataggagaacgaaaagtctcagtttcatcgtccttgttcatggtcttcctcgtttttcttccagacaccttccgttgcatcaacccctattgaggtttttgttgttcttgttccttatgttcttcggtttgtataataccaaacaatttggttgtctcagtcacttccttcttcttgttcttgaatattgatcaggtcagtttctaccgtataactttttaacggcttttatatattcttcttttgcttaggtttatcaaaattatggaacaagaaagattatttgtttctttgacttgattatatttgattggattttgaagatttcagactgctactaagtctctcgtctgactaaatttgtgttttttttaatacgtcgctgttatcatcctctgtctttcaaattgatcaaaaacgtaatttaatttgtagatcataagattcgaaatgggcaagcatttgaaaaacgagagttcaagtccaaaccatggcaaatacaatcacaaactaggatggttagctggaatgcttcatgtgcttgacttccaccattggagaactaagaaccgaccaatctgtaagctccatctcataaaatattgtaaagtaattttcaattttaaaagattgttgaatggttcattactctgttttcttaggttggaagaccccaagaacccattccttgatgcgtgaaactgaggaacaagaaccgtttcttgattctaagattaatgattcaaagatgcttagtgttgttgcagataataagccaacgagaccagaaacaaaactgaagaagacgatgacaacaaagcaagtaaccgagtacgtggattttcttgaaatcttgaggaaggaagatgtttttgtcaagataatgaaagatcaagtccagatcaagtctaatccaagggttttacccaagtcaggctcgtttcctatctcaggatcttcacgtcctgctaggattcaacacaagcagaaggagaattggtatgccccaaagcagaacggtgccgttttgactttgaaggttccaagagacacttctcaagagtgcaaaccaatctctccttctcatggctcagctgatgatgatcatggattcaatcacgctatcataaacggatttagagaaatcaagaagttgctcaaaaatacactcaaagaccgaaatcgcacaaagaagaagaagaagaagaaggttttggatgttgcgaaagatgattatgtggggagatattctcaactcttgaagcagatttctagaagagaaggtggtgacttgcgttcgaagagcttaaaactttcatatgaagagaaaaagagcgattcgagagataataaaccgcaattcttcagacggatttcgtccttgtccagccttgaagttcttggttcatttctgaccgacctccctcgagacagttctacttccaatcaggaaactaggatatctgaagaccaagatactaactttggagccaaaaaatctgtattgtcatccgaatctccggtaagagcagagaaggaagagaagtatgaggtgcaagaggagagaagccaagaaaatcacctagacagctcaaaccaaagaatcctgcaacaagaaccagattcagttcctagtaccaataaaaccgcagaaaagacagagactttactaccacaaggtaagctcttgaacaaattaagctcttcactgtttgatgagagaaaggtactcaattctatggttgcttgttctacaggtttaggtctaagttctttagaaatttacaaacatgaagaagaagatgaagatgcctacttctgttacgtaaagaaggttttaaaagtttcaggcttcctcgaaaacaaagacaacgaagaaaagtggtactcagaggaacaaccactgaatccatcactgctttacgaactcgatatacaagaagaagaaacagtgaacgacaaagagcttctattcgatttggttaacgaggcaatcgtcgagactcaaaaccattcacaaatatacttccccaaaacatttccatatggcaaacgttatcttgatgaggtatggggaagagtggagtggagcctctctggtttaggagctgagaacagagatcgttcattggatgatattgtgggaagagatcttcttacaaagagtgatggatggatgaatctccaaggtgaatctgaatggcttactcttgagcttgaagatttgatttttgatgatgttttagatgaactgctttgtgtttattagtaagttaacaaatagaaaacctgtttttttctgatatacatgtatataaatatgtgtttgatacaaatttaagatttcttgtaaaataatgtaccttaacagtcccaatttttttgatgaaatacactaattaatcagagttaattgttatttaactaaatagagatttagtcttctaatgggccgttattagtttattgggccgagcctattacgttaaacccttagccactgactcggttccgtctccgaccaccaccgcggcgactccccgatcgatcaatttcctcagcgggacattttcctttgtctcctcattctctcaggtcgccggagattcgtcggcaacaagttgatgtggctaatccgggcgattgttcctgttcgatatttgggatcttacaagagacctcaaaagccgccatggatgagaaatccagtggtattctactcagacttttcggagaagaaagggaaagttgctcctttgcaggtgaattcatcatctattcacttaacccacaaataaaaaaactctcttttacttcactttctcactgaatttctgatttgtcttgttgttgtggtgcaggagactagaatgagagataggtttactttgtacgcacgaggcggtgaaggtggtagtggttgttctagcgtccgccggagccgtgccgatcgctatggcaaacctgatggtactattctgatattgttaccgattgataattaggttgaatcattcccaaatccatagttatcgtttaggtttggtatacttagaattggaatactgtttgagtgattgattgattcaaaaaatgttttatgtttatgtaatgtaattgagcttagtttaggtggtaatggtgggagaggaggtgatgtgattttagaatgcacacacgcagtttgggatttcagtggattacaacctcatattgtaagtgtatctgtcactcttttcgtgttctcggggaacatgtctcatgagaatttctctgaactggttatatcaatgagttttgcagaaaggtgggaaagctggacacggaacttccaaaaacaggataggaaacagaggagaagacaaggttttattatgttctcattagttgttcctgtgcttctttcttttattgttcgggaattaagatgttgtttcgcgcttgtttgtgttaccataggtcctgctagtgcctattgggacagtgattcatcttcaggagggtgagattccatctcaggttgaaaatgagtctcccaaagatttggatccatgggaccttcctggctcactggttgaggatcctgcatccgaggagaattctgatgttcatcaggaaactatgtctgagtctgatcaagatgatactgagcaggagagtttaacgagacagttaggcatgccaaaggaagctgattttgaagacgacgatgaagagattgatcaaatcaggtataatgttgccgaattgacacaacaaggtcagagagtaatcattgctcgtggcggtgaaggtggtttgggtaatgtttccgctacacgttatgtaagaggcagtaagtttgctaaatccacaatccgtcaaaccaatttgaggagcatggaagacgatgctgaagaggatgatgaaaggtcgagtattaaagccggtttgctcggttctgaggctgttctgatattagaactcaagagcatcgccgacgttggccttgttgggatgccaaacgcagggaaaagcactcttcttggtgcattatcccgagctaaaccccgtgtaggtcactacgcgttcacgacactccgtcccaatttaggaaacgtaaactacgatgatttctccatgacagtagcggatattccaggtcttataaaaggagctcatcagaacagagggctaggccataactttctccgccacatcgaacggaccaaagtcttggcttacgttgtggatttagcatcggggctagacggttgcgaaggactgacgccgtggcaacaactgagagatctggtgatggagcttgagttccacgaagaagggttatccgataggtcatctttgattgtggcgaataagatcgatgaggaaggtgcggaagagagattgaaagaacttaagaggagagtgaaaggagtgaagatatttccggtttgcgcggttcttgaagaaggcgtggctgagctgaaagatggtctgaaaatgcttgtcgacggtaatggtgagccatcggagagattaaaattggagaatatatgtgttgactagtttattccagtagatggacaaattgaattgtcttggagaagtggctcaactattgtccaatgaaatagtttaacgatttattgtagtcaattttcttttttatatgattatgcaaaatgcgaggagtattttagtcaaaacgtgaaaatatgtatagccttttaaattatggttttcgttagagaggagacatatacacatacaaacgcaaaagaatacatatactatttatgatttaggttacaaataaaaacattacacagcaggaacaagtcaagcaagcttaatagttactcttactcattacgcaacacaatgccaagtctttattccaacatacacaaagatctcttagcataaaacacatttttttcccattttccttggtttgagaccatgctgataatttcttcaacagttacagcttgacccgcagctgcagtttgatccacagctacagttatcacactccttgttgtagttcttctcgcaactttgtcataccaaaaaaacaacagaagtataagatttcaaaaatttatcttaaggaatatgtaaccacatgtatattagatatatatgcatgataagttaatgaagagagaatctagggtttacctgcacgaatcaccacatttgcaggaggagccacatccacagttagaacctgccatttctcttacttctctttgattgattttgtagttttctttttcttcttctgatgctttatgtgatttcaactaagggaatggccagtatatatagaagaatataaaatatcggttttatatccaccatacatttcctatatatatatattatcttttgtcaacctccctatatatattttatattttcctgtaagttttagtttcgtatatgatagggttagcaaagtttttgtatatgagatatacatatagctttcttgttggactatataatccctctagatatagattttctaatttcggcagattttgagtaaatatccaaaaaaatctcactatcttgacaagattacaaaataatcttttaatttaactatttaagacaacatgtataaaacctatatcttaactaaaaactctatattattgcaactatataatctaaatgtctattatcttaaataaataaaaatgccactaccactttttgatattataggccaagttattgatcagtaaaacgaggccggcacgtaggaactaggaagtcaaaaaataatatttttgtgatggaacgtaaattcaccaattcaggaccttgaaggggcaagaagccaactaaaacaccagccccaaccctagtgcaaattaccattctatataatgaccccatctacgatttattccttctatttccctttacgtaaagtagcgacgttcgtgaattcctaagaagttagactaacaggtttgtgtggttcttaaatttttgggtaaaaattaggaaaaaagtttatattcctacccaaactttcggcaccagagacaaattaggtttgttcagaaaatcagtcgctcatcgacagacttaacaccacaaaatcatcagaatttctttgggacaaaatggaaaatgttcttcacggctccacctaccaaaatttcgatatcaagctcaaaagcatacacaaactataactaattccatagttacgtaatcttaacttcgaattcaacaacacatgcatgcatcgactgaatcttcaacaaatgcaatcaaacacacaaaattgctaccaaaaaaatatgattttttttttatgatttcaattttcatccggcacttagtccaaaactttttttgtgtgtcaacattttttaaaaaaatctttaaacggatatctgatctaagagcatgttcataggtgatacttacaaaatatttttaagaaattttttagtattatttataatgtttgtttaataaatatatataagattttttgcttttatcaaatgtgaccaatcagaagaaaccacgtcagatgatactgatatgacaaatatgatactgatcaaacatattctaattgctttactaatataaaaataatttttggacttgtgatactctaaaaatatcacccatatacatggtctaatatatggatcgtaaaaaactcatatataatattaataagtagtagaagagcgtagaccatgtcctgggtcgtcgtccaaatgaccacaagaagatttcaaaacagaggaaaatatttctcattaaataagttttcctgacgcataagataacattattacaagattcagaaaaagaaaggtgaaaggataatgtttctcctactatataagatgtgtacatctgaaaaaatatgaatatatttgtaacgtttgactgttattacatgattaatacgatataaatattaacattttttttcaaaataaaagtaatatagtaaggaaatgaaaagaggcatgaagcatgcctctttttttggtcggctgccgtttacaattgccaattgcgatagttactcttcttgcgtgtacgacttttgtttttttttacatattcgccaataatttgacgttttctattagtttgtttgatactctgttgtcttgctaaaactcaataaaacattaaattactttcttgaatgaagctggaacaaatctaacataaatagaaaatgatgggcaagttgatgttattcgtaaatttatttagattatattatataaaaagcaatccaattatatatctcatatatacaatttcttatcttactttgtcaatgtcatatacgtaactaaaacttgcggaaatagaaaatgccacgtgtatggtggacataatccgaatctctctctttcttctataaatagtggccattcccattggttgaaatcacaaaagcatcataagaagaagaagaaactacaatagttaatcaatcaaagagaagtaagagaaatggcagattctaactgtggatgtggctcctcctgcaaatgtggtgactcttgcaggtaaacccctagattctctcttctttacatttatatgcatatatgtagactatgtagttcgagcttcatggtacaaaattcaataaactcttcttatgacttcgtttacaattgtgtttgtgaatagacacaaaagattagttttgtttactttagattcaaaacacttcgggcctatcctgtatatatgctgatcagatgcatgtggttgattaatctttaatctcatcatattaattactaattttttgtttgtttgattaatttgtgtgtggtaaagttgcgagaagaactacaacaaggagtgcgacaactgtagctgtggatcaaactgcagctgtgggtcaaactgtaactgttgatgaaattattatggtctaaaatcatatatatggcagaaaaattggggaaaatatgtgttttatgctaagagatgtgtgtgtgttgttggaataaagacgtgaccgttgtgttgcgtatcaactctcttaagctttgacttttcccagctttgtattttcctatgtatggtaatggtgtgattgtgtaatgttttcatatgtaacgtaaaaaaaatatttatgtgacattgacttttgtgactactaagatttgtatatgtctcctccgttttttatttaggatttaagttcaatcagctaaattaatcataaacaatttaagtaaatattcatatgagaagaagtcaaccatattcttatcgggccttatatgttaatgttaaaaggttacgggccagtaaggtcccaaaaaagaagaagagatgagatccattattgctctcatgaggcaacgagaatatttcgttcaggcaattcgtcgaacaacttgcgtggcctcacctgcgttgaatcaaactaacttccaagcttcgagctttctcactaccctaatatcttcgaagaaatctccggaagagacatgtatcggatcggaggaagaagaagaggagcccaacaagtgtttgtctttgagaatcgagaagcttccgaagggcgtaactgttgggtctgctttacagagctggatgggtgatgggtttccagttcatggtggagatgtttatcacgccattaatcgattgaggaaactcggacgaaacaaacgtgcccttgaggttcgaattcttacttgcttctctcttttgaacgaagaatcagttttatgggtctgaatagtttagaaaaagttagatacttttttggtacaggattgttgtatcaatgtgattttgccagtttgaattc

SEQ ID NO: 4 - DNA, 74328 bp, Arabidopsis thaliana
gaattcagctgagatgcacggagatctcgggaagctagggagatcaacagttctaaagaagttcaagaacggggaaatcaaggtacttgtgacaaacgagctctctgcccggggtctggatgttgcggaatgtgatctggtggtgaatcttgagcttccaactgatgcggttcactatgctcatcgagctgggagaacagggaggctgggaaggaaagggacggtggtaacagtgtgcgaggaatcacaagtgtttatagtgaagaagatggagaagcagcttggtttgcctttcttgtattgtgagtttgttgatggagagcttgttgtcactgaggaagataaagctattataaggtgaaaatctaaagatgtaattttcagatactattattactattgaaaattcagagtcttgtccctttttcttatatattgtaaacatatttttaccagacgaagaacatctaaaaccagtgtcgaatttactccagttttgaccgactctgactattacgaaaacccataggctccatgaaacagcaggcccctgaggcatttcaccgaacaacttgtgggctatatcattgaaccggtttcgaccgtataactcagctaaaccaattccagtatagctttgactgaaccggtttaatcgataagtttaaggtattcttttgtcacacagagtgagtttgaagaagaagaacgattcagcttgagatggtgaggatgatgatacggagattgagttctcaagcttcgagatttgttcagcctcgtctcctggagacaggtactctgagaattgctttgattaattgcccaaatgagctacttttttgctgcgaacgcggcttctctactttcagcgatagaaatctctcttatagagacaaattgagcagtgggcttgtcggtattaaggcagatgatgctgttgatctgttccgagacatgattcagtctcgtcctcttcccactgttatagatttcaatagattgtttagtgccattgccaaaacgaaacagtatgagctagtgttagctctctgcaagcaaatggaatcgaagggaattgcacatagcatctacactttgagtattatgatcaattgtttctgtcgctgtcgtaaactttcttacgctttttctactatggggaagatcatgaaacttgggtatgagcctgatacagtcatctttaacactctactcaatggcttatgtctcgagtgtagagtttctgaagctctggaattagttgatcgaatggtagaaatgggacataaacccactctcataacgcttaacactctggtcaatggcctttgtctcaacggtaaagtctctgatgctgtggttttgattgatcgaatggttgagactggctttcaacccaatgaagtaacttatggaccggttttaaatgtaatgtgtaagtccggccaaactgcccttgccatggagttgctcagaaagatggaagaaagaaatatcaagctcgatgcagtcaaatacagtatcatcattgatggtctttgcaaagatgggagcctcgacaatgcattcaaccttttcaatgaaatggaaatcaaagggttcaaagctgatattattacctacaacactctcattggaggcttttgtaatgctggtagatgggatgatggtgccaagttattgagggatatgatcaagaggaaaatcagccccaacgttgtcacattcagtgttttgattgatagttttgtgaaagagggaaaactacgagaggccgatcaactgctcaaggagatgatgcaacgaggtatagctcctaatactattacatataattccttgatagatgggttttgcaaggagaaccgcctagaggaggccatccagatggtggatctgatgattagcaagggatgcgatcctgatatcatgacgtttaatatcctcataaatggatattgtaaggctaatcggattgacgatggtttggaactcttccgcgaaatgtctctgagaggagtgattgctaatacagttacttataacactcttgtccaagggttttgtcaatcgggaaaacttgaggttgccaaaaaactcttccaagagatggtttctcggcgtgttcgtcctgatattgtgtcctacaaaatattgctggatgggttgtgtgacaatggagaactagagaaagcattggaaatatttggaaaaatagagaagagtaagatggagcttgatattggtatatatatgatcattatccatgggatgtgcaatgctagtaaggtggatgatgcttgggatttattctgtagcctccctctcaaaggagtgaagcttgatgctagggcatacaacataatgatttcagaattatgtaggaaagactcactgtctaaagcagacatactgttcagaaaaatgacagaggaaggacatgctccagatgagttgacatacaacatacttatcagggcacatcttggtgatgatgatgcaaccacagcagctgaacttattgaagaaatgaagagtagtgggttcccagcagatgtttccactgttaagatggttattaatatgctttctagtggtgaattggacaaaagctttctagatatgctttctacaactcgggcttcattgaaatgaatatttcttgtgtagctatgatttgttgcttttcaggcatcaacaaggtcaaatgggctcaatttttgtcctaaacacattgaatccattgaacaagcctttttattcagtgaaagaaaactaaaaattcaatcaaatcaactttccattttattcatcgaagtaagagatcagttcgatacatgtggaatataaagcacaactatatcatcatatgtatgtatatttctttcttttagatttgagtaattagaaatggtaactccaaacaaaagaagtaaattcaaagcttattctggtaaccccatggattattgtttgcccatttccactgatctctgcacatctcatccactccatattttgccctttaataaaccaaatcagattgtttaataacattatttatctcctaaaccaatcatgttaatggtgaaagagttaaacttacttccagccaagttctttctcagccttctctgttgaagcataaactgctgttgcatctcctgaccttctcggacagagcttaatcgggattttctgcacatgttgtttttgtttcaccattttagacaaacaatcacaaactatttacccttctgaattcattttctgctattaccttgccggaagctttttcaaaagctgcaaccatttctaacacagacgttccttgaccagtccctagattgtaagcagtacaacctggtattccaacataacacaggtctgagaaataatctatcaaatcaaactaaaaacttctaacagttaaatgtctgagaaagttaccaatctttggatcagcaaatagcttcctgagcgcagcgatatggccatctgctaaatccatcacatggatgtagtctcttaccgcactaccatcctcggtgggatagtcatgtccatagacattgagttccggtaaacgtccaacggccacttgttggatgtaaggcatgaggttattggggatgccttttggatcctcaccaatactgccactctcatgtgctcctacaggattgaagtacctcagcagaataattctccattccggttctgccttttgaatatctctagctatttcttcaagaaagagctgcacaaaggaaagtttggtaaatccatcatgacttttcaacaattgagcattgttattatctttgttaggcttaagaaaggcttcttagctcaggtaacatttggaaaaattacaaggtattaatcacaatagagccaactttcacgattataaatctacaaccaagagtttctaaagtctgagagacttggataaaggaggaaaagcgagagagacattacggtccaaaggcatattgagtaaaatttaccttagtacgaccataaggattcatagcctttaattcaaagtcttccatgcatggaatcttttcaggttgtccataaacagtggcagaagatgaaaacaccatctgtatattccaacaacacatcaatttgtatccccaccattgtaaaaccgaacaaggaaatataaggaaaaaaaagtaaaacatttctgaagtttaagaattatatctaaccattttgcagttgtactttgccatggtctcatatagattgattgttccaaccaagttattgtcaaagtagcggcgagggttttcaacactctcacccacagctttaagacccgcaaaatgaatcacagcatcaaatctattacctcacaagaaaacgaaatcaagccaagggtcagagatccagagaagctatgattagccaacttaaaaggtgagaatctaacatacctctgcttggagaatagtttctcaatgtcccctttgtttcttagatcaccctgcaaacaatcaacaccaaaaaaatcttaatcgattatctccttacaaattcaatcccaaagatgatattgtaaaagaaagtcttcaggttatagagattggtctaaagttcttcaggttttgttgtgatccttgtttttcaaagagagaacacaccaattcaaaaatgaatacaatcacagagcaataatttcagctcacaagactagacaaagaagcagtagttagttaccagattgaagtcgagcttcttggagagatcaggaccaacaagctccctaactctatcaacagcttcgataacagagttatcaaaattatcgatgatcgaaaccttaaaaccatctttgagaagttgaacaacagtatgcgtcccgataaagccagcaccaccagtaacaagaatgttctgctccacagaagaacccatttcaaagaagaagaaaggttatcaagaagaacccacttggcaaaatcgattctttgaaaactagatcaccaccaccaacagaagaacaaatgaagaagattgatgggaggaattgaaaaagagttgggtccttatttaaagatatttgtagctttgtttacaagttgataagaaggcacgcaaagcgaaaaataggaaaaatgagtgggctctttcatgtttttgttggtttctataaatacggcagtgatgatcatgacaacgatgatgatgatgatgatccgtttaagtgtattatagctttgattcgtcgattttcagttacgcattgatggtgaaacttttctcggcggattttaataattaaaagggaaataatgtaagattaagtcttcttttttttttacgcaatgacatttttaacctatttttgtaaataaatgactagtgatgaccaaaatctacgaggattatgggaatacagagagataaattttctatgggttggataacacgctaaaaactggatagtaacgttgtccaatcaacttttttgtgttttttcgttaaagttgtccacttaatatttatcttttaacgatacctaagattgtgacagagacagcagagacctaccgataacgttatgatcaaattgatgacgtgtatctacaactttatttaggtatccaatttgggtaaatgttgaaatgttttggtactagagttagctaataggattttgttttgagaaggaatatatgtttcgtatgtttttttttataacaaaatatgtctttatgtagataaattttgaaatatattcataacatgaattttgcatcaatttgcaagtagaaatggcaaattcttcgatttgtcacaaattgcgggtaaaatcttttacttaagataatgtgtgatgtagatgatttttaaatccggataacataagtaagaatacaagaatttataaatgcaaagccatttcacatgggttttgttagcttgtcatttttgcttaagatcaaagaaacccaaaaacccgtaactatcaaccaaaagaaaaacaagtgtggtcatttattgtgcttaaccctcaaacttatcaatcaatctaccaaacgttttcacgatgcagtttggtgttactgcaaacatcaaaaaaagtcttggtaccgatctttattgattaaagttcagatgctaaacactttaacaggaacggatgtaataaaagtactagtattcagacagagctagcaaagataaaaaagtgagccattttacttacccggtactggctcctataggtgtatgtattgtagtcttgtagccatagcaaaggactacgaaaagtctttgagtggtacctttagaaactgttacggccaagaataagatagataagtcttacgacgttacggattttataagaattgtgatcttagtatcttacaactatttctgcagtcgtcagttgaatttgggactgaggtagaactcaggatcttggaaaaacctggtgagtgtatcagcctttttagaagagagatctgtgtttgctaaaatgtcttctttggatgctttagcgattgcttcaattgaaccaatagcctggtacagctgtaaccgatgagaacataagcaagcaagtagaattcatggtgcagtgacatgattcacaataaggtttgaagtttgaagttggaattgtattttaatagtatcaaaagtgcaagtttaccacttgaacctgctcataagtaaacattaccgtgttcgcatcatgtttgttaatattgggtatggatgtgacaaatctgatgaagatgtttgtatcctgcacagttcgctttctcttcacatgaaagaaaacgaaagaagctttagagattgtcaaaaacaaatgttgagacagatcattataacaaatgagaacctacctcaaccttgagcttagaggccaccttctgttgcttgcacactgaagctcaagtttcaaatcttatcagtcaatcactaaaaaaaccgtagagtatattaactaacacaaaacaaatgaatcttatacctccacgagagtgagcaatcttaacaatcttctcaaatcccatctcagcatcagtgacttgtacaaacgcaggtttcccaaactccatctcatatctacgaaaaagatttatcgagcttcatttccgacaacacagataagcaaaatgatgcaaagtgaaaaaagaagagtagaagaccactcactggaagtaagatcgcataaaagaatcactctgctctttagttgaaagtgtagcaacaacataaagttgcgcaaattgccctttcagcctctttactctaaaaaagtttaagtcaaagaaatcagaagacatataggagtttgcgatagagagagagcttgaaactttattatatagacctgctgaagatggaagcaacattggaaaaatcccatttagtcacaaaaacaaaagcaatagaaacacctccacaattgaagatgagatcctatcacagcataaagtgaattctttaagctaaattttagataatccaattctccaaaagaatctaaacagagaaagaaggcacatacaggggggatagagacaaagttaaggcggaaagagtttgcgctaagaaacgcagatatgaaattgatcagtgaaggttcttgttcaactttccatgcattgctcattatacaaacaccagcaacatttcctgtcagagattatcgtaaattaatccaatcgcagattctcagtaacatgaatctactaaacattagactcatcattcaaatttcgcagtaatcaaatcaaaacacatatcgcctaatttgagaacttatcgacatttctacataagaaattgagcagatacagagtcgaattcaagtttcctagatttgatttgaatcacagctataaaatcgacaccaaaattttgcaaatcctagactctaacgattgagtagatcggatattttgataacagagaagagtggttacctagattcacgagaggtgacgaaacttgatgatctgttgagacactgtagcttgatcccgccgtcgccattgacgaacctcctagagttatagaaattcgaaaatcttggcggatgaggatgacgaataattatcaaatttgaataattaattgttttcgtcccacatcgctctccgactttggttctcctaaccggttcatgagtatatataaaccggttttgaattctccatacgctccacattacgtttgaggtcgaagatatgctactgatcagattcacttgatggtctttcaaactataatttcttactttcctatggatatcaggatcatagggtgcaagcctaaaccatgcatgacataacaataagagagaatttgttagcctgtaagtaatataatcctataatctacttcattcctcacaggagaggtgattctacatatttccagattcttgcttttgttgggaaaatgttttcatatattaaaaagatcaggaagtattacattagaaatcatgtattgatgttgtagacttggtataagtcttcgaatgataccactttcaagaatacaaaaaaatagtggattcattcattccttccttcctcaatattctcattctactctgttggtgcaagacatgattgtagatttcatctcttctttgctcaaggatgcttcaacaataagctgcagataaacagtaaaggaaaaaaactgaatcatccaagattaaaataaaacagatgttataagttagatctttctctttctttcttttacctcttgtactctgtttccagctcgagcaagcagtttgtattggttctcaaacattggagccatgtaaacctacaaagagagagaaagcaaaccagagctcttagcttccgatcaaaacataaaacgttcacattttttcgctaaggaagccgcaacagtattcaactctttagcggtctgttagatgttttcgtgttttgatatatacattttaggtgattaaactgtgtacctgaaacgttggagcaagacccggactcaagaagaaacgactttttgagactgattggattccttcaaccatttccagctctttgatcagagattccacgtcaggccactgcagaagaaaggtttcagaaacctgtaataatggtttcatcacataaaatcacagaaggtctttaatacctcagcgtcgagctctgctgcttgtaatcgtccccccaactgatcattatcaccaccaactacagattctaaagcttcagtaagaggatcaggctgcataaagacatcaaacgggtctaggtatatatcaaaatgagttaccaattgctacaagataaacttttgagagatctttctcaccgtaatttcttttaatgacaagaagatacgttcaagagcaaaatctagctggtgcactttcgcttccacaatctgataacaacaaaaagaaaggtttgtcaaacagttgtattccttagcagtgtttacgatagttcgagatattacctgaccaatcttgaaatatgaagcagggtctaaagttgcatcccatgaaacttctgactggtgaaccaatgcagggacaccttctagctgtttcaacccaactttttagttttacacaacattctagattccgttcttgccagtcaataaagcaagaaggttcaaagatattttaacttctgtaagttagtagttagtacctcacagaaaataccaaaataggtaattttcttgatgcagcatttcacaacatccccaacacgaagcttagccataagagttcgttttttctcaacttcctcttcattttctctcggcctcattgaaaatataagcttccttgaatttcgatttgccataacaacattcactttgattttctgcattgagttaaattgtttagaaaggaaaaacaagcatttccatgtatggaaattaaagtcataggttttttagacatacctgaccaacaaaagatgacaggaacttctgcttctctctgtcatataccataagaagatcttccagcttcatatcagaagaaacttctccgttgatcgttgtagcgacttcagaatctaagcttgaatctggagatggagatttactcgtgacatcttgacctccaattaccccaaggttttgtcgatacggtgatggatctacaccttttcttcttaaccatgattcaaatgcgagaaacttccattttgctgcaaggttccggtagggtaaaaatccaatcaaagatccataggaaacctgaacaaagattataaatggtataaaaaaataattagtaaaacaaaatgagatgaaaccagaagtgagtacagatctaacttacagcaaatcctctagtgcttgaacttattagctcaacatctgctcgtaattctgttttaactagagactctgccttattccaatcattttcctataaaaatcacacaaaacgagtttatcatacgcctcttatcttattaaggaacaaatagtaagagagtgttagttctcaacctccaaggacgatctggtaggagggcccttgagctcaacagagacctgacggccttcatggttcacgactgacggttttcctatgttcggaactgatggctcagcggaagacgggtctaatctataataaaagtaaccagtcaggcaaaacagaaaataggagtcaagaaagcaaaattcctcaaagtcaagatactaaaccagaattcacctttgtggtttcccttgtaaagaagcttcgacgatggtttgagaaattggtttcgaaggaattctctcgagtggatcactgttaatagttttctcctcagaggacatctcgctattgagctgcatttcttgataaaacaacaaacatatgaatcagcacaaagttagactatttaaaaatattcttagtttgtctctataccagttggaattgaattattttctatctccgatgattccaaaactccgctatctgcaacttccttttctatgttctcaagctctggccttgcttctggcttctgaattgagttgtttactatctcagatgattccactcctccgctatctccaacttcctcttctacattgacaggctggagcctcgcttctggcttctccaaaagagtatactgtgaatatgttccaccttcctgttctccttcctccatagttaaatcatcagaaagaggcttgtcttcctcttctgcaactacgctcactggttccggttttctcaacaatgtcatatcactaaacctctcattttccctctcatttctcattttcaatgtcagattcggtttcaaccgcaacttagactcctcatcatcaccattactagtataaaacgaactcggctttctcaatataacattaggcaatctctgcacctttggagcagcaacagcctccaccaatggcttcttcaaaacagggcttggcttcttcatcactggcctttcgaacttgactccatctttcagaacaggctttaccaatttcaatccatccagtgaactagtagatttcttcttgttatcctttgaccaatccaatggaatctcttcaacttcaggaattttacctttgttcttgtagaaagatttctcaatgtcaataaaagaagcttctggatccacttttctagctactatctgtataaatttcaccattaacatcatcagcacaacagagagaaatcgaaatacataaaattcaaagaaccgttttttacgaaatctctcaccttagccaaagtcaatttcgggtcttcgccgagtaaacggccaaagttgagctccatttgatcccattcgttgagcttaggctcttctcttttcgaagcagaaactaaaaacttcttctgtttagctaacaaattctctcggtttcttctcactctaaccctagaaggaaacgacaggaattttccggcgagagaagcggagggtgcggcggcggaagcggaagaggataaggcgagaacgtccattttccgattaagccgaaagatgataatttatacgaatgagaatcatgggtccaatcaaaatcacgactttattttatctcgagtgagactgttgcttgagctctgtctcttactctccccctatgtgaactacagagaggaagaaatggctatggcggaggaaggagctttatcagtttagctcaatatttcgcttcctggttgaaccagtaaggtgaagacacgtggttgatgaaggagcaactacaaaaaaaagattgcattttaacgtcttgccgttgtttcgttttagagatgaactacacgtcgttttttgaaatttgctttaacgtcaaatcttttcatacacgcgtaagattgggctatcatgggcctaaaattggcccaatagaaggatgggaaagaaactcaaagaagaaaactctaccaaataatccatgtttttttatgtatgcagaagtttattatatctgtatatatagataaacactgatatatctaaatatctaatgcactgaggctatttcattgtttcagtttacttaacattgttatttattttgatatcgattagggtttggattttgtgggttcgtcataaaagggactagagtttttttttattgaaaaaggaaacggactagctagagttatagttttgcatatcggctctacctaaagttttaaataagttgaattcacgcatgcatcaaataactcgtgcactttaacgaacattaattggttaatccactgattgtcaaatatcgactatgaattagtccattttattcttctcgttccatacaataaatcgatgttagtacagtggcaaaagtgtagtttagcaaggacgaacacatgtgagacgagaaaagggacaaagagctgaaagtataaataggcgttacgttctatagcggttttcatgctgagaacatcatacaattgtcgttcgatataatctgtggcttgcatagtttacggctcctcgtttggatttttgaggaatttatataattataaataatgactatttgtattttcacatacttcagtagatagattctcgaatctcgagattaccaatatcatgcacatcatcatatgatgcatacacgtgatgtaataaagttattttaatatgtattcagccaaaagttgcaccaaaaagagaatccatcgaatccacgaaaactaggttctactaattagttatctattaaattatttcacaaaactaataaccatatagcattcaacacgagtacacatctataacggggggaaaaaaacttttatggaaaacatttaaaataaatatgtataagttagttaatatatgtgccaaaacatggaacctaacgcccacagtttttccccatctataaaatatatgtactttcagcctttcacttcaattccctagctcaacaaacaacaaactatgaatcaaaacatatatctctttatttcataatcatttccataaattacaccctcaaaggttttccacttcttaaatccctttttatcaaatggatgtctttatatcggaagagtatatcaaccgccggagattggagaaaaaagctgccaccgttgccggaaaaagcatgaggtttggctcagcttcaagcaagacaccagagaagagaaatagttaccctcggatatcggaatctccgccagataatgagttccgggtcactggcgggggtgtttatgatagctttgcctttgtgttccactgcttctcgccgtaaaaaaaacaaagcgtttgtgtttagcgatcaaaatgcatgcgcaatagtatatgcatgggaactttattagttgtagctctcgtttttctaacatttacttgaaaaaataattcttcttaacactgtttttctgaatgatggatagaatttcatgtttaccaaataagtggataggcccaatagcaaacaaacgaataaataaaaattattatcggcccaaatccaataagaacgtgagcaacatgattttagtgacacgtgaatttacttaaatgaaaagaaaagcctggcacttaaaatatatttatattttccaataatctcaaaaaaaaactctctgattcgaaaagtgaaatttgattttgacaaaaaaaaaatgagctacgacagagtcccaccggaatcgtatcctcctccaggttcgttcgtaatcacttctccttcttatgattctcttctcttcgattctaaattctgattctcttattttgatctattctaaaagtactaagatcctgtttttgatcggacgaattaggataccaatctcactatccacctccgggttatccatcagcaccgccaccgccgggatatccttctcctccgtcgcatcacgaaggatatcctccacctcagccttacggaggatatccaccaccgtcttcacgtccttacgaaggcggttatcaaggctacttcgccggaggaggttatcctcatcagcatcacggaccaccacctcctcctccgccgcaaaattacgaccactgccatcatgatcatcaccattaccaagattctgactctggttgcttctctttcatccgtggctggttcgtttctttctctaccacttgccgccttttaattttcgtttactttcattgttgtgagtgcactgattcgattctctgtgttttttttggtcaatcttgttagcttttatgttggatcactgattaatgctcagggttcattgaactagtgttttggtttatggaatttgggaatactatgatcctgatcagaaccagattcctttgagttgatttatggataagccataatgtgaaactcaagagttccgttgtgaaccctgacttgacttctttatcattttgtttggtggccaattatcgaaattttagagcaagagattcgtattaatccttagatttagttctctgagtgctttgctgatcttctaaggaaggttcttgtctttttatgatgagtttagagctatccatgtatagacacatttttatgtttatctgttggacaggatcttttacttttcaatggatctagtgactctcttaagaactacctaatggcttttattttacattcttaaccccataatatttagtataaagtttgtagataaaatgttatatcatctgcagcttttcttttagtaagagatttgtgattgacctcaagtagcctaatcatgttgcttacaaattgcgattacggaatccttttttttgtgggttgcgaattgcagtcttgctgctctttgctgttgctgtttgttggaggaatgctgcttctgagaatgccgccagtctctgtggatctcgtcgtttactgtcagcattatgtgtctaatcgaagacatatgccataacactctatgtcttgtgtactatcgtgtgtcaatgtctgttaatgtttacctctttgtttgagagtgcactcatccagagcatggattagacaagtaggtttcttgtggatgtcattgtaatttgtattatttggaaaacgtgattggtattttacctaaatttatgttttcaatggctgaattacggtgataataaaatgcgacatttgtatttgttccaagtttgataaaaggcaaaaactagtacaaagaaaagtttgaaaacacatgaaggtgcaaagagactaaagaatcctaacatatggtggtgcatcttttctagtcccaaccactgttcggtagaggtaaagtttatcaaccttctctctttcatcttcttcattctgttccatcccattattctcattctcgttgatgatctctacgttaagccgtggcgaattctgcgcgagcctcttgcagccaccgagtgttacttcacaagacgacatccaaagggatcgcattgtttcgtacctacccacgtcagcaagaagcgcagcgttcccaaaaggactgtcccttatctccagcttcctcatttttttgcatccattcaacacatagagcattcctttgtcagtgtcccccgcaaaagctatcgaaagcatctcgagctgttccgcgtacataccgatgtagagaaagacttgatcggttaagagaccggagacagagagccgtcttagacccttgcaagcttgtacgattgcaccaaagccctcgtccagtgattgaaatgtaatgtggtcaggtttgtgtggctcgagaatgcatagcctgaaccggatgaagtttggacagtttttggccacggctatgagcgctgcgtttgtcatctgtttgcagaagtacagaatcgaatgaagtttagggcaacctgcggaaatggcgactagtccaacctcagtcacagatgcgttgttatcttcttcaccatgtacatcagagggaaaaactctaagctcttgtaactctttacatgtggcagcgacaaccgcaagtcctttgtcaccaatactatccaatatctgtaggaaccataaaaaccatttgttgtcaggttagcaagttagtttattttcttcaggacagtgaaaagagaaagtgagaacaaacttacccataatcgttgaagtctcttgcaaagctgaataagcttaatgaggtggttgccttggatttcagctgcatagctgaggttcaaagagataaggttttggcaaattgggtagaacgctgggaggcagagtggagcaacctctaaaaagccagacaagctccttaacgatgtgtatttcttaatggcagtcatgagttttgcaaaagattcaggatctggctcattctcataagaccctactcctaagtccactagctgcggcgcacaactcattaaccttgcgagtgcgtcaagcggtactgcacggtttaacttcaagctcttcaggtttggtgacctagcaacaagcctttctaaagcagcaacattggtctctcctttaaggcaagcgaaattcaacgacataagagtagtgcagctatctggaaaacagttcagccattgacctctatgatcatcaatctcattctcttgcaagtccagctcacgaagatgcctaataagaaagacaacaacacattttaaaaacaacataaaacctagagaaacgccagtaaaagaaaggcctttacctgcaattagcggcaatggaagctaagccatcagtggtaaacccttcacagctaacaagaaccaaagacttgaaatttgcaaaagaacgtgaaagaaggtccaagctttcatctgttacaaccatccgcttcaacctcagctcctcaagtcccacacggcttctagccaaagcttcaatccaaggatgcacgaaacctccccattcatgaggaaccaagttgaagtctgcaaaatgaggcttcccttttaaagttaaggatttgagacatggaaacctcctgatcaacctctccgggttaatcgcgtagcagtttccgatgaacacttccttcctactaaacctctcgatcttgtgccatgatttgcagaccagagatatcgagttcctgtctttgtgagaagctacgaagtcaaacacgtgctctataacctcgtctgggaaataattcatcttcctctattgattgtcgaacagaggaattgacttcaagcttagctcagtgaagaaagcttcgtggtccagtgagatccacaacactaccaggttcgaaatcggaggctcacaaaatggagaagcttagaagagctcaagaaaatccaccgaaacctgaagaatctgcaacaaagcgagattcaaattatacaaactaatttagaaacaacagatcctgaaactcgataaactaaacacagagattaagattcagatctacaagaaagtaaatgagctagatctagaaagagtttcgagaccttgagcttatgaagctactaagatcgtcgtcggaaccaaactcgctgatgattcgattgaagaaaaacgttggaaaatgatgaatctggataaaactctggagttagcttcaagtccaatgatgatgagatgatcaaagatttggatgagtgagagagagaagagaagagagagatcacgcaagccaaaaaaaaccagaaactctgtaatggaacaatttaatcaagaggagagaagctttaacctagctgaccaaaaaactaaccatggttaagttaaagcttgttgggtgttggatgatccaacggaggagaatggttcaatggatagcataaaaaggaatcttgaccgttgaggagtggtatggttaattggttatggcatgtgttgctcaccactggtttacgagacctttcgccaaagagaaagggtgaagtgatgcattagtgtcagagcaagggacatgtacaatgcccttgtctttttatgttattactaaattgccatgtaaaagctttcatggccaataggaaaatataatatgttccatactgaattaatttattattggttttaatcgtttttgattacgtataatcaatctttcacggttgttagaaagtgcaacaatgtgaaaagtattcgtgaaaatgatatttgatgtgtattaatatttattggttaatctaatataatacggtatttttaattcgttaaaaagtacaataagaagaaactaaataatatccaacgtactgtcgtatcgtactgcatcaaatacgtatgttgttattcccacatcatgttattttttttgtcaaaaatttgttatccccattttagacacttatttcgttaatttatagtcaaataaactcgtaattttagttaactgtggaataaacgaaaagaagagaagcaaatttgtcgttgggacgatgacaccttttacggaattagaagttgatgagattttttttatttttttatgttttcataaccaaacaaatccaaaagctaatcaaactcccatctttttcaaaagaaggtagttatgggtagggttccatctcgattaattcgtaactctattgaaaacaaacaagtttactattcaaacaataaaaagatttttaagtagtacattttgtttcgatttgtcatatactgtatatttaagacaaattctaaaaatcatcgtttaattgtgttttactgcctaaattcagaatttataatatttatattagtttttttttatatatatctactagataaataaaccaaaaaaaaatcattaagaaaaaaagaatataaaaggagcaaaaaggtggcataatcaaactcaataatagacccacttgcagattattacatggagaaaaggggaagaacgaagagtacacaaacaaaatcattgttactactcgttgagactcgaaagattagagtcatttctctagcacaccattaatttagtagttttgaaaataaatggcactaattattggtcaagtacttactatcacatactatcaactaataatctttcataatcctctaaacatttccctaattgctactcgtatgtagaaacaagtttaagtcctttgttgtatcttcatactctctggaaaatcaacacttgtcttggtaaaagtaaattattttttaatccaaaaaagttatatagtgatgatttcacctctctcttgacccatcatatgctacaatggctgccatgtgaatgccaccttttagtaatcatctccattttcaccatcgatagccccaaatatttcaccattatcttggtttcagttgactcggataatgcctgaattattggattttactgtgcaaccaacccccatctctcaccttagttaaattatctggtaaagtaagtccaagatttgattatttacttaaaaatacatattcaagcatttctctcctttccaaataaaaattttgggttaccttttaagacaaagtgagaaacctaacagtaagaaaataaaatattcaggggtatcaaagcttagaatatcgaaaatgataatcatctggtctctatcatcggtaaaagtttttgtaattttcttctagaactcttatcttcttctattttctttttccagcttttggttggttcatgagattctttttccttttatcctatgaatccaaaggcccaaaaagcagagagagagagactcataatgacgcatgtctctcttattcaataatctcccacatacaaacaccagtagttacacaataccaaccacacacatccatatcatatcaataacatcatatacacatatcgatctgtcgacatacattacacattttaagtatgtatgtatttgtatctcccaatatgagattcggaaaggaaccctttttcagttctcattgtcactccctggtggtccagtttttttttcattaagaacataagagttatgatgatattctcctgacaaaattctgtaactcctataattgaactatacgaatctatgtgtagaatataaaatggtgctatatactactacaggttatacgataaaaaccatgtggggagattcacttcaacatacactgctgagacaagaagatctaaatgttttcagcaacccctttagataaaaggggtcactactcacaatactctcacaagccacatagaatcactcaaagaacgagctcattaaacataacaatcgaacgactatgctaccagcatttcatcctaagagttgtatttctctcctaactaccagttgaagacagaacattgaggatgagaactaaaagtttcgacctttactcatccgcagcatgaaaagcaaagaacatagcgagtagattctagtgtactcatacaatctctttaactggtttaggttaacccaagcccatctcattaaccttcaaggacttgccaaaggaacacaagaacatgaactagtttttccaaagacttactataagctgcatcattatctctaaagctcacacagaatgaccaatccactaccagttttttctaaatgtaaagtcacaagcaacgatctttaaagctcacacagaatggaagttacgcatcaagcgactaaagatcagaaagcataagaggcacaatggattgaattgcaagaacatcatagatatatataaagcccactttggtccaagcgtttgaaacatcaatagatataactaataatcactgaacagtgacaaactctcttttagaatcaaaggaactaattctcagttatcttaatcactaacctcttacaagctaaggtctttaagcatcactatcactgctttcatcatcctcgtcgttgacatggcggttactgaattcattggggatgaaaactccaggctggctcgatcttctcctagtcctcgacggaaggatattatccaaatcaacctcagccaaaggatcatcggagaaatcgctttcgtcgtcttcatcaaaaccttcgtcatcttcatcatcatcactgtcgtcttcatcatcactttcttccacttcgatcatttttccctttcccttatcctctcgcgaaatccctttacctttcctatcaacaacttcttcttcttcttcttcttcctcgtcgtcttcctcttcatcttcttcatcctcttgctcctcttcagctccaacatcgccgattacgccactctcaacctcttcagctgctttctccgataaaaccgatgattctgctccaatcgtttcctcggtggaagaattcagattctcgatttggccacttccattagtttctccgtctttggactcagaatcagcagaattcaatgaaggattaagcttctgagccttgtttgtcacattatcctggtcttgacaaaacagatccgattttcgcttcacaggaaacgaagaatcctgttgattctcaacatccgccatagatgaatcaatcttcttacttcagagactcgcgattttggtttgaggacgacgattcagagttagggctttgaagctgaatcaaaacactcgagccaatttagtttgtaaccctagaagtttttgtagggttttaccgtctctgttttttattatttggatctctgaacacatttggcccagtattagcccatttacctatcttctcaaaatatttggttcttaacaaattcaagcctaaccattagtacaattttaattttgatctgtacattttcaaaaaccggactcgaaccaagatcaaattcaacaattgtggcaattttaatggtcgagtctccagtgtgtatgtggcagtaggagaacgtgccgggggatattaaaccggctcaatgctacagtcgtaccggtttgtttttttactcgttggtatataattaaaaccggttatccaatttgacaggcagagagaagaagatttgattgaagtacagatccatcggagaagaagacagagagattgaagatcaatgacttcgagatattgggtggtgtctcttccagtgaaagactctgcttcttcgttatggaatcgattacaagagcagatctctaagcattcctttgatactccagtttatcgggtactctgatttttgctcgatttggtcttattgcaaaatttagcacagatcttatactatctcttgctactttcgtgtctacgattctaattacgatctaattccgtgagttttggtttcaatttcgcagtttaacattcctaatcttcgtgttggaaccttagattctctactcgctctcggcgatgatctgcttaaggtaaaattcatttgatcactgagtggattttatgtttttgattttaaaattcctctcttgattgagaaatttttgagatttgtagtcgaacagctttgtggaaggagtttcgcaaaagatcaggagacagatcgaagaattggagaggatttctggtgttgagagcaacgctcttacagttgatggagttcctgttgattcttatctcaccaggtatttgtgattttccgtctcagaaggagttaattgctaatttggtggtgatcgaattgttaaagaacgaaacttttgttgattggtggactcaaggtttgtgtgggatgaagctaagtacccaacaatgtcacctctgaaggaggttgtggacaatattcagtctcaggttgcaaaaattgaggatgatctcaaggtattgtagcttaaaccttttgttttattgtaaaaaaaaaggaagcttcacctttaagcagaaagattagctgcatgagaccgatggtataaaatttgcaattcgagtttcttacgatgatcaaatgaattgctttggttcaaatggtggtgttaacgactctgattgcacattttattcaggttcgtgttgctgaatataacaatatccgtggtcaactcaatgccattaaccgaaagcaaagtggaaggtaattcttttcttctcatatttatactataagagcacactagaaactgtgggcggtttagcaacaacaaattttgaagtttgttttctcatctatctgatttttgcttgaagcatgatttaccacgtgaacgttttagaataatacaaagttattttccagaatattgctgttggtctttatcgatatctcagctttgtttagtatctttgtggcattgtggctgatcgtcctcctttttgtctcagcttagctgttcgtgacctctcaaacttggttaagccagaagatattgtcgagtccgaacatctcgtaactctccttgcagttgttccgaagtattcccaaaaagactggctagcatgttatgagactttgaccgattatgtggtaaatttgttgacttgctaggtttattgaatagaccagtggtaacactactggtttgacgtaccgtgattttaatcaatttatcctaacttgtttcaggttcctaggtcctcgaagaaattgtttgaggataatgagtatgccctttacaccgtcactctctttactcgtgtcgcagataatttcaggattgctgctcgtgagaaaggattccaagtgagtattctgttcaagttcctgatattacctctagagttacgtagaagttaaaaatgattacatgctagtaggagtgaaatttcctacgaactgattgtattcatggtgcaagttcagaaatttggtttagattcaaagatttgttcatcatatattgtacaccatcctcttctaggtccgtgattttgaacaaagtgttgaagcacaagagactcgtaaacaagagctagcaaagttggttcaggatcaggaaagtttgagaagctctcttttgcagtggtgctacaccagttatggagaggtaggtatctacacattgctctgaatagatattctcttgtaatacaatacctgaatctgttttgatcttcggtctacatctgtaggttttcagctcctggatgcatttctgtgctgtgcgtacattcgctgagagcattatgagatacggtttacctccggcgttcttggtaaattaggactccaagctatgctattttagagaattcctctaccctactatctcccttaccaaattactttctcttgtctttccaggcatgtgtcttatctccggctgtgaaaagtgaaaagaaagtacgctccattcttgaacgcttgtgtgattctaccaacaggtatgttaaaactctctacctatctatcgctctaggtgtaggatacatggaagctgtttaacatcaaccttcatattgatctggcgaagaaaaatgtactgatagttatgaccttaataacgaaagaaattgcagaagtttgaggagaaagtcaggaaccaagtaaaaccaaacttgtattagcatgcaatgcgttcttgaggctaaatctattaatcagaactaagtcgctttagttagattcatctattgatgtagtgtagttcgatgagatttcaaattgagcgttttgggtctcattgtatgaaaacaatgcagtttatactggaaaagcgaggaggatgcaggagccatggctggtttagctggtgactcagagacacatccttatgtctccttcactatcaaccttgcttaaaaatatgatgagagatgcttttgatgccacttctcctctggtcttctcatctgttatatttgtttgtggtctatagatttcacatttatttttcgtaacatattttgattttcataaataaggtggaactcaagagagatgttgctgtaattttatttggccggagtcttttagattccggcgagtttcagacacttgtggaagacagaagggttatacagttgttaaagcctttttgtcattttgtgacatggttgatttatttatatcatcactctgtttcgtttttgtctgaaaaatgtttttggcttctattggtattttcaaaccgatgttggaatgatctggagattagcatttagcaatcatgcaaactggtaacatttgtggctgagtgaagatgttaaattgggcagctgatgttttatacttttaactaaaaattgatattcttactactttagtttcttgtaagttgtaacatattacagtatctatcttttacatagtagagtttttctaatctcactttaccctcttacaatatttaagccactgcattttctaattttggtttcttaaaacgatttttcttttgttgttttaacctgcctaacgactataatcgttttctctaaattagtcatggttgcacacttgtattttatatgaacaaaatattcatacacataagaataacagtaacaacgtagtatatgttgaagttcatgtgatgaagagtaaaacagactccaagaaggaacaatgaggctctaaaagcgaaccacaaaagattacaacatcaatagtgtagaaacctaacaagtattggttcattaaaacatagaaaggtacagatcccaacaatggctagaaccaaggaaatatcaggatggagccgcattgatctgcctgaaatcttcccattaagctggcctgagcttggaccaggcgcttctggttctggaacaggagatgtcgctgtctctattggccagtctttggtcggagaagggaaaaatgaagacatatctggtgcattgatatacggtaaaacagcaggagaagctaagattgtggattcactgcaaaccagagtccattgaaccgatacaacgatcaagagaaacgcggaaactgagacgctagaaaacagagccatgggtgtttctttttcttctgttctgcacaagaaagatattttaccaagtaagtataaataatagaacagagaagaagacagattcttttgttcccatgtgtgagtgtgcgtgtcttactaagaaacaaagaattgcaatgaatatgttcacggaccagagtatgtgtccttaattgtttcacatgcttatttttggtttcttcctcttaagtcatgtgatttcatttacctctttttcacttccaccactaagggggtaacaagtagaaaccttaatgatcttgaagcataattctgaagtaaatgagaagcggtggagacttcggcaactagcaagattgatgatatggcaatgagctttttttttttttgtgatttcaagcataagaattacataagaggaagcttgcaaatagaaagaatcaaacagaacaaggtagtgaaacatcagcattaacaaatctttagcttttctttctcaaaacaaacgtacaagaggctcgtggcgggagcatgtaatctgcaagcttgttgatcttcttctgcagactcaaatgacttgtgaaggtcttgcaataatttaccagctcgctgtgttttcgagctttcagagagtaaaagaatttgatgatgatgaggctacaacagtctaagatgagcggtgtcatttaaccgctttacctgccacccggttttccacgaatgctgtaatacggtcacagaggaatcctccacacagatcttatgtgtcattaccgggctgcatccaaggataccggtaagaagacactttataggtaaagagtgagtgaaaactccaatgcaggttgagagttgagaagaagaactcttgatgtttatatcacctaggtgttgttcatcattgtgattactaaatatctcttcactaccctcgtgatcaccagttgcattcatcacctgaaaccggctcttcccagatttcttccttgtaagaattgggcgatgaatagaagtagctaacgagaaccctctggaatttgtgtgctgtgtagatggaagaagttctgacctgagcttctccgaaagtcctgagactgtcccattcagaaactgaaccatccgaaactctacttgtctgagtgattcaccagatggagctgagaaatcaggttggcatctttctattaaacttagagtttcaggtgtgtaaatctctgaccgatgacagctttcccagtcccctaaactcatctcaaccacagcatccgagacttgcaaatgctcctcaggaaaattcatttcctgcaacaagtatcaatgcagcattcaatccagaaatcatcctacaagcatcctaactagttccatcgcagtcttaagagattcttactatatttgtttgttcttattactaatccatcacgcaacattattgaaccatgaacaacactatagagtcttaaagttgtttttcttagaatcatcaggctgattcgatctaacaagattatagaatgatttaggttggtttcgtttcatgagcttcctagctactatactaatacctaattttgaagaattggattccaatttcacagccttagatctagaattgagaaatcgaagagtagagactgtacctggcaaacagaaacagccatggatctagctcgatccagaggcgaagagaagacggaggtgaatcgaacaccttcagagtttaaaaatacggctagagctctcgcctgacgtttcccgttgggtgtgagagtagccacgtggcatctacctccaatcagatcaggcctgagattgagatcacactcgccgtggctgatgaaatagacttccgtcacggcggagcgatcgtgttccgcggcggaggagatacgagagaaaagaggcggagaagaaggaggaggtggcgcgaggacgttgtaaggatcccagactttaatggaaggtccgattcgaggagttccaagagaagagagctgaggagagagtggagaagcagaggcgtgacaaggaagcatctcaggctcttgctcgagaactttcttgaccaagagattatccagctcgattcttctgttattcaattcgctctctgcttcatcttcttcttcttctacttcttcaccttcgctctctgcttcatcttcttcttcttcttcttcatcgagtaattgcgaagactgtgatgaccccatcgcctttctcttgagtactcggaaaatgcagtgtcggagcttaacgcgaaagacttagttagaaatttttcagatctgatgatgggtgtgaaacctccaggtcagttagagggttcagaatcttaacgacccggcccaaaccataatttatgttttttactacttaattattaaaacgaaaattcaattaaaatgtatgcaactaagaaatacaaatctattcaaaatgaagtatctaatattttgtatctattaatatacaaaatatatatatcataaatcacgataaacataaatatatatttactaatcttgatagtcattaatacaaactgattatctaattaataatataaaattgaataccttcaatattgattatatataaaaattacttaatatttttttatttcacacatagtgcagatatgtgaaatagtttctctcaattatattaattagccaataagcttatttatacaagaatgttacttgcatagcaagcaagttctttagatttatgataatactaaatctacctatttaataacaagaatatattttacaatatgaattttactttcaagtcgatctcgtaatcccctaaatctcctaataaaaaaatctagtatttataaaagtgggatggagagtagagaggattcattcatatcaaaagagaagaaatcaactatgaaaaaagaaaaacaagcgattgcatcacaaagaaatagaagaagagtaattaaaaatagaggaaacgggaagcgattgattgcatcattatcacaacgaaagagaagaagaatacctagaggaagaggaaacgagaaggcagtgtttgcaccatcatcactaccaaacgatgttgtagaggaaatcttcttacgacttccggtgaaagcaataatccaactaaagtctctctcaaaacaatggagatcgacgatcgagtctcgcagttttgaagagagacacttgaagatcgtcgagcgatcacgcgtggattttccacaggtcatggtcatgtctgaagaatattccttgaaaggaagtaaaggtaatcagcctcgtccagatacagacattggttttagtacaatctgtttggaatcggcttctattctgtcctccactcttatcactttccctcaaggatttcaacaccggatctatgcttctgaaagctgtgacggacttttctgcatccattccctaaaaacacaagccatatatgtagttaacccggccactcggtggtttcgacaacttcctccggctaggtttcagattttgatgcaaaagttataccccactcaagacacttggattgacataaaaccagtagtctgttatacagcattcgtgaaggccaatgattacaaattagtgtggttgtataattctgatgcctcgaatccaaacctgggagttacaaagtgcgaggtttttgattttagggcaaacgcttggaggtacttgacttgcactccaagctatcggatattccctgaccaagtaccagcagctacaaacgggtctatttattggttcacggaaccatataatggcgaaataaaagtggtagctctcgatattcacactgaaacgtttcgtgtgctacctaagattaatccggccattgctagttcagatcctgaccatatcgacatgtgcactttggataatggtttgtgcatgtcgaaaagagaatcggatacgttggtccaagagatatggaggttaaaatcatcagaagactcatgggagaaggtttataccatagatttgctttcttgttcttcttcttctttatctgagttccgcgatggatttaattggacacgaaaagatttggttgagccatccacaccagtggcgatatgcaaggacaagaagattctgctctcacatcgctatgcccgcaatatgatcaaatacgatccccaaataaaatctatcagtttaatttaccaacctcctttgtgtagaagatatgcttcttattttcagagtttgatctctcatatataaaatgctttgatgtatttggaagcatgtaatgtaagaaacaaagcattaattgtttggattgttatattatccgatagcatgctgttattcataaatcataataaaccatacttatttcgccaaatgacactatacttaccaaaaatcatactactttatgaaatgatacagatttttcaaaaaaatgaggacgagtattttcgttaatccacacaaaaatcagtttcattctgtgtgtggatgtaaaaggaagatgaaatatagattttatcttaaagggaccattgcctcgttgttaaaaaaaagggaccattgcatccgacatcttttatccgtattaatcttgaaatgtttattcaatatactttgttgcaagatttttttttattcaatatacttttgttattcatgtcaaaaaaaatttgattaatagccaatctatgtaacaatctaaacacaagtttgccgctacaattaatatgagtctatgacacacatcacaaagttttgagagattaaaattctttagtcccaaatacttcaaatatagaaaaaaactacaatttttcttttcaaaatttgtttattttacggtgacaatttttatgattgccaaccaaatcccacattattaagtttttcaaccaaactgaactgtatacttattttgattattaacggtcggatttagctttaactaaatcatcttcctaagctctatcactgaaataattctgcagacaaaaaaaaatgagagagaggtggcaaagatgaagtggaggtgagagacggaaagcaaaaacaatagtcacgagaatcaacaccaactcttaaaccaagatagaccaagaaaccaaacagagtaaataaatggtggccttgacaacattgaaatccccaaaaatctcaactttttagggttttcgagctctgaaatctctctatctttcttcttcagatttctcacttttttcttcttcataagatcctcgtgattccactttataacgtacgcctcctttcaagaaaaatctctctctatattatctacgtttctctcgccttgtctccttttgaggttccatttctacttctctccaaaattcgaaacttttcccactctctctctctctctactagtttgacatgaacagcgacggtgtttggcttgacggctccggtgaatctccggaagttaataacggtgaagctgcgtcttgggtcagaaacccagatgaagactggttcaataacccaccaccaccacaacacactaatcaaaacgacttcagattcaatggtggctttcctttaaacccctcagagaatctgcttcttcttcttcagcaatcgattgattcttcttcttcttcttctccgttattacatcctttcacactcgacgctgcttcacagcaacaacaacaacaacaacaacaacaggaacagtctttcttagctacgaaagcttgtatagtttctcttctcaacgtcccaaccatcaataacaacactttcgatgacttcggctttgactctggtttcttaggacaacaattccatggaaatcatcaatctccgaactcgatgaatttcactggcttaaaccactcagtaccggattttcttccagctccggaaaacagctcaggatcatgtggattgagtcctctgttctcaaacagagcaaaggttttaaaaccgttacaggtaatggcttcatctggctcgcagccaactctgtttcagaaacgagctgcaatgcgtcagagctcgagtagcaaaatgtgcaattctgagagttcttctgaaatgaggaaatcgagctacgagagagagattgacgatactagtaccggaatcatcgatatctctggattgaattacgaatctgatgaccataatactaataacaacaaaggtaagaagaaaggaatgcctgcaaagaatcttatggctgagagaagaagaaggaagaagcttaatgataggctttacatgcttagatcagttgttcccaagatcagcaaagtaaccaaaaagattcttccttttttctctttgttctccttaataacttcttgtgtcactaattttgggttgcaaatgtagatggatagagcatcaatacttggagatgctattgattacctcaaagagcttttacaaagaatcaacgatcttcacaccgaacttgaatctactccaccgagttcttcaagcttgcatccgttaacaccgactccacaaacgctgtcttaccgtgttaaggaagagttgtgtccatcttcctccttgccaagtcctaaaggccaacaaccaagagtaagaataagctcaattgctttctagtggacaaagctgtattctttaattttcttagtaacgcttctttgttttgatataggttgaggttagattaagagaaggaaaggcagtgaacatacacatgttctgtggacgtagaccaggtcttttactttccaccatgagagctttggataacttaggattggatgttcaacaagcggtgattagctgtttcaatggttttgctttggatgttttccgcgctgaggtaatatagttgttaagatgctatgctgatcactgattagtaaaactagcagtcaaagaatagttatttgagagaatgattagtatacaagtaacaacatgttttgtgtttctaatcagcaatgtcaagaagaccatgacgtgttacctgaacaaatcaaagcagtgcttttagatacagcaggttacgctggtttggtttgattgcgaagcagaaggaagcatctgtgtggaacagagctagatctaagtccttgttctgttttagtcagcaattttcttacttagtttcatcaatttcaatcatgtatggaagatgataactgttttattttagctatgagaacatgtgtttggggaacaatagttgcaacctttgagcaaaatgccattgtttctcaataattctactttgcttttcatttatatgttgtttgcaagaagagagcaatgttgattttcattgataaaacacacatgagtctgtcatgagaaaaggctaaacaaaatattaagaaatgcacaattcataggcaaacgctctgatatatcaatttttcagaacagagatgaatctctatgtaaaattcatattctttataaatgtctgagcttggttcagtttagtaagatttggtttgtgccgtgggcgactgaagatgttaaagacaaaaacataatggaaccagataaacttggctaattggtaagaattaaaagaaaatctatggtataaatcttctcccatgtgtcttctgatgatttcttcagcctccaaatattttggatcagcttatctccttctcttttcgacatgcacaaagcattatccagagtgtatatatggctaggatctaaactagcaatagcgggaactatctttggcagcaaccggaatttttctgtaatgatatcgaaaactattactttgatttcagcattatatagctctgtgaaccaataaagcgtcccgtttacagatgctggcttttgggcatggtatattcgataacttggcgtgcaattcaagtacctccaagcgtttaccctaaaatcaaaaacctcacacttggtaagtccttcgtttggactcgtggcatcagaatgagacgcattagaattataaaaccacacttatttgtataatttgcatccatctctattgttttgagagagactttagtcgaattagtgatttcacaggaagtctcaagaagatttcctctacaacgtcgtttactagatagggaagtgagaaatcataattcatgagcaaagcttttcttgatgcatttgcaacaccttaagaatatctgatggttaatgattttaatcatgttcattgttggataatcaacatgtccaaaaacatgaggtgataatatgatccaacaaaagagagatttcaaatatgtaatcaacttaatgtcattgactttctgcaatgagctcaagaagagcaattgctaggcaaattttgaatctttggatatgatgagtaggctttttgaactttgtcttgattttgatgtctaaaagatatataagtgtagcctcgttcattctaaataacaacaaacgtataatggaagcaaaaataaaaacacacataatcggtaaaaaatacaatgagttctttctttcatgcttcaaaacgcatcaaaataattagtagtattttatttaaatatgagaaatcaaacttggaaaataaggaacagatcttaaacacaaaaattgtctgaaaaatgagcaaagagatcctgtttgggaatttaccagattgcaggtatagcgatgtgagagtatgatcttcttgtccttgtatatcgccaccggtgtggatgactcaaccaaatccttttgggtccaataacataatctggtcaaattatatccatcgagaacatggaaatggcaataagaagaagaaagcagatttatggtataaatcttctcccatgcgtcttccgatgatttcaacctccaaatctcttggatgatcttcttatccccttctgtttcgtacatgcacaaactattatctataatgcacatgtcaatatggctaggctctgaactagcaataaggctaggcttaggcagcaaccgaaatatttcggtgtgaatatccaaagctattactttgatttctgcattatatgtttccgtgaaccaataaagcgtcccgtttgcagatgctggcttttggtcatgatatattcgataacttggtatgcaagtcaagtatctccaagcgtttgccttaaaatcaaaaacctcgcacttagtaactctcgaggcatcagagttatacaaccacactaatttgtaatcagtggccttcacgaatgctagatgattgactggtatcatgtctctcaaagtatctagagtggggtttaacttgtgcataaagatctgaaacctagccggaggaagttgtcggaaccaacgtgttgctggattaactacatatatgtcttgtgtttttggggaatgaatgcagaaaattccgtcacagctttcagaagcgtagatgggatgatggaatccgcgagggaaattgaaaagagcagaggataaaaaactaactgattccaaagagatagtcctaaaactaatctctatgtctggattccatttttcagtgatgatcatgacttttggatgatccacatgtgatcgctcggctattttcaagtgcctctgtgagaaatagcaagactcgagcgtcgatctccattgttttgagagagacttaaatctcattagggctttgaccggaagtttcaagaagatttcttctacgacatcgtctggtaatgatgatgatgcaatcattagcttcttgtatcttctctttctttgtgatgatgatgatgatgatacaatcgcttgcttttcttcatccatgaccattgtttttcttcttcttattgatacgagtgaattggttttgtctttttatacacacacttatctccaaattctactctgttaaggattgataaggattagccggttatgaaaaaggaagtttatcatcccacaaaatttatgtttaaattaaaataatagaaaaggaaataaaagccaatttcgactaaggaaatggaaatacatttttttcagaaacaatttatttattctctaatttgagtgattttagcaaaaacgaaaaaaatacaagatttgctaacaaacaattctgattggctaaaactaaaaccaagacccaacaaaaaaaaaaaaaaaagacactagaaacgaattgaaagtttgaacctatatgaattcggttttcagcagtcttgtttaaaacacgtctcaagataagttttatagaatcaattatcgaatagttcttctctatagtggagaatactcgtgagataaaacagtaataagtcaaatacagaatcagatccttttagtgacttgcttcgaatttgcgttcttaaggttcttcttgtttttgagctctaacaaaaataatttatttattttcatgtataaatattaaaactgattatatagagagacaggtgatagttagcagtgaatgctcgttggtacaactcctcattcttctccgcaaaaatagcaagttatttaacaaacaaaaaaattcatataaacgattttatttttttgtgacttttgagattcgttaattctggaaaatttgtttattttcaaaacaagaatatggattcgtcataaaagctaggctatgatcaacatgtttcatacaaacaagaacagggcttttcaagaaagtagcattctctgtttctgttgtctcaatcccttttgattttttttgtgttggcagattcatcaaatgtcggttctttcttctcggacaggacgagatcgtcaacgttacgacaacaacttccgtctcgtttctgggtaccaacaacttacacaacaaaaaatcattttgttttgtttttttgtttcttgcaaatcttgaaaattttcaagaaaccccaaaaatcagaaaacaaaattgttgattttcttgttgtttgtttctctatacattatgaacagatgcattccttataggctgatgaaagctgacgaaactgaagaagactcaggtgttgactttgtaaacaaacttgaagttcttatggtttcatctcctaatcgtcatgatcttgtcttcccaaaggtctttttttgaattgaaaaatcatcctctgtactatcatttgtaattgctcatgttaatttgttgtgtatattattatcagggaggatgggaagatgatgagactgttcttgaagctgcttctcgtgaagccattgaagaagcaggagttaaaggaatacttagagtaagtttacacctttattaaacaaaacactaagaaagctattttaaagttttttgaattagatgtgttttggtcatgtttttgtttataggaacttcctttaggagtttgggaatttagaagcaaaagtagcacagtggaggatgaatgtttaggtggatgtaaaggatatatgtttgcattaaaagttaccgaagaactcgaggattggccagagcgaaagaatcgtgaacgaagatgggtaaagcttaagattcaaatgtgtagttattcatataagtaagtacaatgttttaactctgagattactcgaaaatgtgcagttgactgttaaagaagcgttggagctttgtcggtatgagtggatgcagagagcacttgaagagtttttgagagtaatggaagatgaaagaagattgagaacagaggaagagacagtgcatgattcttcaaagctagaggaggagagtcaaatagatccttggtactgttttgtagttaactagtttttcatattctttagctaacgtaaacaaattgaaaaaatgagaagtaaagtgactgcaacacatgtgacatgatataatctcaaatcatctgtcttgaatcttgatatctgtctgtttgaagtgataaagatagagttgtctttatatgcaattgggacaccaaatgcaaaaagacaaaggacatagaagaaattacctaatcacacacaaatcaatgcttaaggcttgacttcaaaatcaactgaatacacttaagaatccaaatccctaagcttatgtcacatgtttagttaggtttcttgacatttgtacagtttttgtctgagtctataatgacaatgtccttgtcacaacttggctttgctccatacattccttaatatgaatcacctcacagactaaagtgtggaaaatattaagcaaaaggacaaaaatagagaaaatatgaaacacttccttgtttctgctgacacagtttacgaaggagaaataagtctttggagttaaatttttgaactcccaacagtttccttaaatttaatgccaaatccaaaaaggcatcaatcaagttcacacactcttttgctcttcttactcaatatagagtttatatagcagcataaggaacctcaaagctcaagagacttaaagagagagaaacattgatctctgaatattgtgaacatgttgaaatcaagtaacaagagaaaaagcaaagaagagaagaagttacaagaagggaagtaccttggagtgaggagacgtccatggggaagatatgcagctgaaatcagaaacccttttactaaagaaagacattggcttggaacgtttgatacagccgaagaagctgcttttgcatatgacgttgctgctcgatccatcagcggctctctagctacaacaaacttcttctacactgaaaacacctctttagaaagacatccacaacagtctttggagcctcatatgacttggggatcttctagtctctgtcttcttcaagatcagccttttgaaaacaaccattttgttgctgatcctatctcttcttctttttctcaaaaacaagagtcttctaccaatctcactaacactttctcacattgttataatgatggtgatcatgttggccaaagcaaagagatttctttacctaatgatatgtcaaacagtttattcggtcatcaggacaaagtcggtgaacatgacaatgcagaccatatgaagtttggctcagttctcagcgacgaacctctctgctttgagtatgactacattgggaattatcttcagagttttctcaaagatgtcaacgacgatgctccacagtttcttatgtgagcttgtattaccgatccttcaatttatgtaatataaaaagtattgtatctttctttagtgtcaaatgcattcccaaaccagagttgtgtattaagcagaggatgtaatatgtttgaatcaagtttattactataaattatagagcacaaatacataataaactcaggaactacaattatacattccgaatcatgtaacagtaaaaaataatggagcagacatcaagaggttgttgagtcttcacttccagttattggcaacaatgtcagccaaatcaacgactctctgtgagtaaccccattcattgtcataccaagcaatcactttaaccatatcatctcccataaccattgtgagggaagaatcaatagtggaggatacatcagagcacctgaagtcaacagagacaagaggctcatcacagacgtcaaggatacctttaagctctttctcagctgcatctctgaaagcagcattgacttcttcagcaaaagttttcttggagacttgcacgactaagtcaaccactgaaacgtttggagttggcacacgcaatgcaattccgttaagttttcctttgaggttaggaagcacaagagccacagctttggctgctcctgtagatgttggaacaatgttcaaagctgctgctcttgctctccttagatcacggtggctcgcatctaacaacctttggtcaccagtgtatgagtgagtagttgtcattgtaccctttatgatccctaacaagtttaacacacaacacaatattactcagatttttacaagattgcaacatagcaacatttgactttcaatgagacgcttaccaaatttctggtcaagaaccttgacgaatggagcgagacagttagtagtacaagacgcattgctgatgatcgtatcttcatggctgtaaagttcagcattgacaccaacgacataagttgggatgtcaccttttccaggtgcagtgataagaaccttcttggctccagcctgaaggtgcttcccagcaccgtctctgtcaacaaacactccggttccttcgataactaagtcaatgcctagttccctaaacatcatcaccaggtttagatctaactgggttgattcaattcaaatgatatgagaagtgttgttttaacttacccccaggggagattagatgggttacgatcagatacaatcttgatgatctttccatcaacagagagagctgagtctcctgaaggtttgacatcagcgtcaaagattccaagagttgagtcgtatttgaggagatgtgatgcttgtttaacaccaccagtgtcgttaatgacaacgacatcaagaggagagtccttacgaccatgccaacacctcaagaagttcctaccaatcctaccgaacccattgatggctacctttatcttggcctcggtcacccctttcctgtatccaccattgcttctcatctacaacacagagacagaaaaaaaaaacgtatatggttaatcatggctgatcatgccatgcagccttgttcatcatggatagatctacaatggtggcattagacacaagaaacagctcttgagtttacaagattgcaccataagatatataacacaggagcaatagagaggagtgggtgaaaaaggaactcactgcagaagtttggaaactgacgaaggaaacaaactcatcggaagaagatctcttggcaaagggaagagcagaggagtttcgaagtcctgagaactcagaaaaaccctgaaaaagtaaaacatgagagtatttatgagatgatgataaaacttgtgtgaagggcaatcagataatgtggttaggaagatgaaacaaaacctgaagagatggtttggccacagagaaagtagccgaagccatggctaccagagagagaagcttgttgtatgatgtaagcagaagaggcagagagttgtaatataggaaaatatgaattgctgagttggaggcaaagaagatgagattctggatagctttgtcattcatttgtatggttgtggttttatctctcttccctcttcacgttttctatgattcacacatatttttgattttctcacttgggcttcacaagtggatgggcttctccatcatgtggtcacatttgatctagtgactcgacgacatagcttttctgacatctctatgctgcagatgaaaatcactgacacattaagaagtgtgacccttcttgctccttcttagccatttaaaagattacacattttgtctttgtaatctcaaagaaagatgtgtcattatgtctctgtacctttttgttttgcgcattgactttatagaaagctattccaagaaatacaataggtactgagaggtgtaactaactctagcagtccatagctctaatcaaatacaaaactaaacctaatcatccacaattgaggtacacacttcccatggatcatactgcaaagattgtgctacgagagaaaaagcaatgaagcaaaaatctagatcaaaggattatcctttcttatcaatcatacatcaataagagtcagtgctaagctttgcatcttgagtatagcaacaagatcaaacagattcattaattcgattgagaacagtctttacatcttgaggatagtaacaagggtaacgagacccctaatacgatagaaaatgagtaaaatctaatctgacaagagatgagaaattctttgaaaagatcaaaccctgagaatttgcagcttagtagagaaagcaattgcgacccaatcaggctgagaagaggaccactgaagctgctcaatctcagcaccagcagtgtaagctagaatagggtcaagaccaccttcaacatgctgtcccatggatgaaatatcccaaatcaaagcttgagaatcatctccagcagtacaaatgtgacaagagctatgaggagcccaagcaatggcattgacactagcttgatgtcgttgaagctcaaccacaggaagagccggaaaacgaatgtcaagcaccacaactttagcactgtccatgataatagtagccatgtacctaggatcctgtttgttccaaccaagacgcactaaaggagtatcaggctcggagctctcatagataatcgtcgaatgttccttatcacgaagatcaaacaccctaacggagccatcagctgaaacagatgcaaaaacaccaacaccaccccaagcaatatcaaaaacttccttatcatgagcaataagctgagtatcaacagcttcacgctcaatgtcccagatagtacaagtcgtatcagtactagatgttccaattcgacgtggctcagcttcattccaatcaaaagaagtaagaggaccacaaaactcactgttcttattgctattgagacaagatttgagctcaacacgggaatgatcatcagcgattctccataaacgaaggaaatcacttgaagtagcgagaagatcaggtctttggcattccttgtcaggtatgaaaatggtcttcgttggtggataaggatgctcaaaggagaggttaggatcggaacggatctcaccattggattcatcgagctgcacaatctcgacacggttcgggtattgctcgaggaggctagtgatggcgagacgatacttcttatcgcgacgaacgctccaattcattgcgtagatgtgccatggcgcttcgtatgtatagatctctgatcgcttctgctgctcatcggaaccatcttgaatcggatcgctgctcgttcccatcgtgaaatcgattccgagcaaaaaccctagaaaatcgcctccgcttctatcactcgctcaaaagcaaatggatattccagtcatccagtttattttaataattgacgaaaacgacaccgtttaaggaaaacagagtaacatggctaacatcgttatctccgtctcttcttcaccaatgattttctcggaaaatataaaaccagaagaacaacaaaaagatgtttaaaatcctcaaaaattacaacacaaattgtctaacagaaagaaagagtcaagctttttaatgttctatagaaaacaagaaacttaaatctctcttctttgttgataaaagaccatctttatgccacattttccctcactgtatcgatctgaaaccatcaccaaaagttttcccactttaatcagaatcttcgtaaacttcagtatctgataactcatcaaatgtcctcatgtcaagctggtaacgtaacataccaccaatcccaccaaaacctctgcaaaactgtgacccttcttgggatttgttagtcacaaactcaagagtgcagccgaaacgtttgtactcatttgcaaaccattcgagtagaggcatcttctcctgtacttctagctccgcgttagtctctgaatcatggaagttgcttgtatcagactcttgatctttcccaaagtgtttcaccaccatttctcctgtcgtactgttctttagctcatacctgtttatgtccagattctcccacacgataagggtttcgatagcacccatttctagagcctttagagtatcctccacaccgaaaacgtatttcccggtatcttgacttatctcctcaaagtacttcccaatcagtttcttctcctgtatgaacttcacattggatagaatctcagcagacagctcaatcgcttggttgaaaccgttttcacctccgtaagaaacatcaacaacattcaatatcttagcttgaagacgaggatcaaacaactctgattgactgagctcagttttgaaatcagctgaaccagcaaggatcagaccagagacattaggctgactcgtagctggattgatgtaaaactgtgtagcaagctcagcggttttcctaacataattgtgtctcttctccatcctaagacgggcaaaacgaagtgcagactgtcctcctcttccgtgcttcttcgggagatcaacagtaaacttatgaagaacctctctagtattcccactcaaagttccaaacagtgtcccattaccatccataacaatgaaaccaaacttgtcatcagactcaagaagctcgttcaatgcctcagtatggaacttgttgtcacaaaggtacaaggaagcattaatcggcctaaagggctcgaaatcaaacgtcaccttcttctctttaccgtcatcattaacaatggtgccggtatagagaacaagaccattagtaggaaccttgttgtaaagcttcaacctttgttgagcagaagtaatggcagacaaaacagattgacgattgactcgactcttaatgtttgaagcagttccatattcatcaccaagcatctttgtgacacgagatacttgatcacgaggaggcataataagagagatcatactcgttccattacctctagctgattcaagtcccttgattagtttcttaatcttccagatctcgatgttcgtatccgcttcttctgccatttttagcttctctcgaggtcgaagatggagaaggagaaatcaaaaagcaatcccccaactacacaagaagaacaaaatcaagtttcaaaaatgagtactttgaacagcgtgaatttcggacacaacactacgaattttggtttcaagtgaagtaaagatcgaaacttttgaataaacgattacgatgaacagattgaatccattatgcagagagattgaaatcgagcaagcaaaacgtaagctcgtacctctttttctctctcctccggcggcctctctcctcccagaattgactggcctagggttttccccaaattctaactcccaacccaatcacgtgatactcacgtggcaaaccacatggaaagcgagctaatgggctttatcttaactcaaaaggcccaattacgtgaaaagtggaactggctgtagtctacattaccaagacgccttcaaactgcgtgccgtttattggtttgcctcatagattcaaaataaataaatgagagttaaatgttaacaatgggatgtatattattatccttctcatcagatgaatctaaaagaaatggctcaagattcttcatgaggtttcttttcctctcctactgtacattagaaacagagcatcgacagaaatgaagaagatgatggatcattgccctcattattaaggcaacaaaataaaataaacattacaaaaaaaaaaagtttatcgattgatttattcatatgatgtttggatttggatcgtttcgatgagaatccgcaaaatctctcactaatcgcttcaatgttcgaccgtgtttcccttgcatatgtcctcctgaactgttattgcttccaaaattgcagcttttgttctcaagataatcgatccctgcacctcctagagcttctgaccattccctcactatgctttctgcttctccttgctttagatactcgctcggaagtgcccaaacctgaatacaaacaaacaaaaaaaagccattagaataaacaacacagaggcggagtttggtgttgatgtgatcacaagagaaagagagaaaccgctgagtttagccatccttggagagatttccaacacaacattcctttccatgaagtcctctcacataaactgcagattgcagctaattgttgcagtatcgttgaacacttatggacctaaaacaaaaacagaatcaaatatcataatccatcaactactttttgagagatcttactcaaaaatcttacccttgacatagctgcaactccaagtagagcatagaccagattagacaaaagtccctctccacagtgagatacgacctggacagagaccacgctgaatgatccatctgatatgctattcacggtttcgatcatggaagaaagtgaaacctccaagaaacctataaagttcgaaaacattgtgttaagtatgcttataaccaaaaattaatgctgttttcgtttgtaaaccactgcaaccttacctgataagtatgacattgcagctaaagcagcgcctctgtgcatagctgtacaacatatagccgctttgtggaaagaaatttcaagaagtgttccagaagtacccaacaactcctgtttgatcaatataaattcaccccaagactccttaagaaattatgaactgaaagttatactttaacaagcaaagagtggttgcaaaccttatgacaactacggataagtgctgatgcgaaattcacatacgcttccaccaaatcgggttcttggtcgcatatatatgaagaatttatgcccatcagtgatgatgcttgagtaaatctttcaaacgtagtgataaataaggacccatattcctccttatgacaaaattcttcggcgattacacaggctgtgataacaagttcgtgaaaaggtgaagttcagacaactggctggtcaataaactaagtttgggaaataatttatccaagctcgccaataaaaactgtgacaaatgaatcaacgctagcatctcaaaagatttttctccaaaagtggagcctgtacctgaattaagaaaccctcacctgttcttatgtaacattcttggctttggaatgacagaaagtttctcgatagacaatccagtacactaggtagtaacagcataaagtgctcacctgtgaataatgcaaattttcacatgttagtgaaacctgcctactgtgcgaaaacaagaaattttcacaggtgtaaaggacgctttggaataaagaaatgttccaggctaataaaggcacaacgagtcgaatgtagcggaataaaatagggagatgagaagtttgaaacctgacgactgaactgccactgaaagagcacggcatgctgctgcagctaaactaccactctccatgtgttcagacctaaatagcttctccaaaatgggccagaaaacagtcaacaaagaaaggattggaccatctgccacaggaacagatggcagagacgttgcaaggtgactgaatacagttcctatcctgattcatgaaacgagtgaagagcaaagtcatcaatatgatattcttcccaaatttgagtacacctcaaaagaaaactaccagagagtgcaagctactaaagaccatggattgatcagagtcattaaatctattttgcgcccggttaccagaaaaatatatataacacaaaattatgacaatgttatttatagatgtcttgaagtccggacgcagcaaaaagttcaccaaaaagctcctagattacatcgcaattaagcaggatagaaaatagatcagtcacagaagcagacctgtaaagacctcttgtaacagagctcagcattcgtgtataagtggctggactttgtctaccagaagactcagcgtcttcatctacctaaaaccacaaaggtattagtccaaatctatctcagaagtgcatcaaggcacggaaacattagaaaataatcccagaaagaaaaagatcatcttccaggtatcatttctgtactatctatttatttttctagttactagctgagatattgatgaatactggcctcagagaagtatgtggacaattagctgattattttttcattaatgcagagcaaaagcaaagagctacttgtacaagaaaaagaatgagaaggagaaccttgaagaataactctttctaactgaacaatataaacacttacaagtttcgaaagaactccataacttgacgaaagcaattgagttaataatttattttgtagctctttattagcaacagagccaaggatcacagtgatagcggtaatgacttcttcttcatcttccaaggtcaaatcccactgctccaaacactaagaaaagtaaaaaatatatataaatataatgattcaggatataatttcagcgtaatttgaagtttgctttgacagttaaaaaaagggtctgattaagctgatacctctcctatccacattaagatatctaaattcgatgtttcctggattacagcaggagcatcctcacaaattttacgcagagcagaagcacaagcatgtgaacaaataggttcggaaatccctcctgcgagaaataatctgaaaccagaaagaccatgcagcacttatgttatcagagaaattgatgttgaacatccttacacaagattgaaaaatagcatcagaaaaaagaaataaatatgaacagtttcaagctaatatgctaaaaaaattattgcattattgtgaacggtcattgaagaaactagacttacagcaacggtctggcgttacttggaaaaacagagatccatcttgaataggagccaacaacatctgccagtgatctgtatacctaatagttgattattgtcaaatattgactgcatttacagtacaagaaaattgttggtgaggcaaaggtatgaactgacatacaacagatataaaccccttgagctcgctggacggcctaacggaaaatgcagaaaccaattgcatgatcaatgcaaaatcaaaggcctctccctcttgcaaaataatttcagaaacctgaaatggtagaatccattaataaagacagggatgaacaatagaaactaaaactcctgaaaactgtcaaacttaagctatgatttccaaatctccaaaaaaaaaagtgataatggatggatcactaaaagagacaaaacaactaacagtagaaaacccatacaatgtgatcgtacccctctgggttgttctgaaatcagaaacttaagatgaaataacttgattggaagaaaagagctcaaaagtgctcaccgcagtaagagcaaacaacttcgcctcaatctccctcaagggcatcgaaacacttgaagaaggcacaccaccaaaaaataactacaggtatatcggcaagaaaaggttaaatataacacaagaaggaaaaaatcatacttcatcacagaacaagaaagagcaaaatctacttatcaagcaattttctaacaaaagtactcaagacaccagatgaatgctgttctgttcacgataactaacgtattagacagttacagagtgaaatcatctcatgagaactgataagatataggagaaagaagctgatttcaaggtgacatagtccaatatgttaaaatttagggtaaatcctgcctgtgaagtgagagcacaccttactcacaaatgttgtaggatgaagtagctgacaaatatctaccaagagctcaagaagattatttctaaaatgcaacaggccatcaggaaggtcaagccccggactctcatcactggaggtaaactcatcaacctgaagataaattgctaaggaattttagaagcacaaagaaagaccattagtacaataaacaaagcacttgttcaacaattcgtgggcttatgaatatttaagaaatgacaagctaggaatccaagattatttgatacagtgagtggaatgaagtaaaaagaagaaaggtaagatgcatgaaactgtgaatgacaaacctaagagtttcaagaatgtgacactgaacatattaaaaattaatccaccagaaccttaatagttaaccaatcttaacaataagaactatataaatatgaagatttccaggttaagagaaaaaatatattgaaatttgttttcttttatttctagttctccaactgatatgataacttctagatatataaaactgaaagagacataatacataagaaagtttccaagatgtaacctgagcacgcagcacaagggcatcaactaaagctgagaaaactggtagaaatgtatctttcacacgagttctgtcattctgtctgtttccacctaggctaagtatatatgtcgcaaaagttgacctaagataagaaaagataagatcaagtctgagctcaaagaacagccagaaaaaatccctctgataggaggatggcaagaaagatatgaaagtccatatgggttgtatgagagcttaataaaataccaaaactgtacagtagagtctgcaatctcccagtcttcacttggaaatgtcacacagctgaaaaagtaaatgatagaaataaacaagagtaatgtgtaaaagatattaatgcccacctaacgaaaagtcgtgtttggagaaaaaaataaacgcattgaggaaaaagaaattgagcgaatcagcttaatattgcaccaacgtgtgaatacttagactgtgtcatatgattaaggccctaattatttcaaacgccaagttttgagttttgcgttttcatgtgaaaagaaaattgaaaaacaacattttttaagtgcaaatataaaccgagaagaatctactgtttgcaaaaaggaatttaggttagtatgctatatgttgcaaatttatatgaaaaaatacacactaaatataaacgcacacaagcaatcaaggcccagtattcacctcaaaatcgcatcagtcaaaataagcgcttcagaactagcttcaactatcaagcatggtgcctgcaacatattgcaaaccgacatgagcctcacaaagagcaacaaataacgtaagtaaagagtaataacgtcacagcattggatgtacatccatgaggggataaagtggaacaagtagtctagtactcacagcttgtccgatttcagacatcaagcatgccaggccagagataatttttagatcagcatttataagagctggttttagaagtgtatctctgagaaactgtactttgtacaataaaacctgaggaagatcctgcaagaagaaaaaaaagtcaaagccaaaaaatccaagcacatacatttttcttattgacttaataaatattatgtaaccttctgctattaaactataagataatacgctgacattaaaccctatgcaacatatccaaccagaatatacaaagaaaatgatgccaatacaatgtagttcaaacatacctcatgccgagtcacaagttcaacaagcacctcaatggcaagatcaaaagtagtaccctatggaacgcaaagaaatcaaaacccaagaaacaaattgaaaggcactttacaaaaaagtgacagtaatttaaactacaagactaaggagattcacctgcagggcattaaatacatagttaagaagggggtgagaaggcactgcgccttgtggaatctcggagaaacatccagcacggacctaacaatatgaggacagacatcaaagtggaatccagtgaaatgccacaacaataaggctctactcaaaatactaagcaacatacccaactcagtaagcaacgaagtattttgcgattgttatcatgcgggtaaagaggagagacaaattggttctcagactgctggagtaagaaatcaagaaccatggaagtatgcgagagaagctattacagagcgaaaagcgaggttaagtaaaacgaggataaaaaaaaaaacagacttcgagaaagaaaggggaaagagaaggaagaaacctcctgacgaagatcagagtgatgagaaaaatggcgagtatcagatatttcttcaggaagcacagtgagaagctcaagcaagacgacattaccatcatcatgagcctgaagattctggagtgcgaacattaacttatcaaagggctttgaataaggatccgagtgaagaagaagcgcagagagagctaaacatatctgcgtcaatagctgcaaaattccacaaacacacataaacacacaatcgtttcgttcatatcaccggagaaacacaaaaagggtacaacaatacctgaggaacaccggagctatatctcttagcagcaagaagaagggcattgagaagagcatctttagctgtagattgaagattcgatgcttcgttctgaatctgaaaacacaacacagaaaaagagggttaaaaaagggtttttgaggagtcgaaaatagagaatctgagatgatgaaagacgaaacctttcggcggagaatttgagcggcgaagaattggaggtcgaaaagagaaacaatcggagaagtgaggagagaagtggagacgtcccaagcagcaggagtaagctggaattgaacaagccattggttagcagcaactctattggaagattcaggatcgtgattcaagacatggattgcttctgctacttttctctgtaactccattctcactcaatttcttttgttgcattccactctcttctctttctctcttcttccactctattttttttcttcttcttcttcttcgactcttcggaattttttttatttttcttaatgttttttgagaaagtaaaataaatttaatatttttttaagaatccaatcagtttctgctctttttcttcctttttggattcgatttcgataattcattatattaaaaaaaaaaacttatgtacgttttttagataaaggatctctaaaagtgtctttaaaacttatgttaaaattttgaaaattataaactaatatgagaaattatagattttcttattttaaaattataacacttttagctggttgtttttggttcataaaaactataagttggttttgatgttataatagtccacagtgaagcatatatgattcacagtcgtttcataaaaataatggtttagttgatattatgtttacgttaaaacataaatagactacaatgctaattaatgttataaccaaagaaagagatagaagaaatgagtgtgttattccattgagataaagtgttatttatatagaagtataaggaaagggtaaaaccctaaaaacatgtagatgatgggcttagatgatgggcctcataatgggcatccatctttattcataacactctccctgatgaccattatagtatcataactcgtaaactatttgaaatgttgcctcattaaaaaccttactaggaaaacccaatgggaaaaaccatggttaagggaaaaagagtgcaacatacaattactcccccttatgagtatattcgtcgagatctttgagacggcgtaatccgatacgatagactaacttcttgaaagtagcagtaggtagcgccttggtgaataagtcagccagattatcattcgaacggatctgtagaactcgtacatcgccgctcttttgtagatcgtgtgtgtagaagaattttggtaggatgtgctttgttctatcgcctttgatgtatccgtctttgagttgtgcgatgcatgctgcattggcttcgtacataattttggagtctttttccctgcatatataccacagtcttcttgtatatggtgaactatggatcttagccatacacacttgcggctagcttcatgaattggtaaaatctctgcataattagaagatgtggcagagaataaacagtatttgagaataagtctgccaaatcttctcttgaacaaatttttagataaagtacaacgccattcttctgctcatgaatcttttagatgattcatcttgaccatcttatttatttctctaaataccattagtgtataatattcatttggatgattgatagaatttcttaatattcatcaagtgtattatttgcgtgttctttaatgtctcgttaaaaaccttgtcatagaaaaatcatgtgggataaaaactatgataacgaaaaagggtacatctacgcatatcattcaatctccccctcggaaacatcttcttcaggagatgattttcaatcaaatacagtatctcgttggaattaataaccataatcttaatgatcaaaattatatggttttcatatagacttataaatatcattatctaatgatattttatcatagattattgtcatcgtattacttatgataactctgtaggagttttaatgattttcaaaacaaatattagtttgatcaatatattttgacaaactcaacgtaaatatacatttatatgattatatgtcatgttacatatttctttttattcgatcgagtagagttctagagaacataattctcatataattaatccttcagagattatatctttcaagaattttatataaatgtcatatccagtgttccgtctcttattgccagactttagatacttaaaaaaaatattacatccaccacaagagaatatatctcttcataatacatttcttatctttgtgaaaatctcattaatttcactattctttcacataaagactcatttattttccactggttttacacatcatgtgcatagattactagtccaaatatctctactagagattataattatatgtctatttcttcttttccattttttttgctaatcattactttgtgtacacttttcaatagactttctttcatgatcctcctttttgtctataatatcaactgctcatagcatgcaaatatattacgatgtcgatttgcttttgattccattatattttgacatgacatagctagctagatctcttcattgtcaagtacttgaatgtttcatttgtcatgtttatgtctcttttagagatcattcactctcttcaagagatcatcaaaatatttatttcctcaatttggtcatttttaattttgtgctccttcacttttacgaggatatttatatttggaaccaaggtctattacgcttcatgcgatcttaagactcaaaagcagtttgaaattggtccttacaggacattcattatattctggagcatttaatttacaactgatataagtgacttcatcactttatttgggtcagcaaatgcgtctggcaattacaacgctaaattctgtaattgaattatcttttggactcttaatatacattctttactccgaggatcattgataattcatttctatttatctttttcaccagctgtatacattctcccccttatgttggaatagctgactatataatatgatagtcttcaaaacgagcggtatataaatccttctaagatggcttagttatcattcatatccaacatgtattcttatcctcctttgagggttcatctctgcgtgctgtggtggagcacttttcacattcaaagcttttagatgaaaactatttggtttctgacccaaaaccaataataatggggaaaactattaattattcattggcttgatgcgtatcgatgttactaaaccattttgtgtatgaacatgaatttcaaaatgttaaacacttatcccaacggatatctaataatggttattataaataaacactgaaatactcttgtactttaatcaagaaagtaatctcgcaaactctatgttgcgggtttataacaaggataaatatgaccttcttgtcgattcaacaatcgagtcaatgcgtccattgaatcgatgcatcttttacaaccattaggtatctaaatgtcatatactgggtgatcaacccataattatcttcttgtatatacttacgaatagataaagtccaaattacttacactggtaaaaatcacattatcatattgctttctgagcaagtaacatttgataaatcattagagagaatcttctggtttttcacctaatgtccacataattctcaatactttcacatcatcattaaaccaggatgaccaatccggttaagccaaatatactcttgaaacttttaattcttttgaaacttctagttctttcaaaacttctaatttacttttcattgcttatcacttactcccttaatgagatcttataatcaaaattacttccatgtattttaataatcaatcatatgttaataaaacaataacgagataataattaaaattttatattctagtataaacgatattaaatttgactagctatgtaagatcttatattcacttgagttacttatcagtgataactcttatgttttcttagcctttgaaaaacactcgatttaagtttataatagttctcaaaatttctttcaaaatattgtatctacaggacaacaatacttgcgtaaaagtttaagcgtctgttttaccatctctgcatcatagatattctcttaacaatgtgagttatattcacaaagagacttcaagtcttgaagtttcagtaataactaattataacttattttatctaataacacatccatataagaattattttgtacaacttttagatctttagtagtcaaagattgaacataatcttctggatatgtcacttattatccatgtgagattcattacttctcctcctcgaaatgatgaaacttcaagttcatccatctcgtttttaattccactctagaatcataatgtattttatatctgatcatattaactttaagatttggagaattatatggcatcaatgattttaattttgtattcccataaaaaacaatgtatatgctcttctagagtcttttaataagattttatactacttgatatactagattatttcatcgttagaaattttttttttttttttaccatatttattttctcaacttctcgtgataatttaaattcttgaaaaaactttgaccatcaaaaatatgatatcttcttaagatacattaaaatagtcattcatgaaaatttctataagtgattatacctttaaattaagttatttatcaatcaatttattttataaaataatcaagtattatatactaatacaattttaatgcaatattgtaaaaccaatcagaataaaactattttgtgcaaaatctggattttacatatatcttgacaaaacttttatttaggataatatgaatttgtgcaaaatttgggtaaaatgatttcgtgcaaaattagggcaaaaccatgaacagtttttttttttatttatttatttagataccacaaagatttagagaaaagaatcttataaaaaaaaaattatcttgcaacgttttagtaaaaataataataacacaatcaaatatatggaaatcttataaaaagatttaaataataataacacaaagatttagatatatggaatcttataaaaagaaaaattatcttgcaacgtttttagtaaaaataataataacacaatcaaatatatggaaatcaaatatttaatatagaaaagtcaatatctaaaagtgataagatatgtataacgttttaatcaaaggagttaaataagggatatcatatcaatcataaatggattttagacaatataatatttataaaatgatattgaatatagatgcaactattcaaaactggaatgctaaaacattaatacatgcttgcatcacccaccaccgggttatgaatagttacaaaattagttatataattataaaattggtaatttatatattcaatattataatagtaaatcacaaaaattaacaattaacaagcatgattctcttctttaacgattttctttgtagaatcattgaatcatgcgatagtaatcatagaaacaaatgataagcatgattctcttctttattgaatcattgaaaacatgcttttaccgatctatactataatcatcgatcggctcatattgttttgtttcaataatagaaaataagtactatgaaccatgagtcgataagtaaacatggttcttaaaaaaaaatgtaagaatctctatatctaccttttagagcgtgctgataacgtgttataaccagagaaagagatagaagaaatgagtgtgttattccattgagataaagtgttatttatatagaagtacaaggaaagggtaaaaccctaaaaacatctagatgatgggcttagatgatgggccttataatgggcattcatctttattcataacaattaataatttatccacataatgcatttagaatcgaaatgttgaatggatcaaattgctcattctgtttagaaacactatagcaggcttttaaaagccaattaatgaccattgtattcttctaatgacccattcagtacccataccaagaacatatactagtaagtcaataacaagcccaatgcaacaagagagagtatgagacaagcaagagtaaaaaagtacacatgccatcattttacaccgagcctattgtgttactaaataatcttatcgacatggttgacctttaacaaaaaaaaagtatcgacatggttgattctaaatactacattcaatgacattaaacgaagctataaaggagagggagaagggtcgagacaaggacaactagctagacgactacaactttttggagcttttcttggtgtagttcagtccgtgtaagcttaagtcaacaagaacaatatatctttcaacatctctctcaatctctttctttgtccattctggtttgattaattttgtgttaatcaatgaaaatttgatcctggttttttcatgatttatccatcacaacaggattgtaacatccacatagatatatagttactctatttacttcattaaaaactttattaactgaatcataattaatctcttgaacatccaactaataagaaaagtttgcatttatttgtaaaaatgtttactttttcttttaaattttaatataatttaacataagatttaaaaaaaaaatatatatatatatatataatatatgtacgttgtgcagtaattttattaccaaagttgacatttaaattcttcgtacatggccaaccagaccggccttgagggctccatcagtagaacatggcgtggagaaagtatctaacaccagtggtaaagaattaatttcatctcgaataagaatagtccacattcagttttgaccaatgagattccatggcttgattcatgtctatatcacttgattgtcaatcttattaagtgtgtaatacgagattatatcatttttctttattcatctttctagtttagtcgtgcagccaggttttatttatgattttaattattcaaattgcatttttctttcggataacttgtttttctactctatcgagagattcagatagttgatttaaaaaataatttagacgacttttggaatatgcagctgagcaataataataatataattgatccaagcatcattaatcatgcaagatgtaatactcaaaactattttgaaagaagtaaactcttttcaccatcaccaaagtaccgtccgtacattcaggttaggagttttttttaataaagaatccatgattgtataagaataatgaaatagtaataaacataaacaaaaaatcactctgatttcaacaatagttaatcactgtaaaatatccgatattcagttttatcatcatatatgcattttgaggactagtatgcgattctgctttgtgttttccgtaacaaataaattcaataagtagatacttcagcttatataaagattaccaaatatcgaaagcttttgaagaacattcttgtcaataccctaaaaacaaaggtaagatcaataataacatgtctttaaaatttattgtctatattctcaactgtttttgaggggaaaaatagagttcatcgtaatcttgatgaggtttcactgatgtcatatttggtatgcaagagtaaattgtttttttttttttttcaaatgtacaaatgtcaaaagaaagagagaatctatctcccaagttaattaagaagtgtactttcataggattccaacgaggtccaggggagaaggagatgcgaaaagtcttcgctcacaagattccacacattaacaaaagtccgcattctagggacctacagaatattcctcaattttaatcaacacttgaattgttgcttagtccaaataaacggcttaactatttaaatattctggtggtttgtgtttaatgaacggtggttataaatcttatcaacaagtttttgaacttaagcaaataaaaccactaatatagaaatatatatatatatatatatatatatatatatgtgtgttaagaactatataggaaaatattatacgtttttttcagggactatacaacacacttatcagatttccatttcactcatttgatctataactttgacattaacatctcacattctattataaagtattaacactgtaatcttcttttttttgctgatttattttaggaggtggtcatatatctcaacctttagaaaatgtactttatatgtcaaatataaaaatgagtgtgtatctatcaaaacgaatacaattatattataatagaaatagttacataaatcatgggttttaataatataaccgaaagtatataaatcatcattatgattaaattttagtaggtctgccattataaaatcgaaatttatcttaaatttagaactctttcattataatttttaaaacttcacacagttaattgaatgtaaaaaaagaaaatctaagactaaatcacatctaaaagttttcatttttcaaggaacatttaacataaaacgactattaattgatatcataaattttgtcttttctattttgaaaatgttactttatgcaatagataaacttaatgtgtaagccatcgaaatcgatgaaaaaaaaattcaaaaacaggatttttttgttttgaaaatcttccaaatctctataaacattataaatagcaaaaaaaaaaagagaaatatatatatatatatatatatatatatatatatatatgattcaaaagattttcaaaacagaaaatatatctttttcgagtttatctctttcatcgagttcgatgactatcaacttaaacattaagtttttatctagtgcatatagtgatatttacataagagaaaaacaaattttgtggtattaataaatagtcggtttatgttaaatgttccttaaaaaataagtttttaaatataatttcatcttagattgtcttttttacattcaattaaatgtgtgagttttcaaagattacagaaaaataatcataaaatccaagatgcgttttgaattttataaccatgaaatacatataaacctatgaaaatttaatcataatgatactcatacactttcagttatatcttcaaaaatcatgattagtgtgtataattgtattcattttgatggattcacaattatttgtatgtttgacatacataatataaaatatataaattccaaaaggttgatatcaccgtttccaaaaaataaacaagcaaaaagacagatttacgtgataatacttcataataggatgcgagatgttagtttcaaagttatagatcaaatcagtgaaatgagattttggtaagtgtgttatatagttcttaaaaatctggaatcccgtatcatcttttcttatatagttcttacatcttaacatatatatttgttatttctatattggtggttttatatttgcttgagttcataaacttcttgataagattcataaaccgtctttgaaaacaaaccatcaaaatggtccctcttcttgtttctttgaaaagatcatttcatacaagcgatatagacaaagcatttaagaaacaacaagttgagaagttttgtaacacgtacgttgttgtaacaaaaaaaaaaaaaaaaaagagtaaagactttgccaaagttttcgaagactttacctttgccatggttaaggagcccaaaacgaagcaagcaactgatccccgagtctcaagtattgacttcgaaaacaaatattaatatatataatacacatatatatatatatatatatatatatgtaaagcatattaattgatatgtaaataactattataagattttaagagtaaataaatagtatgccaaaacaataatttgaatacttatactactattttgagtttttgattttcaattaaacattcaatgacaaaaacaaaaagggaactaattgaattattgcatcttatgcatatactatatttcatagatccaacattaaaataaactaactgttattttagaccattgttttctttaaaataattgttgctttttgcccacagaaattaataatgtgttgttttaggattttagtgtaaattctgataaataatgtctaaactttctctatataaattaatgaaaatatgaaataaattttttcttcttaattcgcttgaaaataaaaaaaaatgacatgaatatggaaaacatcattgtgaatttttttgttagttagtcagttaaagtaaagattatggaagttttgttttggtaaacttacaaaaacaaatattaattgtaacaaaaattgatttcaaactctctctctttctcatttatataactttatttttcacaaatcacaatgcacaactcaaaaaaattagaatgtttaaagtagataatgcaaacaaaaaactctcaaatcgatttgatattaattaaatgaatctcttgatcttcaaattgagttacaatctaaccttttctatttagataaaatgtgaaaatttattttagaacttatactgaacacagagacgtaacgaagagaaacagaaaactaaaaaatatgttgtaaatacgacaaaagactataaaagttaatgacattcacgaaatttacacgttctaatggtcgatgacacaaggaaactttcaatgttgccacaagtgaattgagatctcaagtcagcctccaatacttctgaaagagcggtgctaaccctcttaatacaaaatttatatatctaaacaaaacaccgtactaaaccaaacaatcttagattcaatcgcggtgcttacaatctaacttagttataacaaaatttatatatctaaacgaaaactaaacaccacattaaactcaaccatcttagattcaatcaaaaccaagatttaatatattttatttttcatctagaaagaaaaaccagaaaacctttatgtaatgattcaagtttttttttataccatcacactaaaaataaaaagatagcattcaaaatccaaaaataaataaatattaaaatgattacatcaacgcttcacaagaacataaatccatgaaaatgtcacagctttaacactctccttctctataaatactcataacctcaaacctgagattcctcattccttaaacccctaaacctccaaaattctctgaaccttcacaaagatcacaaaaatggaggtcgaaggcaaaggaggagaagctggaaccaccaccacaaccgcacctcggaggttcgcacttccggtggacgcggagaacaaagcaacaactttccgactattctcagtcgctaaacctcacatgagagctttccatctctcatggtttcaattcttttgctgcttcgtctccactttcgcagctccgcctctcctccctgttatccgtgaaaatcttaacctcaccgccaccgacatcggaaacgccggaatagcctctgtctccggcgctgttttcgctcgtatcgtcatgggcacggcatgtgatcttttcggtccacgtctagcctccgccgctttgacgctctccaccgctcccgccgtctatttcaccgccgggataaagtctccgatcgggtttatcatggtgagattcttcgccggattctctctcgccactttcgtctcgactcagttctggatgagctccatgttctctggacccgtcgtgggttcggctaacggaatcgccgccgggtggggtaacctcggaggaggcgcgacgcagctgatcatgcccatcgtgttctcgttgattcgtaatatgggagccaccaagttcaccgcgtggaggatcgcttttttcatccccggtctctttcagactctctctgctttcgccgttctcttgttcggtcaggtaacaaaccaatcacactcaccggttcagttattttggttttttcaactaatccggttttgagaatttatcaccaagttattttttgttttggttaaatttactttctttgtatagtcagtttatcctgttctatataaatgattaaaccgattcgtttaggtgcaaacccggtttattgataccggtttgggtcgtctagtagagtctttagtcggttaatcatggtcgagtttcagtggatatggacaataactgtttaatcatctaagttgtgtctattacaaggaatagtaaaaggatacatttgttttgtcttatgtttgctatatgtttttggaaatgagtaggatcttcctgatggagattattgggcgatgcataaatctggagagagggagaaagatgatgtggggaaagtgatatctaatggaatcaaaaactataggggatggataacagcattagcatatggctattgttttggagtagagcttaccattgacaacatcatcgcagaatatttcttcgatagattccatttaaagctccagacagcagggattatagcagcgagttttggactagccaattttttcgctagacctggaggaggaattttctctgattttatgtcgagacggtttgggatgagaggaaggttgtgggcttggtggattgtgcaaacatcaggaggtgtattatgcgcatgtcttggccagatttcttccttgacagtgtctataattgttatgcttgtcttctctgtattcgtccaagccgcttgtggacttacctttggcgttgttccctttatttctagaaggtaacatacattttggtattgagttgcttgattggttattcaacatttttgcttacaaaagtttgtttatgcagatctcttggggtggtatcgggaatgactggtgcgggaggcaatgtaggcgcggtcttaacacagttgatattcttcaaaggatcgacatacacgagagagacgggtataactctaatgggggtaatgtcaatcgcatgttcattaccaatatgcttgatttactttccgcaatggggaggtatgttttgtggaccctcttccaaaaaagtaactgaagaagactattatctcgccgaatggaacgatgaagagaaagaaaagaacttacatatcggaagccaaaaatttgcggaaaccagcattagcgaaagaggtcgagccacaacgactcatccccaaacttgataaattcatggtgttttttttgtttatatgtatcgactgttgactatgtttttgtcttcttctcttttgtttttcttaagagttttcaagaactcaatttcttgattttatttataattgtgtgataagttgtgtatgttatgtaaaacctactactggttactgctttctttgtaatggaaggcttttgtaaatgtttgttcatcatggaatgaacaaacgtattttcatttagtatacatattttgttttttagttatcttttgttgatcgtgataataatgatttgaccacaagaatacaaaccagtagattcataatttattatacactgttagtctgttaaccttgtaaaccaaaaacgtttcgatattcatatgctcttttacatcaaacactcggttatttgttttatccaaataactatgacaattacatagttactaattggtactttatttcattatcagatattaactgagttgaaaacaaaattagatagcagttgaattaaactttctattagtattacatcattaagtgtttttaggtgaccaaaaaaaacaacaattacattcttcccactttacaaatacttttaaaacaaaacagcttgtcttttatgtcaaagttcattgaaagatgaacttactttggtatattacagataccatgaaaccttaaaatcttcaatagatcacatctttttagcccaacatctttattttatttacttttgggcatatttagcccaacatctttggcagggaagaaaaactttgtaatcttctcgctatgccattgggctagaaaggccattatgggcctattcttatttcattatgtctctagtgggcctactactgtctttactatcttggccaattagaataaaatctttattgtatgtttcccaatctaccacattgtcacaaacactcacaataattgctccgcacgtagcaagaagtaggccatatggagtccacgacacaaagatttgaatggtcaaagatatataacaaaacaaaagaaataaaagagttgtcgcatgttcttatataaacgatttatatattataactgcattttacattattgtattgtttagccgagtcgtgcgaatggaatatcaaatcgtcatccttttgattttgaatgacaattatacagtaatggagacacacacacaaacatataaactattaaattctactgtgaaacgctaagtcaataagattaactggtgtaaagctgtctgattaacaaaaacttaagtgtgaaagctgtcttttaccactcttccaaacactcgtaagtcgtaccaaatctagttctttatttattttttaatcgttctctatattatataaaagagaaaataaaactattaacttctatataattcataaaccattgattcctaaagattacaaaatcattgatctccttcttcttctttaactttaagcactctctttctctctttctctttctcttgtcgtcggagaatggagaaagataatgacttcaaggatccgtttctggcgtcaactgaggaggaggagctcgacccggcgacccaaaaagcattgatggagtatcttggagtcggaagcagagcatcttctcttgtctccttctcctctaccgccgtcgatatccctccaatctccggtgtcggagactttgtcagagagtttagaatcgagtctagaaagctatggaaactagctggccctgccatttttacaacgatgagccaatactctctcggagccgtcactcaagttttcgccggacatattagcactcttgctcttgccgccgtctccattgagaactccgtcatcgccggcttttcatttggtatcatggtacgttttacattgatatgtctcccctgatcacatttttccctttctgttatggaacgtatacatttaacaaatcttttgcatctctttatagactaaaataaatgatttattatactttcaaatcatttttcacaccaaattcaaagtattaagaatctacaatcgatcaactttaatctttttatataacaacctatatatatcattttgttgtatatttgccatactataaaactagtttaatatgattttggtagtttgtatgcaaatttcttacggctattatttgtatgtatggtgcctttagcttggaatgggaagtgcgttggaaacgctatgcggacaagcgtttggagcagggaaagtatcaatgcttggcgtttacttacaacgctcgtgggttattctaagcgtaaccgctctcttcctttctctaatctatatcttcgcggctccaatcctgacctttataggccaaaccgctgcaatctcggccatggcagggattttctccatttacatgatcccacaaatctttgcctacgctatcaacttcccaacggcgaagtttttgcaatcacaaagcaagatcatggtcatggctggaatatccggtgtggttcttgtgatccatagtttcttcacgtggctagtcatgtctaggttacactggggacttcctggtttagctttagtgcttaacacgtcgtggtgggtcatcgttgttgcacaacttgtgtatatctttaattgtacgtgtggagaggcttggtctggatttacgtgggaggcttttcacaatttgtgggggtttgttaaattgtctttggcttctgctgccatgctctggtgagtgcaaaccttttttctcttccaattattttggtccgatttgatccaaccccattaatgaattcatattttaaatacaatttatttacttttgtagtttggagatttggtattttatggcactcgtattatttgctggatatttgaagaatgctgaagtctccgtagctgcactctccatatggtaaaatttgttatatctcttaaactaattaacatctttacaacatttaaggtttacatgatttgttatttgattcatttatttattatcagagagattctctgaataaagactagacccaacgtgcgtagtagtctcttgttttgtttaataatcaatgtccttaatgtattaagaattcaaaattttgaatacttccactgcaaagaaatttctaatgatttgttttccttaattaatggtgtgtggaatatgaagcatgaacattttgggatgggcagctatggttgcgtttgggacaaacgcagcagtaaggtaaattctagcgtgtgaaataaaactaactctttacaaattctacacatctaacaagtgccaagctaataatacatttttgttggcagtgtgagagtgtcaaatgagctaggagctagccacccaagaacggccaagttttctctagttgtggctgtgatattgtcgacagcaattgggatgtttatagcagccggcctactcttcttccgcaatgagtacccggttttgtttgtggaagatgaagaagttagaaatgtggttagagaactcacgccaatgcttgccttttgcattgtcatcaacaatgttcaacctgtattgtctggtaatatttgtttagtggactccaatagtccaatataatatggttgtacataacgtaaaccgaatgtatatgagattatgataaatttgataacgcaggagtggctgtgggagcgggatggcaagcagttgtagcgtatgtgaacatagcatgctactacttgttcggagtcccatttggtctattattgggatttaagcttgaatatggagtaatggtaatgaaattcacatccttttatctaaaagtaaaacctttatcaaggaaagacgaaagaccggggtttttgatgttttggaaacctattttgatcagggaatttggtgggggatggtgacgggaacttttgttcaatcgatagtcctgacttggatgatctgcaaaaccaattgggagaaagaggtaagaaaccaaaacactttaagaccgaatagtcacgacctcgctcaccgagtttattgttctaatcttttgaatgatatatatatttgtaggcttcaatggcagaggaaaggataaaagaatggggaggagtacctgcagagaaagagactcttttgaactagaaagagttattacttcaagacatattgatgagtctttcagatcacatttttgtatacgaaccttaaaagcaaaatttggttctctctttctaaaaaatctgtaacttgttatgtcatcaaacgctgacaagatatgttataacgctgataattatctataaacaatttgacttttgagaattggggtcttaatgaaaagttaccaaatcatttagaataatactactcgcttgtcagaagttgcttagtatagtagaaacgtgaggacaacagcactaccagcttccttaatcttcttttcatctgtattcgacacaagcttagccttgacaacaacaggtttattctccggcaagaaacctttccctaaaaccttaaaatatccaaattgagtaacatcaatcatagacacatagtgtttcgttgcttagtccataacgtcctgaggaaccatcgaccaaagcttgtcaagattgacgatctggcagtaaaacttgttcctgagcttgtggaaatacctcataccaactttaacaaaatatccaggatgatacttgtcgaagaggatacggtgtgatgcataccaccggcgttaccacgacttccgggaagcttacggtgctttccaaaacgaccatgtccaacagatacgtgttctctaagatttcttgtcttcttcctgctagtcgtcatttctcaccgattgaaattagggtttcacaagaaaaaatgggtattaaggtttatatgtttttacgcggcaagtaataatgggcttatcattgggccttaagagcgagaagagccagaagaatccggttccgattttttagtcaaaccaaataaagccgaaattaaattctgctggatttggtttgaaaattcgttattttaacaggaaataaaaacggtctaataagaataaaaatctattcgaaaaataagaacaatttttataaaataaaataaaaaaatatatttagaaagtgttatcttaggaaaactattcgaaaaaaatatttaatcaatcattatctctgcctgattttatatgattttcacttttctataaatatttgacatttcattgtaattatccaattgttcatcacattaattgtttacaaaatatttcttaccctttttatagataatgagaatgatctagttttgttgtaatttcgtttctttccttcttcactcgttaaattttcgtttaatcagacatcgatctcaaaagctctcatcttcaatctcattgagaatggatcatgatctcgagatcttccctttactctcctacgtcctccaccattccgatcccgcttctcacgcgccaccgtctctagcgattcagcaatctcttgcgaatcgttatccccttctcaccaatccttatgtaatctcctcgttgattgaatcaattcccagtacaatcacgcagacccttttcgtatttggctctcttgggccacgacctgatcctttagctgtctcttctgctcggtctaagatccgagagatcaaagagaatgattctttatcgccggaagatgcggctaaggaagagcaggtttacgctgcggttgtgagtttagaggaagttcatgaaggatatgagaagcagttaagagatttggaggaggagattggtagggtttatgcttcggcggttgaatcattgagcggtggtgatgaagtgaatgaggaggttttagcggtgattaaagacgctgaagatggtggagtcgttgaaaggattgatctttctgatcatgagcttaagcttcttcctgatgctttagggaaaatcgtcggtttggtttcactgaatgtctctcgtaacaatctcagggtaaattcactttagaatttgaatcagctccacatgaatgttcgtgttacagttttaaaatttgaatcagctccacatgaatgttcgtgttaaagaatactctcgattatagtttcacagacctcataaatctcaacgagttctctgattagtagaggttgtgaaaaagcacgaaactaagttatggaatttggaatgtgtgagtattatgtagactggctttagactatggaatcgatgatcatctttagagttgcatgatgactcatgattttggtgatccatttgtttgtctttcaagactttagaaatctgtgaatgttttttcttttagtgattagtaatcagctgttgtgaacattgagttaaacatgaggagatcttgatcggattcattgagttaagctgtttttttgttcttttgcagtttctacctgatacaatctcaggacttgagaaactggaggagctagatttatcttcaaaccgtctcgtgtttcttcccgactctattggactgttacttaatttgaggatcttaaatgtgacggggaacaagctaactttactcccagaaagcattgcgcaatgcaggttttgtgcttttacgtttgttcatctttcgtttcagcttagcctattacctaattctgaagagagatatgttcttgtgattaggtcactggtagagttagatgccagcttcaacaacttgacttctttgcctgcaaacttcggatacggattactcaatctcgaaaggctatcgatccagctgaacaaaatccgtttcttccccaattccatatgtgagatgcgttctctaaggtatctcgacgcacacatgaacgaaatccacggccttccaatcgctatagggagactcacaaaccttgaagtcatgaacttgagcagcaacttcagcgacttgattgaacttcctgacacaatctctgatttagctaacttgagggagctagatctcagcaacaaccagatcagagtcttgcctgactcgtttttcaggctggagaagctggagaaactgaacttggaccagaaccctttggagtatcccccacaagagatggttaaccaaagcgctgaagcagttcgagagttcatgaggaagaggtgggaagagatggtggaggaagagcaattgaggagtgtgattgaagctgagaagcaacaaggaggagcaacaggttggctctcatgggggagctccattgttactagccttttctctggaggtactcatggtggtgcagctaagaagcctaaaaactcatttttggatgaacagctctgatttttttttttttggctttactatatctagctagctttgacgttttttagaaaaagaaaaaaatccggagtttggacgtttgacttgactgtatttcaatgggcctttaataacccttctgaggcccatcttggggttatgtttgggtaacattattaatgagcctcttatgtgccttactgccttagccttacgtaaggtttttttagctgatttatgaatattttacaaagaaaaagatgtaacatgagaggaaaggcctttgtgaaaaacttttttccatcaactttatgtgtatagcccaatcaaatttcgggtaattatataactacaaggaaaaaaatgaaaaaagtcacaaaataactaataaaatatcttatctgtatacattttgacaaaatagtgtaactaagtcattgaatgttctcattacaccaaatccatatccatccatgttgttaaaccatggtggttttggtctttacaagtttgtcaaattgaactttaattttttccaaccaaacaaatttgaatacatatataacatttaaaaaattatagagcatataagtttaagaaaataattaaatttattccaacgacacttgtgggacaaaagctgttgaagaacatctagttacagaaaaaaggaatgatggatcttgggactagggtttctacattaatgcaccaataatatataataatattaagagtaatagtaataaaagagtagtcatttattatctgccagtttcttgtttgctaatggtttaatgggcgtacaatgtatatgcatacatatgaatctgaccctaaggtattagaggtagagagattaggagacaatttgatcagagccaaaaagtactactgatcttactctagtttggcagatcattttgctcctcttctctttctattatttttcctaatctgaattattgtacacttttaatagatgtttcttttattattattgttagttagtacttcaaaaaaatgaaatagttacagcagatcatttttttgtttgttttactgatcatattcatacgtaatttggtgttgaaaagtaagcttataatttggtgttgaaaagttagcttatcataagaacaataatcaatgtgttaattagttatatagattaggacccaactctagtgtaattactcttcaaacagtaagtttggtctatcttctcaatagtctaaacaagacgtgagcttatattataataaagagcattacaccagattttccaataatccagaagtttcagtttcaatccgaaatctagataatttattcaagagtgtggatgcatttaatgttatttggcccaaatttctcagtatatttgagagaagtaaaaatatttatattaagcaatgaattataagttcttaaaatataaagatagtcaaatcacaaagtaatattatgtaacgcatgggtgctcagggtccacatcatagggggcaaaatgatgagaatgatcttttcttatgtcccaaaaggtcattcactttcaacgggatttgtttttttaacctattttgtatcacacttttatctcgaaagattttattttattttttactacttgacggttttttttcctgtttttattaaagcaagaaggttgattgattgaactcagaatttggagttagaattctttttgatgttgatgaaagatcattattaaagaaatacattttataatttagtcctttttagcagaatttgagttagaattctttttgatgttgatgaaggattattgttcttggaagaatgaataattcgaagaagtgaaatccgtttttcaagggataaaattgattgattgagttttggagtcttggtatt

SEQ ID NO: 5 - DNA, 111686 bp, Arabidopsis thaliana
gaattcatgtgttcgggtactggtttgagtctggaaaacccgttttcgatttcggagaagaacattacgctagtctgaagttgagtcctggtttgtcttcgtatgctgataatccggagggagcgagcgtgtcagtgacaaagcttgtggaattcgcgaagggaagaatccccaaggggaagttgaagaagagtgacattaggttaatggcgactgctggaatgagattgcttgatgtgcctgttcaagaacagattcttgatgttactagaagagttcttagatcttcagggtttaagtttcaagacgaatgggctactgttatctctggttagttttcggaatcaatttttttattccatcaaatgcaattatgtttaagttgatcactgacctacaattatacattgtgggagtttacctttctttggtgcacttgtaaacataagatttttgtttcattttgttttcttttagcttagttgagtgatagtaaatgtgcacatatccattggcaattggaagtgctaattactggggggaaaattttattcaggaactgatgaaggtatctatgcttgggttgttgccaatcacgcacttggttcgcttggtggtgatccattgaaaacaacggggattgttgaacttggtggggcttctgcgcaggtctagtctctttcccttctcaaatttgttatccagaagaaagtgtccttggctctgttccttttgtcaaactacactagtttggatgtattatgaattgcatccaaaagatttggattttatggatacaatgaaaagtagggtctgttagtccaaaactatcaaagactaaacatactagtacgatatacaatgattgtaagccattttctgtatttgtataggtgacatttgtgccaagtgagcatgtgcctcctgagttctcccgtaccatatcttatggaaatgtttcgtacacaatctacagtcacagtttcctcgactttggacaggtaacttctgagagcagagcatttgtctaaatgtttttgagtacttattttctatgatttcacccttttcaaaaagttatccggaaacttaagtggaaattgcgtcccagttttctacttaataatattctgatttttaaaatttccttgtagaaaatgctaccaaaagttttgctaacttttgtcgtatcgtgcaggatgcagcagaagacaagctattggaatcactgcagaactcaggttagttgttgataacttcttaaagtaatcattagtttactgaaattggaattttttttgttaaagctaattagtaatagccctcttgagttggaaataatcttcttttacctcaaaactaatttggttttttattccatacagtagcagcctctacaggggatggaatagttgaagacccttgtactcctaaagggtacatatacgacacacattcacagaaagattcatccggattcttatctgaagaaagcaaatttaaagcctcccttcaagttcaagctgctggtgatttcacgaaatgccgatccgctacgttagcaatgttgcaagaaggaaaaggtaaatagcattacttgtatagatgatttataatgggaatatttgatctcttatggctatatttttggcattttgtgtacagagaattgtgcttataagcattgttctattggatcaacattcacacctaatattcaaggaagttttttggcaacagagaatttcttccacacatccaaggtataatcctttgaatttcatgttggtcgatgtcaagattccgtctgaatgtgaggagaattgtttgaacattggtctttaatttctgtcttgatcagttctttgggttgggagaaaaagagtggctgtctgaaatgattttggccggaaagagattctgtggagaagaatggtcgaaactgaaagagaaatacccaacaactaaagacaaatatttgcatcgttattgcttctcatcagcatatattatctcaatgcttcatgatagtcttggtgttgctcttgatgatgaaaggtaaatgttattgcacaagttcaagatcaatgcatgttggttttctgtgacaaagatataaacaaaaactatatgtttgctttgtttgcagaatcaagtatgcgagtaaagcaggaaaagaaaacataccactagattgggcattgggcgcttttatactgaatactgacacacccacttctgattacaatggtaaatctagaaaaatgattggctttaagtaacgtggccaaatacaaaatatatgatatgatcgtaattttgtattctacgttacattgtgtttgaaacttgtattctacgttacattgtgttttgaaagtatagtcgtcgtttccttttgtggaataagtcagctagcagctactcattaataaattgaacgccaatatgtggtaatgtattatgtatgtggcggtatgtgtataatttcgacattataagaaaacctctgcgaccttacggttgtttgaattgccaattataattttatcaattactttttgtttacttgactttacgttctttgaactattcaagtcaacaacaatacattagataaagaattaccactagctgcttatcccgaactctacgtagaaattatatagtacggctagagaataaagtctattctgctgatagatagaatcatagaaagccaaaaaaaaaaaaaaatttcttgtggcaaaaagcctactataatctatattcgcaaaatacactttttttttcttctttactttgtaatactagatatcaaaggttgtgtagacttttattttgtatttaattttttctgctgttgagaattcattactcggtgataaatcttttcccaaccgggtgacaaatgtaaaatcacatttcataatggtctttagatcttatttttttatagctagaaccagtcttggatcttacgcaaaattaatctaaattctaccataagtcgttaggacgctaaaatcctaaaaaactaacatttcttggttcgacaagctaattaacaaaaaaattgtataatagtaagggagtctatctgcatttcacctatctgtgtcagattatatataaagaaacatatgtatacgtgaccatgtcttttcttgttaaatctttctttactgaatacttgacaatttctataagaatagctcaacggtcaataattttcaatccgtacaactaaggactatatagacatgtatgttccctgatcatttatggtcaaccacattaatatgtttctaaaatattagacgtgagttctataatattcttcaaacaaattgtttatttagtgaaaatgatcaagtgtttacttgatttaatgaatctaattcttcctagttgtattttgccaataaccttatctattccaatatatctacattataatgcgtataatactactgtataatacaacagagtatatataatccagcgtattattgactttatactcaaatattgcattaacagaaaaatgcaaaatatatattttttaaagaattatatgtgaaataacagtttaataatgaaaataaaatctaaaattaaagattagaaaagtaatatttattatggaaactgacgagttttgaaaagatcatgggattaaatggtgtattatttgtagttatacgacttggttttttaaaattataatcaaaaacaacatgttgttaattaaagaggtactagatgctgtcagaaatagaccaacaaaaaagagagactactttagattaccactaggagccgttatacttaagttctggtcaacggctatataactaacggagccgttagtcttttcagacgtcgttatctttcccgctataaaaagccattttccattagcttgatttccgggccaaacaaaatcttttgtgaagaaactttctctcatcttcccaagggagagagcaaataccaaaaacttctttttgcgtctctcttctaacattccttccttgccgatatttcagctcacgacgagaaaaatctcaccgttcacgctatatacatctatttgcaggtgattttttttcttctagatttggtatctcgttttctccgaaaatctcgatcttgatctttgcttttctcggattcgtaacgcatgtgtctgattagagttcatatacttgtgaatttcttgtttttcgtatttagggatttgatttcgtagaagtggttttgggaaacactgagatgagtaatcatcacacggtcgtatatgttaatggattggttcgaccggttctcgcggaggctgagtatagtatgagaacagagtctccggcggataatgcaattgatatctacgacggagatactacggagaatgaggaggaggattcactgatttcttccgcggagtgtcggatttgtcaggatgaatgtgatattaagaatcttgagagtccttgtgcttgcaatggcagcttaaaggtagttttttccttcattgtttcatgatcactataggaacctatagttagttatcaagagaacatttgagtattgacttttaagttttacgttgtgatcagtatgctcacagaaaatgtgttcaacgttggtgtaatgaaaagggaaacactatatgcgaaatctgtcatcaggtatatacattctttctcttgatactaatgatgtatgatttgtagaggatgcagctcaaattaaactttctcttattccagccataccaagctggatatacctctccaccaccaccaccacaatctgaagaaactactattgacattgggtatgatcattttcattattctgtttctgtcatacactttaggtttggtttcatgacttgtaattgttctgacttatttgtctgttttttagtggaggatggagaatctcgggtttggatttagatgatccacgtctcttggcaatagcagaagctgaacgtcagattttagaatcagaatatgatgattatacagcttcagataccagtggagctgcatttttccgctctgctgctttaatagtaagtctaaagctcctcaacaagtttcaattactcccgagtatttttactaatttctcttctcttttgcagttgatgactcttcttctattgcgacatgcactgactataccagattattcagatagtgaagatgatgatccttcttcaatactttctgtaagttactacttcttccttttttccagcatatactggaaaagtttcgtataagttctaactccaaaccacaaaatcatcttgcagcttttcttactccgagctgccagttttcttcttccttgctacatcatggcatcagccatcagtatcctgcatcgccgtagacagagacaggaagcagcggacttggccactcggtttgcgttggtgctcagctcgcgccaacctagacccgtgattaattatttgtcaatggagccatgattttatagttccactctaagagtttcaggtgtatatgcttttcaaatatttcatcagaaaaaagattcatgaactgctgttaaaagagtggtttacagtaagtagaaagaagaatctcttcttcttcttctcacttcttgcaaagctattgaaactatcttttctgatgaaatcattgaatcatatgtggtgttaatcaagatttggtagcaacaagaaccatcacaagatctacatgatggtccttctgaatcagctttcttacaaacaaggagtgtcctaacttagtgcagagtttttttttttacaagtattcgattctaagaaagattgtgtatgtagattaaagagtttctgattctgtagcattaagattttcaataacacttgattgagagatgagcatttcactttttaggtaaagaaaaacgagacacataatttgtaatctgtgtaaataaatttgttttttgttccaaaaagattcatctctaccatattagttcatacattactgtcatgatgttgtaataaagataactctaccaaaacccaaattgcattaagtatgaaatctgttctcgaatacaaaatatcttactaacatcgagcacataatgaagctttttgatgttaaatgcggacagcacaaagagcatggctcagagctagtttgcctgcaatagctccttaatgtcatacccttggatctacaaaaaacaacagagacaaaacaaacataagctaagagttgatatgttattttgacattgtagtgatcataggaatgagttttctacctgaagaaaagtgagtagcaaaataactcccgagttccagaaaccgtgtatgaccattggggtaatgagattgcgggtttgtgcatatgataatcccaaaacacttcctaaaccaaaagatacttattgttcatccagaaatgttcataaccatgagaaaatgcaaatggttttgtttttagttatgttttacctagaataaacagctgcgggaattcaccaggtgtgaaatgggcaagggcaaacgcagctgagctgatgatgatcgctattggggtcgggaccctgaaatacagaacgtaacaaaatgtagtaagcttttgtccagaaccaaatgagaaaaaagaacagaggttttaccatttggtaagagagaccatgaagaatccgcgaaacacggtctcctccagaagtggagcaaggattccagttatgcccactaagcttaaggtgctgtattatgtgcaatgtgtgatcaaattctagtattaacgcacatcgcagtttctatttctttgaggaaataccttatgtttgaggatccaattaatggaagaagcttcatcaaagagtctacctgaaaacatcacactaggcctcattactattatccaacaaatatttcgaaaacaaaacataaagcatggttttgaattctcctaacctccctttcaggtgcttctgtcctgaacacggataaaacaacacctgttaacgcaatagcaccaacagcaccaaccagaccgattccaccccacacaagccatcctttttgcaggttgacgggttgtctcaaatctgacgatcgaacaaacagtcaactaccaataaaagagcaaaccatgctgatagaaaaaaaaaaaaaaaaaaaaaaaacgtaccatagcgaagaatatcttcaggaagtgggtcgaaggttttggcaacagtgaatatgacagcaagtaccaccgcggttgttaggctgccaaatatttagacaatgttattcaacataagccaaacctcaagagagataactaattttacaatgtgaaatcagctaaagcaacgagattatataatgagtttacattaacagagtaaaaaagagcaaagaatacacaaaagagtagtatttttttggttacccttgatccaggaacaaaatctccgccttatcgtccaaggtcagtttctcaacgtcgattcctaaaaacggtatgactgccatctcggttaatcctgtcaaaacaaaactgcctgggaacaaaattaatctcactccatgcattacacagagaatagtcactgaacattaaactatttaaccataacagagagattatctttcagatcagtctactcaaccatcacatttatcttagcacacagtctatgtactttcatcaaactccaaccctaaagtcatcaaaagggaaagcttttgatgagagtaccttagtgcacaagcaaacgaagttaacgaaactgtctgccatccccatggaacttcccatctctgaagtatcggccactctgagctacctccttgtaactacaacaaatataacaatcaaaacttcaaataatttctcaaaggtctagtcttttttcacattccaatagaatttggattcaattgaacaagttacatagagctgcctcagaaaaattcagaccggaaactaaacaagaatctaatttagatagagtcagtgagacagtaacctttccctctcctccaggttcctttccagagttgaaaatgcaggccgatctccatttcttccgattaaccgtaaataaccggcggctagcaaatcctggagaaaaccggctcaaaccgccgtaagtacaagtcttcggaagaattaacctccttgaatcggataaacatagaagagacgaagattgagataaacacgagattatctgagaaaccattttgaaattttctgttgttcttagagaacttccacacatgaaccaacacgattatcagattgaggaagaggataagatccgactaaaacgagcgggtagaaaaaaaccgttacttacttaaaataacgttgtttaaggcccatttatgtcagtataggcccaaagcccattaacgaccaactaactcgacgacaagtctttgtcagtatatcacaaaatacgtacatccctcgtgtcttctaatttgtaattttgttccttgggagaatcatgtccactatttttcttttttcattttccttataaccaagacaaaatataattaatattttgtttatacattagcacaaaatcactggcaaataggcagtcttgtcccagtaatggaacccacacgacatagcttcaaaaaaaaaacaaggaacttcctcatttcttctatttatattactcaaatctaaatcatccctaagaaatagtaatacacaaaaagaaacaaaatggtgaccttaacttcatcttcttcaactccaaacgtatcttttgatttcatgatgaacaataataataacagtaacaatctctatggtcctttctcttcttcttctacttctttctcttacttgacaagcaaggaagatgctctcacccagaagaacctaatgagtggtatcaccaatgatgttcttggaattaacaagaaagcttctgaagatttggagatcagtgtgtttggagctgagaagtacttcaatggagatatggattctgaccacagtcctagacttgtgtctcctctgccagatccagaagttccaatagagagaatctttgttggtccgaagcaaagctcgaagaattcctcggaaactcctagtcttcggtctgaatccagttggaatagccagagtttgttgcttcagagcaaatatgtagagaagaagaagaacatcaagaaaaactctagttgcaacagttactttcaggagaaggatatgagtagcaatcacaaggtgagtaataagaagagttttctcgctactcttggctgcagatgcgtgtgttcgaactggagttcagtggatgtcgtcgacgacaagagaagaagctctggtctgaagaagatcaagactcaattgagtttctctggagatctaagctcggagatgaagattcatcaacaacaacaagaagcaatgctagagcagaggaagtctctggaaatatttggatctcctcttattgagaagagaatcattcagaagaaatttccatgggaatactcgagctctgcgaaaaaagaagaacatggattctctgtgaagtatgaagaagaagaagatgggagtgtgagcgatgtaagtacggatctttttgagattgagagcttaacagggaaggcaaacccttttcttgcaaggcaaggaagtagtgatccagactcaccagatggttatgcaccaagtgaggtaagcatacaatggagtgtagtgacagcaagtgtagcagatttctctgttatgtctgaatgtgctacgagtcccgtcaaaaagaaccggtcttttcagattcctcgaatccctatcatggcaaaatcaaaccgagaaatcgcgcctcagagacggaaatctagcagtagcggtttattaatgggatgcaagagtcataaatctgtcagagtttctggtgattcatacacaagcatgaacagaacaccgagctatgttccaagattccctgtagaagctaatccaacaagcactgaaacaagaaggaggatcagcagtagttctgtttctcacacgcaatcgccttttttgtatacttaattatgccaaaaacctgagctcctttcgttttacatgtaaaatgtctattgagtggaaaatatttgatttgctaataccatcttcatattgttgtacctgaaaacagtagtttttgatttaactggtttattaaggaagaatgtcgatagagaagtgtaaatcaatctgtatcatcaatcaatacttatctgctgaccacaaatgagtaaaagatgaaatgtgatgccaagaactcatctattgttgccagagattataaggaactgcaccatgtgaacaatagacacttgggtctaatccgcaaataagacataaccaagagtgcaattccatgtgaaatattaagatgtgattgtaaccttttgttgacttaggagacataattaaatgcagcacgtagactagacacaaaacacatttggtccacctcattttcatgtgcttgtctcaagaatagaaagataacctcattaggcttagatttaacggtttaatcaaagaccgtacgagttgcctaaaagagcctttaatgaggaaactcaatcaaacaatgatagtgtcctttcacctaacatgtcttaaaagccactccagagtcttctggtccagaactcatctccagtgtcaagaccatgtgatgataatgagataaagtagacgtcgacaaaaccttaattgtgtcattgatgatgatatgtctctgtaaccaactcaggaggaatgttaggttttgggaaaaagattgatttgtcatacagtttaaagttttagttcaagattcagatcttacagctggatctaatcaagaaacaaccttttgatattaaacccaatcaaccatgtcacaaagtatcaatagatcttgaagataagtattgtatccttttcaaaggtccacttttgaaataattgaacagtgacttcatttagtctatgaaactaactatatagagaaaaactaccccgttgctgccatgtttggagaggataagaacaacaaaagcgagaagccctttgcataaaagaaagaatcaacgactctgcgtatgtcaattcgtaacaaaggagatcaatgagactctcacaggtctcaaaacctggaattataaagcagataataataacagagaagatctgaagttttggctattacaagataaatttactgctggcttacacagaaacatatgcccgcagatcgaaaaaaggatagattggaattgtatgtacaattacaagtacgcaaaggttacagtggttctctaacgagcaaaatgatgacttagcattgacaagaagccccaaaagaaagaaagagaaattactcatctttggatactttgattggccgtgtttcaaatcctccattggctcttttctccaatgaataaggcaagtaagtgccgagaatcctatcccacataacaaagaatggctgcgagaagttgtatttggttccatagagttggtggtgaacatcatggtaagcagagttattactgaagaagatgtgaaatggatttcccggaagccatagtccacaatgatcatctactgttttgatggtagcgaaggagaagaaaaagatggctgttcttggggacataccagagaagaggaaagacaaagcaccaccaatagtgtccaagagaagaccttctagtggatggttgtatagagctccatacgaataaggcacaataaggcgatgatgctgagagtggatgtgcttgtataagaacttgttgaggtgcatatatcgatgaatgaaatattgccaagtgtcaattacaagcatagcgatgataaactgcctagccagaagtagaatggaaaattgctgtgtcgtagcagcatctgcatcacttcctgttatctaaagagaacaaccaaattccaaacaaaatatttcaggtaaacaagaaacaaatgctccaaaatgctaatatatgaagctctatcaacaaaatatccagagtgtaccataacatgagaactagaaacctcaatcaatttcttccaatacagagaaacatcacaagctcacgactctgaaacacacaaatagtgagaaattccaagactatctataacggtctcccatgcaagagaacaaaaccttgcacatgtgaatgatgaagggtaaagattgtattcctctaagcactattagacaagggaatcacaaatctagacgtaaaagcttttctaaagtaacgccttatgttcaagaatttcaagtgaaacaatctagcaaattctctatataaaacagcaagaagcaggagattcaagttttatttcatcaaacaatctccagaatctaaactattcttaatgcagcctaaatctgtaaccttgatccaacagcttcaggacaacaaaaggtgaattgaaatcagaaaacccctaattcattctcatcgacctaagttcactaaccacaaaattagattaacaagaagcacaaggaggacaacaacattattagcataatccacaaccaaaatcctataacattcacaaatttgccacaatgttcaaagaagggagagagagagagagattcaataccttgaagagaataacggagataatagcctgaagagtctgttgaagaagaacgcccttaacgacggcagatttagaaacgagattcttctcatcctcatctatcttcgaatgcaatctatatttatccaaagatcctaagcaaatgtacatccctgaatacacccaatacaccagaatcggcacaaatgtccccagaaattcatctgaaatcacgaaactcatcatctctaattctaatcaatctctcccccacaacaactcgagaatacgaaatcaaacaccgccagaagaaaatcgcatcactcttcgctaaactacacgaaggagagattagattataatcttcttcttcctcgttgcttcggtgttttctttcgtcgtcgagaagaataggagaagaaaatgcagaggaggagatgatgaagagatctaacgtgatttttcaggtgggacccaactattcggaattttccacgtggctttaaacgaatggtcaaggcgccaactggtttcaattttaatgtgtgctaattaattacaatctctacatattaaaaatttaatatacgaatggtgaaaatatgattagaaacacatgccaaaaaacataaaagtctaaaaacaaaatcattgatttgattttgcctctctgttctcttatctgtacaattgtggacacatttggtggctacctcgtggggttggcaataatgtggtgtttatcgtttattaattgatatttctataaaatatgtaaaaaacattaactcattagtagtttaattagatcttctctgcttgatttccgattcagattcaaaacaattagagaagtagcaaaaaatgtgtgtaagaatacacaaatatattgtctaacgaagataacatactataatgtctaatataaaataaaattacaaccaaaaatagaaaatggagcactaataagatcgcgtaagtcaataacgaatctagtgttacaactagtagtgcacaagatgtagtagtaactctttcataacaggataagtaacttactttgcgagggcagccaataatggggactagagtcggagaacaacaaataatgaacttcaagactctgcttttgttggctccaacgactcttccggacctccagcttcctcaacaagctggttaaaaacggcacagcaaataacggttaatagtgagaaagatgctatcttaagtcctgtagagttagtcagtgagtgagattagagggagtgaacataccaaagaaccgacttgctcataggctctcattgctttcggatcttcttcatattcgtatcccaattgtagaatccgtgggccgttgactgaccaaaatgcccttcgacctgcctcctgcaacatcaaaagtagttttgacataacagaggaccttttgtaagttttgggtttgattggtccttcacaagagttcacaagaagggaaagcgagacagagaaatgttttacctctaagatgatcaaatatatagcttcgagtgtctgaacgcgaatgtcaggatcagtaactggttctcgctcaatggacagtgcacttccaagctcaggtggcatttttgcgacatcttgctcactgtatgtctaaggaaagtaaaacccaataatcagaaactattttctcataaaagaagaaaacctttgtaagcaacaacgtagcagctataaagcaaaatcaacaaaccttgctgcctgcaactggtaggagcagagcgggccaaagaaactctgatatcaagagtatattctggagttggtttttggcttcaaaacaacagttacgaatagtcccagcaacctgaaagccgataagcataatccatgttaaattgttcaaagggtatagactaagcaacatgttcattaaagagtaatctgccaaactccttttaaacgtacccctttctttcgcaattgatttgttgaatcaaactgcctaatgatctgttttaatagtcgtctctttggctccagtaacaatttcctcccatcttctgtttttgatatgttgacaaggatcgaaccaacatgctcaaactgatcatctggtgcgcaaataagaacaatattcagtaattcattcctctttttatacagtagctatgaaacttgattgcaaactaaaaaaactaccagtaagtaactacgcataatattcaatggtgccaatgcaaacattaaaattctagactgtcctaccgaggattagatttagatatatgaaacaaaaacgtgatatatgaaaaggaaattccaaactatcatatctagaagtagatatatatatatataaacttggacaaattatattacaatactaaagtgggaagtacataccagcagtttcaccagaagacctgcaaaatgacctaacaagcttcatgatatgtagtccatgcatcttctcatcgtcaatctaacaaaggcataaagttttacacgattagctacgtcaccattagactaccaaaagataatccccactatatattacacaaatttaacttatgataaacgacctgaagcaaagaagaaaccccatcatccaactgagtaagattcactagaagcataacaagtaatctggtaatacaagactctggcttatacaacatgtccatggccactttaatcaaacccatttgaatcatcttctttgccaattcacacttctgagaaagattaacaagagcttgagctgctggctctgatacctcctgcaaaattgaattcaaaacaacatttcaatatctctcaatccaaattcaggaaacaattagtgcttcttaagagttgattcaatgaccttgctttcatttagaagctgagacaatgatggaagaagaatctcggaatactttgatagagattgtaaaccttcctcggaaccagttaaaccactaacaatttccaccgcagctttcttcacctacaagtttgtttcttcattcaatcagactcatcggtaacaaaaaccctagaatctaaaattatcaatgcatccccatagctcagaaacagatgaaaccaaaaagcttacaggcggtgaaggagatgacaaaaattcgacaagctcttccagctccgtcaccatatctccgaggaagaattttccgtcgagagagagagagtatcaacgtttctgcgcgtaaatgtcaccgccggcgaacacgaaaaatcctcagggtttttgttgtacaactaaactaaacactctaaattgttcagaaggtttaaaaaaaccccaaattcagtaatattgcaaaacaacccacagactaatcaaagttttcataatcaccttccaattaatagtaatacgttttgggttattttgtcaaaattttagttagtttgaggattgttttaaaattttacctaaaataaaaccagtttcatctttgagacaaaaatttgtccgtggaagaaatcttgacattttcggatttgacaaagatggaagcttgtttgagatgttcacgaggaagctatctaattgaagccatgagaccactctccagctctctccggccttcttcttctgtctcttttagcaccggttagtttctactttctaatccttctctgtttctcaattaaaatgaccaaaattgaattagagtctgtgagttgcattttgattttggaattgggtattctgtaaattagggttcttattgtatgtctgtcaaaatctgacctttttttttacttcaattatttggtcattgtgaaggcaagccaatcaagagagcttatgatggattgttgcttgatgctggaggaactcttttgcaattgtcgaaacctgttcatgaaacctacgcttccttgggccaaaaatatggtcactttcttacactctttgtctttgatctgttccaaaaccaatttcagatgttctcatgttggcatttgtttctagttcaggtctcaagacaactccagctgagatcaaggaaggtttcaagagagttttttctgccccttggcctgagaagttacgttaccaggtccctaaatgcatgtgtgaatctctctttgtaatagattctatctttgctcgttactgtaagcaaacgtattaaaagagaacattctttcattgttagggagatggaagaccattctggaagcttgttgtttcggaagctactggttgttctgataatgactacttcgaagacgtctaccaagtgagtatcgagtgaaagactctttctttgaggcttttgactagtctttcggttccattaacaatccatcacattgttttatctcttaagtattatgcgaatggcgaggcatggcatctcccagaaggagcttatgagacaatgtcactactgaaagatgctggaggttattattactctctccttgttaacttagataactttttgtattctttatggcggatttgtaaaattggtgttagatgattgcagttaagatggctgttgtgtctaatttcgataccaggctaagaaagctattgaaggatcttaatgtcatagatatgtaagctttgtcatgttttgttatataaaccagaagtctgagtaccaaagttaacaccatgaatggtaatcgtttataatgcttgcatctcttgcaggttcgatgctgtgattgtatccgcagaagtcggatacgagaagcctgatgaacgaatcttcaaatctgcgttaggtattggcatattgcattctaaactgaagtgttgtttcgtttaaattataagaaaggtttcagagttaacattttgtgtcaagcggagaacaaattaacgttaacattttgtgtcaagcgcagaacaaatcagcgtagatgtaaacagagcagtgcatgtcggagatgatgaaggagctgataaaggcggagcaaacgccatcggtattgcttgttggtgcgccaaatatacttttcatcttgttttttccgaggtttttaaattctcatccatcataacacatagtgctttttgtttatctgttttctttgaaaatttaggttgtggggagaagatgtgcagacattttcggacatacaaaagcggatcttggtttcagaactctaagcttcaaagattttgttctgcaatatttttcagaccctgtacacacttactcaatcaacactgtaatctgtctctttaaaaatttaattaataatgaaaaagctgcaaacttggacaacaagaatctaaaatttaaatcaaatagatggatccacgagaagcaaacaaaaagaagaaaatggtgaaagttacaatatagagattaaactctcgaaataacaaaaaacactatctccgcaacgataggtgcctatggaaactgaatcaacagatttggttttgatatcatatatcatcagctgtctactatttgatctaggacaacacaaaagcttattcttctccaaaatggctactggtaatgattgcgtaacactacgattcactatcgaatatatttgttcccaggtcttgttctctgaattgaacgaccatattatcatttgttggagaggtttactaaccgataagcacaaacggttattcaggctgcgtgtgataatgtttctatgatctgcttccgcaaaaggagctttagagataacttgaaaagtttcggtgtggagatctaacgctaaaactttaatttctttcttcccggttaaccaataaagcgatccatctacatacagagcatgcccccgagacgaggaagtattaatccgataaggagaagaaggattgatatacctccaagtgttggtgctaaaatcaaaaacttcacatgtagtagcgttttctaggccaagttcggaagagttatacataaccaaaccggtttgtatatgccactgattttgtctttgccaaatccaaatttaacgtgactaaaataacttggctgctcaagacagatttgttgcaacctggaaacagggaaacgtcgatgccatcgagtggcgggattataaacaatgttgtttaaggtttggtaatcaaagaggcaaacaagaccgtcacaactattgtggaaaagttggtaaatatgatatcgttctgatgatatcaacaacacgttagttttaagtggaggagaatcagcagtaacatgatggggcaacaccaacgtactgggtacttcagacaccaatacaagatttagatctttcccgccagctgagcagatcaactgtttcgcctggaaatattgagattcgattgtcaacttccattgtttgcaagcagacttgaatctgagcagagatttcaccggaactctctcaagaatatcctcaacggtgtcgtggggaagcaattgcattatttctctgtctattgagaggattttgttctgagtgatggataacatgaaagatatgcttatttgtatcaattcaatccaatgttgattttttccttgaggaggaagataaaaaaaaaaaaacgtatatacaatcgatgggccctaaccctatccctaacaaatctctttaatatgtaatgcgctttaatagttaaagcccattagttaaaaacccagagctatattgttgacctagcaaatttcggatctataaattgaagccattttctaggtcattagttttttcgtcgagcagccgcgctttttggccgaggaaggataaagagagacgccatgggaagaagtaagtttctctcgatctcttgtgacttctctgtcaggatttctgtgttcttccgattcctccatggatttaattaaccaaatgttctctctttgttgcgattttgagattctgcgattcagtttttctattcatcggataaatgattaggtttatatagtttctctttagataccaattgattgattaggtttttatatactgtgatgattttgagctatatgagtttggtctgagctgaaatctgaataatctgaatattgatttaggacctgcgaggtgttaccgtcagatcaagggtaagccatacccaaagtctcgctactgtcgtggtgtgccagatccaaaaatcaggatctacgatgttggtatgaagaggaagggtgttgatgagtttccattctgtgtccatttggtgtcatgggagaaggagaatgtgtcaagtgaagcacttgaagctgcccgtattgcttgcaacaagtacatggtgaagtctgctggaaaagatgcttttcatttgaggattagggttcatcctttccatgttctcaggattaacaagatgctttcgtgtgctggagctgataggcttcagactggtatgagaggtgcttttggtaaagctttgggtacttgtgctcgtgttgctattggacaggttcttttgtctgttcgttgcaaggatgcccatggtcaccatgctcaagaggctcttcgtcgtgctaagttcaagttccctggtcgtcaaaagattattgtcagcaggaaatggtatgttcaaagattgatccttgaatcattttgttgtttgattgttttatggatacaagtaagctaactcatcaagtctttgacttttttttcaggggcttcacgaagtttaacagagctgacttcaccaagttgaggcaagagaagcgtgttgtccctgatggtgtcaacgctaaggtattattggctttacatcagaattgtcactctttgatcctatagcagtgatagttatcattggaaatatcatttgttgttgaattgaacaatgttttcgtttttttttcagttcctctcatgccatggacctttggctaaccgtcagccgggaagtgcctttttgccagcccactactgaagagtatcagaactgaagtatccttctcattccggtgaagaagaattataatcagcctgaatctttttacttatcgttatctctggtgttgttttaagtttttagttggacacaatcagtattctgaatctttttgtgactcttttgtttaagctctgaaatgattttgttccttcgttcttggccatatatctttcatttgcaagttttatcatggctttagctttaaatattttaattgaagatttgcttgaaaatcgttgaagttttagatagagatgggtgattgccttgttggatcatttagtatgcataaaagatttgaaattagcatagcaagcccatcttaggtattgtcatgcaaggctgagagttcaaagagaaaatgacagagacctacctacacgtcaaaatcagatgcaaactgccattttcctgattaagtctatctttgttttttttacttttcaaagaattaattgccataatttctgaagaaggaagcaaaaatcccaaaacagagaaccaagagaaaggagaaaaattgaaaagtttatggtattacttgcaagcaaaagatcaagttatcttgcaaacaacaactataagattaaaagctctttttcttctcttatcagagaattgaaagaagaacacacaaaacacataatatagtctctttgcgaaaaaatgaatgaaacgaatataaacaaaaattttaacaaatagtatagcagaactgaaaaactctagattctgaactttctccaccaaacttattacaagacctgtttctgttctttccaagaaactaacaataccaccaagatgattgtatccaattgaattcaaataaatttcttttataaccaaaattaataagaaaaaaaagactgcaactttcgacatctccaacggcaggagaatcataaaaatcatctgaaagttattgttgaaacccttttatcagcaacccatcaccgcgcaattgtaaacaaaattcgatgaatgtttcctaccgagcaatgtccatagaggcggacttcgatcactagatggtatccatgaattcagttcaatgtaccctccacctgaactcctaggaccaccaatcacaatcaacctctcaccgcaagctctaaacgctaatccccaaccgttaaccgagtcagctctttcgggcaatctccctaaagtaaaccatttcttactctccttatcatacttcctcacttccatatcagcatgatcagcagcatacaattcgttattcacaaccgcaacaagaggcggcgcctctgctgctgccggcatttcccggctccttggaggcgacatttccggtatctcagtccatttcttcgtctctaaatcaaactcctcaccacaagtaagcactttcgaatcatttccaccaattcctccaatcacatagaacttcccatccatgaaaacacctgaacacatcttccttggtttattcatcttcggaagtgtagtccaagtctgaagctcggagttatacatctcagcggaatcactgattttgccaaaagaatcaaaaccaccagcaaagatcgcaatctctcctagactcgctgagccaaacaaacacctcggagaattcatcctcataccggaagaccaagagttagtcaaaagactatatctatatataacatgagaagagtaatcatctttgcctaacacaagcaaatccgtaccaacagctaaagattctttatcggcacacatgaatgtaacacctgaaggcattgtaggcaaattcatccatcttctttcaaaaggattgaaagcaacccattccaaaagctgacaagagaagtaaacccaatgttcaacaatctggttttgcctcctgagtctataaatctctccggtcttcaccaaagaccgaaaactccggtttaaagaagcaatcgaaccgtaaccagacctcgagcaacgaatcaaacagcttatagaattgtctctgccaatatcattgataagtgaatcgccatcgctattaccattgttgttagaatcagattggtcttgttcttgttcatcttcttcaatggcttcattcccatgaattgaaaatcccatcaatctgggagacttgctctgtctgagctcatcaacatcattctccaatgctcttttgccattgatgagattagattcagaggaatcttctggttgtggatacatgtatggccactttgattctgaaagacgagaacttgagaaaatccttgacatcaaatatgtccgatcttccaccatcttctccgtacagattccgatgttagagaaatcagatcgagacgagaccaaacacgaaatgcaaaatggctaaaagagagagagagattctgagaaatcaaaagacgattagatgatccaaatctcgattgataaaaatggattcagaaggaaaaacaaaaatttgtctctttattgaaacatcaatcgccaaaacaaatttggtagcttcaaaagtcagatctttagattccaaatttgactcggaaaacaaaaaaagaaaacccagaaaaacgaatcactgatctgaatatgattcctttagcggagaagaagaaggagagaacaatggagaatctttaacaaggaagagattatataataataataataataataataagaagaagaaagtacttacggatttggattaacgaaagagaaagaacaaaaaaaaagaagattaagaatatttattcaattgtggtctgttggaaactctctgcgaatcggaagtgaagcgtaatgagtttcctcaggtctgaaagttaaactctttggatgtcgaattcaacttctctctctctctttcctctgttttattcttcttcttttttttacttgggttaaagcttttggaaacttaattaatttagtaataatggtttctctttctacatgacgtccgtagtccaaattattcagataagattttcataaaaggaaatattttagattaaaaaatcaagaaattcaaaactgtttctagttttgttttgttttctagtgttttgaagttaattaaatgttctaaagtttcagtactttacttgtttatttttttcctctggtcaaaggatgttaaattgctttgtagtaaaactctatgtacgtcatagtttttatttctttgtttttctacaaatgtacgtcaccaaaaaaaaacaactttacgttttaaaagatagatttctgtatgtaactattgacaatttttgaaggtaaagttgatttttgtgaagcacaggctaatttccgtgttcaatattttttttgattaatatacaatttatctgaccaattacacgttataaaatcctatattccacaaagaaaaatattaatattatctctattgaattattttagttgtttgctaatacgaaaaaaaagaacatataaacgattttaactagactactaaaacttttttttttcttttttgactagtaaaacttgaacactacaataattatcttagacgagatatatgaattttggtttgaaattgtatcgatggaatataattagtgggacaaataaaggacgacctagacgcatttccacgaaatattatttaggaatatatagtagtactttttcattggaatataattatactttttctgttcttcgaacataacatttcagttaaaaactgtactggaaagaagaggatgtatgtttatctgaataagctgaacagataaattaggaaaacgagaaagctgtcgacaaagtgatctagaggttcacggagcacgtgttgacgcacgtgggagtatatctttgcacattaaatcatgaaattagtgtattaataccattgttattactagtagtttattaccgagattaatgcattacttatttgttgtccgttgaccagaactgatatggtgggtgggctcttttatctcatcggaaaaaatattattcgtccgttctcttggacgtgttggtttatcataatttttattcatctacaagtgttttatcgtttagctgatggcctttttcaaagcatgagataaatctaaatgtaacaaatactaaaagattagtaagacacttattattattatggataaaggtcttgatcgtaccatatgttatctttacatatttcacgcattgattagaattttgataaatcatcgaagcttaagtcgcgccgaaagattttagcgtgcaactaaaggattattatattgcgagttgcatcttggcagctgtaatccactcattaattgccacgtgtgaaggccatctttaaacattatttggacggtagaaaagagctttatcagtcgttagaatttgtgagtaatctaatcaaatcatttgcatatctatctttctaaactgtgttttttctcttattttgttatatctatctttttatttagtttttgctttatcttcttaaggcgagatgtatggtatcgttaacagttaacacggtattttgactattatccaagctcgtgaaaccttttcataagtaattcaaggtgcaatgaaaatgaaaaaaaaaaaaaaatcgttgaagttgacatcgtatagaagaggtctaagatccatattttatgtactactttataaataaattacaaatttaatctttgagacattgtggtgttaataataaccattttgtatttactgaatttcgataatgtttgtgacgtattgttctatcaaagtttccaagtttgataagatttttggagtcaaaggtcaataactatgaatttaaaattccgttacctttcaacgatatttatctaatactatctcagcagaaatgcagttacccttaattaataaaaatatatatatattctacagagctgtttgtattttcatatggtaaagtttcattatcttttcgttttcaatgaatattggttttgacttttgaccacaaaaacaaaatgaatattggttggagaaaggttaaatataaatttatttatttttgctttcgaattttcttctaaaattatcgaataggtgactgtttttttttggcgtatcttattagtgacttgtgtctgaaagtgaagtcctaagagctgtccacgtgatctgtttgtattgtgtgttcacattccttttctttccacattaatctctcttatattaagtgtcttaattgatgactacattcctaatttatatatgtgaaagtgttattaagaatctgagtattgtgttacataagaatgggtataagattgctaaagagaatccccaaaattttgtttgtatttattttcgagtagttgatataccttctcatgtgagttacattactttacgagccattatccgacgcgtgaaagcccaggctacatctgtattcacaactgaggaaaaagacaaaattgccaacaaaagtattaggttgaaaattgatcattacaagttgcaagttgcagcacattacaatattttcttctcattacaaaaaatatcgaaaaagattttttgtgtgtgtatttgaatagctgttataccagctaattgttttgaattatccgtcgtaaggagataacgtggtggctcctaatacctttacttcttcttttcttctcttttggcaatgccttgtcattcaagtcaacgtcgaatttcaacacgtgctcttcgtaaactcaagattacatagatttgaatgtaactaacttatcacatcttatatctagtcttctaaattttgctgtctatggataatataacataatatatggtatataaacaacacattatgataaatatcttaaatacattcactttaatgggatcgtatgaaaacattttgtgtttcttttggtcataattgcaagttgaagtattggttaatgctgaccatcaggcaaatacgaagagtaaacaatacatgattaacatctaagaattgtttgttctggtttcggccgttttagttttcggtggatatggaaaaatgtgtagaacaaaaaggttcagaactccagaattctaccacacaaaagaaattgtttcaggtttgacgcttataatttatgatttgtggaacaatgacaaagattatcatcgactaatcttagaagacacttattaagaatcacatatgaaaaaagcttactagatacaaataatataataacaataaacaaactctattaacaatagaggaaaattgggagatatcaacttggaatgtgatatttgaatcgactaatcgagtcaattaaagacaaagaaaattatgatttaagaaaaacaggtgagtttgataaaacacgttgtagtcttgttgtagatctccgaattgacgtcaactcaatatcaaaatctttcactatgaaattcaaaatccgaatcaaaacgtctaacctagctatagaatatatacattagtcaatggtcaaccttttatattttattgttataatcatatatggtgaagataattgtatttggaggaccaatattcaactatttcctgtaatttagaacatttatttttttcttaaatatatgttttttgcttatatatagtcgcaatttttagaagttccataatccatatacttgaacttctaaagctatagtcgcaagcaccttattgttgttgtttaataaaagttctaattttggtagacaagtgaaaaaacaaaattaaactatctggtgtttacatatatgaaaaatatacatttccagcagtgaattttggttttgcatgaaaaatacataaatagcaattcactgcagcaggggtcagaatatagaaacatgaaccacacacataaaaaaaaagtagattctgactagatcaatctgaattaaaaactagtaaattttgacagacggacgtggccgtggaaagaagtagaaagagacaatgagagatggagaaagagagacgtaagtattgatttggccaacggctcatatgcaaagaatattaataataataatgttctttgcgtttttttaccaattacatcaaacatttgttaggcacacgtcttttctttttctcctttttagttaagggcatctccatccatgaaaaacccacaaagtttctcaaacaaaaaaaaattaatattatattataatttgattttttgattaaaaaaatatttttattaaaaagttgaatcaataattaaaagggaattatcatgatggattgtagagaatatctcagagtttctcaagtaagaaactttctactctctctccttcatttttattatttttattttttaattgtgagaaactcttataaaaaacccccaatgaaaatggtctaactttcttttccgttgaatttctctcatgtattaacagtaacataagtatttatatcacatacacttgtcaaatttgtctctttagagattttaaaaagttatcacttagagaacttttacctgtttggactttggacggttagacagataatatctaaaattactccaatttttatatatacatgcaatactaaggtataaaaaaggttctagaatgttaaaatcgttgctgaaaaaaaacaaaatcgtctatagattgttaatttttgcttcttgtacaaacacttagtaatgattaatgatttaattttaatatgtaaagactgatttttaaaataaaaaatagcataagatgaaaatttatgtttcaaaaaatatttgtgattatgggttgtttgagactggaaaataatcaaacaacattgggcctttcatgtagaattttttattacatttagaaccgttaacgatatgggctaactcaagacattaaaggcccaacattgagttactaaacggcgcagtttttagctttttaaaattgcgtctttttcgttcactgaaaaggtagtccttctctttcccactcacatcatcaacttcatcaattcatcacctttgtctctctttcaagcttctctgtgtgtgatctccgttggtcaacaacaactacaacaggtaacttctattcttcgattccttaaatttcttctctagagcttagtgaatcaacgatttaggtctgaacatatttggcaatctgtccttgctcaaatttcgcttgaaaatttcaatcccaaatcatgtaaagctaaatcggaaagttctatgtagttcccaaagttgaatcacgaactggaagtaatttaatttattgacttaggatatgttgaaatttttaggttttttgttttgtttttagcttattgagcagagatggatcatcaatttggatatggtgttgaagttactgggttatctccatctgttactcataatgatcttatcgatttcttctctttctctggtactatccaagatattgatattgtcaggtgagtctttttactttttagcaagtttgttgtttgtttgcttattctggattcaaaagagtacactttgtaatgttgttaatgagactaggtcgggtgagcaagcttgtactgcttatgtgatgtttaaggattcttattctcaagaaactgctgttttactcactgtaagtgttagtttggatttgattcactctttctatcttttttggatgtctcttgagaaatcactcacttctttgatatcttcagggcgcaacgatattggatcagcgtgtttgtataactcgttggggacaacatcacgaagagttcgatttctggaatgcgacttcgcgaggttttgaagatgaatcggactcacaagtatgtatcgcttttgacacttctctcaactttgatctttctgtcttctttttttgttaaaatagttaaatctaacggtcactggttcagtagtctttatgttgaagtttgatgcttggtctcaattctaaagcttattcgttcttcaatcatgtagcattatgctcaacgaagcgagttcaacgctggagaagcagtgacaaaagctcaagaagtggtgaaaataatgcttgccacaggattcgtgctaggcaaagacgctttaagcaaagctaaagcctttgatgaatcccacggcgtatcagctgcagcggtggctagagtatctcaactagaacagaggattggtcttactgacaaaatctttaccggacttgaagctgttagaatgactgaccaaaggtatcatgtttcagatacagctaaatcagctgtctttgccacaggaagaaccgcggcagcagctgcaactagtgttgtcaatagcagttacttctccagcggagctctttggctgtctggtgcattagagagagctgctaaagccgcatctgatctcggtacccgcggctcaaggcagtgaatagaccaatggcccgattcagaaccgtattcgtctgtgaatatatatgatgcaaagctgatcatgaataactggctcatgaagtgtgataagaccaaattttatcaaaacgaataccatatagaaatctatcaaagtatactctcacatgatgatgctgatatagagtttggttacattacctacatcttaactcttcattagtagcataatcttttttcttatataatttctgatttatatcattctatggttgatattgattcaatatttggatagatgttgtatccatagagcttaggccacgtggcacaatttgcgccaaaaaatcaaatccaaaaaacagagaagtcatcatcttttcactccaaatcttccagtcactcaaatcattctctcatggcagcttcttcctcaattccgccgtcaaccgccgtaacctccgtcgttcgcaaatctctcctcctctcaaccaccttctccttccccgcttcttcattgtctccctccacgaaactaccacaaagacacattcaaagattgctcctagcttcctcctccgcatccgcatccaccgttccttccgattccaaaccggcgaagaaagaaacagtctacttcgacggcggagctcattacggagatctattagccaatctcattctaggtctaaccatcctttggctcccactaaccttagctgcagtgtctcgagcttttaaccttcgttacaggttcactaacctccgcgtgacggttatttcgggactcaccggagatgatcggagcgatttctcgtacaaagtgataaaagacgttcaagttgtgccgaggttcatcggagaatggggagatatcatcattactttgaaagatggaactaaagtggatttgagaagtgtccctaagttcagagagattgctaagtactgtttatctatggctgatcaacctgctgttttgaaagaatctggtgctaaaggcttttgattatttctcatttctgggcaaaattgattcttcttgttgtgatttcttcagtacaaatcgaatcctttccatgttctttcatttgttattgatttcttcatctctgtattgttaagacgatcgtatctaaacggcgcgcgattttagctctacaataagaaacggcgtgatgtttggttaatgttgaaacggcaggtagtcctcttttagattagagaaatggcatggatattaatactatcttcttcttttttattcatatggctgcattttaagaatatagaggattaacagcccaaagtttggattaaaaaaaaaacagcccaaagttatttattaattattcaagttcaaaatagcgtcaattatctttaatttatatacacgtttatttatttctacttttctaataaccaagattcatcataagcaaattaatctctaaaaagtaaaaactatcaagtttatacaaatgggcaaacgaaaatgtataatttgaataatgtgcccacattaatttctatactcgcatatgaaaatatgattacgttttttatgggataacggattcaaatacaagaaatgggattacatattcaatagcttcctttgttagtactttaattctagtagttcaaagactaattaataagaactacatatggtcctatctgttaaatttgaccatattaatctaataatctccattggattccactaaaatttgttaaaaaaatattagtagagaatttcgtaagagaaggttgatgagtatgtatagggagtcttattaaagcttctgcctctgacacattctcatcaaatcttatgtagtcttccccatttcccaattttgaccatattattcttgtttttattctttgtttatcataccccgttgtcttctttcattgtttatcctatacgttttctaatcacatatagggtgtgatatggtgaaagcaaaaagatgtgggagtaaaataaaaatagattttggcgtaattatttctgtccattttctctaattgttttgtagcggaaaaaattataaagttttcgacactttcagctcaaacctttttttttcctttttctgtgaatcataggcgaatctagagtaatattttattttactctaacaaatataaccaataacacccatagtttttatatctccactccaatgatgcactatttttagagaaacatccgaaatatgaatacattatctccaaaatatagtgttagaagttggtttcgcaatgtgagttcatagaagttgcatataaagcataaatatacaccgtaaagatagatggctcactatccaccagcaactttcaattaaaaaggaacattttgcagaattcatatttctctctttgttcccaagctttatgtcacattgtttcacatgcatgggcagaatgggctgattggcacatatgtgcacttacatgtccgtgcgctgtgcgcatctgtaaaagttcatgtctacatggtaaacaagtacgcgtattgaatacgtacacatacatacctctaaaatggcgtattcacgagaaatccaaaatacaatatgggatcaatatccaatatcagctgaattcttcggataacttagaatctatatataaagcaaaaaccttataatatactattaactttatctcaaaaaggaaagtggttaattctgaatttggtcagtctttttaattttaaaataaatagaaaaagggcggcgcatagtagaagttttgtcaaatgtcaggctaacacgcatccttaaattgtgcaagaatgtctttcttacaccctcccattgtttcctcatataacagataaactgaaaaattctgctggtagatcattttgaataatttcagaaggataatccatatatatgctaactttaacaaaacagtatatatataaagcaatgaaaagaaattagagtgatcatatctaaaagataagaaaccttagtataaagccaaactaaaaatagaaaggttagtgtatataatatatacaaggaaaatctgatgatcaagggcaccttaatcgaatgataacggaggactaactaaaattaaaatggacatcggattcctgagactatataagagcttttcgttgtagccttgtaggtataggaggaagtattttaaaagaagaagtaaagctggctccaatatgagtgaggccccatgcgattgtaggaatcccaagcaagttaacctctactaaacgtttatattttaaatgccggaaaaaataaaaaatagtagtgcgtgttttctggattaatttgaggtgtgtgtatattttgatccaattttttttctaaaaactaacctttttgttgttgtctatattactctatatgtttcggaactgtcaatatactgtatttaagatataaaatgttcgttaaaattcagatattatggagccttcattttggaaaatatcatatttatcgtcttcccctctcctcctctgccttgactagaagaagtctagaacccaagaggtatgggagctgagcccttaaaccaaatgaatcgacttttgttatataaaatgagtccatactatacgatgtggcgaataaaagataaaaggcaacttagtgatgatacgagagccgcatgaaaccgaaatccacgggcacggcctaattgtactatagtatataaaagtgtacatatctatataaaatattttttttttgttagaataggatgatggtcaaaagatatacattgcattataaaatatgatctaaattttgttctctactataattttaagtaagagtcttagaaattttaagtatcttttctactgttattttaagtaaaagtctagaaattttaagtatatatgttttctacgtgacaaaattaattgacttaaaatggtttaatcctctaaagttatcatgcattgagtgagttcgaattcctatataagtagagatgaaatggtacatgaccattagactaaagaaacaggaagatataacattaacgcataaccatacgtacgtaactactactaccgtactacgtacgatctatagtaacgtgtgtatataataataattaataccaatacaattgttctgaagaatcgttaaacggaatcgaataatcacgtagtatccgatctacgtagatataactctctctcttttttgtttaattgtatttcaataacatagaaaatcacttactcttttcttttcagaaaatctcagttttcttcgaagtcgctaatttttgttttggtttaacatgtagacgtagtgggcagcgacgtagggagagagaagaaagacacgtggaggtgagtggtatgatttggagaccgctcctacttgggcatgatgtgatcagaaaaagagccccacgaacgttttcatctcattaaaactataatcaatctctctgggaacttgggccattccctccaacaactaacaccatcgacacatactttttgctgagttattttgtttatatattaattatgattatcaatgtattaatcttttgattatgtttgtcaagatatttttttttgtgtgcaaagtttgtcaaaatatttgagtcaccacttttattgtggatcttcacaagttcgcatactatcccacttatcattaaaactaacggaaacttttgtagtaatagattatcaaaacataatatatatgtagttttaagtatttcattccgatgattaattttagttaagtagaagtccataaaacaatgaggattcactgttggaaaaataaaaagaggattcaccactgctcaattctttttctttagatgcatgctaagtagaccatacattgtagtgttgctttcatgatgaggataaggtttaatctctttagaacacaaagtaagaaaaaatatatgccatattatgcatatgtattagttaattaaattaaattaaatttactgtgtttatgacgaataatatgacaatattgtcacggacttggtcaaaaatatttgctgcaaagtccacatagggttggccatagccttggaaaaaatagaatattttcaatcactctttctatttggaccctttgcatatttcattaatatgttttcagtcttttttttttttgtcaataaaatatattttcagtcttatttctcctaaattgacgtcgatataaactcaacataatatggaaatcaatattgtgtatagagtatttatgcaaatttatacaatccgagagctagtggagataacaggtgcttcaaaagcattaggtattgatccaatgggattgtagatgtgatggaagatgtatgttcactctcaatcacagtagatccaaaaaaagccacacaaaatggcataaagagtcgagaacgacccatgtggtggagggaatacttttctttctccccttttaaaaaactatcttgaacatatttacgaaaaccaaaccttaacagatatttaatgtatacataatatttacatgagtattatctcaaattacttaagacatgatttgctaatctcgacttatacgacgatctgctcatctcgactttcttaaaatgattgttttcccaatagaaaagttaaaagggggaaaacgtttccattcaattaaatgattgatattcagttaatcatttaacagcaaaatcaacatccaattacacgttcatgtatccatttaaaaaggattaaaagaagaagaagaagaagaagaagataaagtagtaaaagaaaatttaaaaggcatcgaatattataaagacctaagacttcgttggattaattttaaaagaaaattaaaaagtgaatgagtttgtagtagtagtgtaaaatgtgaactaaaaggaaggcttttgttgaacaaaaaaaaagaaaaaaggaaggcttttacctagggttccattatttatcatagactttagtccttttttggtttcttgtaactctatcggtgtctgcttgtgggccttctcataccaccgacccttttgctccataacatatatacacacacctttgtttatttagtaatttgtgagaatgactagtttttgttatttgtccccaaaaaaaaaaaaaaaactagtttttgttgttatacgatgttcaaatatttgtacacattggaaacataataagtcaattcaaattacgcaagctaccaccttatggtaatatctataagaatgtaataactaagtaggtttccacattatattggtttttaagattacctcaaaaatctattatcttttgtttcaaaatatttatcgattttaggcatcgaatctagttacatacacctctattatttgaaaatgaatgaactgatgatgattgaagtgttgagaaatgtgggtgatgtcatgtacagtaagtcaataatattgtagtggagagaacagaatgaagcagtgaatcactgattcttccccgccaaaacatccgaatctaatagtattaacagttcaaaacatcgttttctaacctgatactagcttaattatattgcatttagagttttgtttggtttactaaaattgaacccattgatttttccttgacatgcacttgtcagcaatgctatgtgctttttatttggacatatatgtgtctcagtctcactgtctccatgtgtatacatcattcagttacaaatcgataatcatattttataactgatacatctacctatttattgcgcgtacttacgacggttccgttgagacttgagatagttacgttaattcacgtatcgatcgttttcattcaaaatattgttaatgtattctacataccttgatatgcactagtacgtacattcagaaaaatcgagtccggtgatcgaagaatcatacaacacgtacgtacgatcgtacgcaaacatgttaatgagcaaatatatatagttattattgttatcaaatactaataaatatacataactttgatacttggtacttggtagtactattatttagagatattatatttaataataaaaataataaactgggctggaccaagattgacctcactgtttatctttttcttttttgataacttgttttaatatatgtcttttcgaaagaaacttgagtgaaatcgaaaaaataaaatacaaaacaaaacaaaaagaaataatcttgatatatatgctaccgaaattttcgaaatgaagttaacatataaacataaaactataacgttaagtttaatcgcattgatcgcattactaagttgaatccttatatttattatactcatgcagaacaaaaaaaatcacgtgtgataattttggtatagttatgatccaattagaaacttttttgtttcagaaagaaattcacatcaatcttaaaagagaactcccacttaataacaaaagagaagattcatgaaattgggtagaagctttaggaaatgttcctttgtttggacacttattataagttatgtcaatattatatgttattgacacttcattagagtaaaatacaaactagaaactgagaagagaattaaacttgggcctaaaactatatagtctagaaaataaattaaaagcaaatataattacacaaaaggatgtagacaaaagacaattaagtaacagtaaaataatactacaattttcttacatccactgctcataaaatgtgatatgtcagaagtgcttcgctgtctaaatttcaaatccaaggcaccacgcgctaatgtaccgcttgtatctcatgttccaattaaaattcgacaattcataattcatcaactattcattcttgtttttgttgtcaaaactgaattttctccaaataaaatcaaactttgaaatttctctcttggatatttataaatacatgatcattctgactaataaaaagaaaatcactaatccggcttaatttttcaaaagttaattattctctcgaaagagtagataaatttgagagaaattaatgacttcaaggataattactttagttatttatttgtttgtttattccatttgtacacacacacactaaagactagagggtagcaagtagttaccaaaattaattgcattggtcgtgactggtgggagctttccgtttgggtctatctaaattaaattgaaacagctcactggacatgactttgcatttgagattaaaagaaattaattttgggaaaattcaaaaatttgaaacctaaagaatcgaaatcaaacgaataatggccgttgaatcacgttgcttgtcatgtaccctctttaacaaaacaccaatgaagtgttgccaatatccatcgcccatttctttttgttccaatccaacgtacattttctaattcttgtttactctcctttcgttgttatttttataataaatgaatatgctagtcttttgttttcttttccaatattttttattataaaaactacaattaaattcgatagtttagttgatgaattttacgagaaaacataaaagtgaaggccttcaaagagttcaaacaactaaaagattactttacataaaatcgtacttgaaactaaaataaatcgttacatgtaaacagaaatgtcattcctcataacaaaatgatatacatatttatacatgcatccatgaatcgtgtatattgaaccatatagtagtattagctgaaagtgcacacttcaaaatatgggtgtaggaaacccataaaagtaatcatgttctccacaaaactctagacactagtaccgtaacataatggcaagtgtttttcttacaatatcttctactactactactactatactttaaaaaacacaatggcaatgggactagatgtaagattaataaatgaaaatagctagagtctataaaataaaataaacaaaaatttggggaaaaaagaaagagaaagaaacataattggtgaagaagagaggcagtaatggagaacaaggtcatgggtttcagcgttttttatttttcaaacttcccttcatacccgcgcacttactcttccttccgttggctttcctttttatttttattagtatctttcttctttaaatattttatagagttctacaaatttaaaaaggttttcatgtggagagagaaataatttatattcagattgaatcaagaaaatgtgtggttcttttgttttctcatttttctctctagcattttgaatttggtaagacaaaacccatgtcttcatgattcttgaatgactcataaaaaaagttttcttatataaatagccattttctttttgctgttttggagaaactcgatctctgtcaaaaaaaaaaatcgaatcagaggaattatattggcagtggagaataaaaataaagcaggtaaaaaactcgagagttttcagtgacgaaaatgagttccttttcagagtttgtctttaattaggtttttttctttctttctttttttttcctgcaaaaaagttgaagaagtcattgtgtgtgataggaggagttggatttttaaaaaaggtaacggagcgtcgaagaaaaataaatagaaaataaacagagacagaaagaggacatatacagtaagaaaatataaagagagagacagtagtaagaaagaagaagaagaaaaatggaagatacgaagaagaaaaagaagaagaatattaacaacaaccaagattccaagaaaaaagagcgtcatattgttacttggtcacaagaggtctgtacatatatatgatgaaactctgtttttgttttgtattgctctgtttttgagtgattctgaaatgggtttatggagttgcaggaagatgttatactaagagaacaaataactctacatggaactgaaaagtgagctttcattattcatttcactcttctgtttatttgctatgaaaagtctttttttttcttatataaaatttttttccttggaaagtttttgttttttgaaaagatggattcttaaaagaggttgttgagatatggtttccgttgtgtgttttgatgatattagttgggcgatcattgcatcaaagttcaaagacaaaagcacaagacaatgcagaagaaggttactgaatcgattcaatatctgtttttctgttttttttctgtaggcaaaaactttcctgggttctgttttgaaatccggagatggatttttgtttgcagatggtatacatacttaaactctgatttcaaaagaggaggttggtcccctgaagaagatatgcttttgtgtgaggtgacttcacttacacagacttccattacatggataagatttttaagtttggtgtttgtggtttatgtctgatctttaatggacttttgtgtgattggtttctcaggcacaaagagtatttggtaatagatggactgagatagcaaaggtggtttcaggcaggtatagctcaagctcaaactctaaaggtgtaggtgaagtcatcattataagaccagagtggttaaactaatgttctgttcgttatgtgttttgtagaactgataatgctgtgaagaacaggtttacaacactttgtaagaagagagccaagcatgaagctatgactaaagacagcaactcaaacaccaaaagaatgttgttcttagacggtatcagtacaccgcgaaaatccgagaatgaaactcctattgctaagaaattgaagtaagttttgtttcttttttgatcaaataaacttaagtttcctgagtgtgttcacttttcacaaatttcatgggggtttgttggttattatacaggagaagtcacattctagatctcacagagatcagtaactatggaagggccgaggcatgtgtgaatcagcagataaggtctccattttcggttttagctcgaaatgccactggtattgatagcttggaagaacagaatcaaacaagcaatgtgaatgagagtgatggtgaagggatgtttcttaagaaggatgatccaaaagtgacagctttgatgcaacaagctgaacttttaagctccttggcgcagaaagttaatgcagacaacacagaacagagtatggagaatgcttggaaggtaaaccaaaaaacaacaaacttcgcagcatatcaaaatagcgaaaagtttcaagcttactaataacatacctcttgttgtatgcatatatacaggttcttcaggacttcttgaataaaggcaaggagaatgatttattcagatatggaatacctgatatagattttaagatcgaggaatttaaggaccttatagaggatttgaggagtggttatgaagacaatcaattatcttggaggtagcttttcatcaccacaaaaattttgtgttcatcttaaggttttgattgtataaccatttcatttgatgttctttaggcaacctgatcttcatgactcaccagctagctctgagtatagttccggatcaaccatcatggtggatcagtctggtgataaaacacaaccattctcagcagatactcagacagaacataagcaagttggagaggagttgctcgtcccgaaaaatcctgatgagaatatgcccatctcaggcgaagaaaagttcagctcgcctattcaggtcacgccattgttcagatctttggcagacggtataccaagtccacagttctccgaaagtgtaagcttcgcaccttctttgttcatcatacaatacttaggctttgaaaaaacaatgagtcttaaaagactgattgcttttgtaggagaggagcttcctgctaaaaacactagggatcgagtcctcatctccatgtccaagtgctaatccttcaaaaccacccccttgcaaaagagtccttctccatagcttgtaaaccaaccaaccatctctctcataccctaaaccgcggtttagtctccatggagacgtaattttttccacttttgcttagatttcatattaggttttgcagccatatcggcctggaagtttttgtgaagcgggcatgccatgatctgcattcctccctcaaggtttttaagtttctttcctggtcctagaatgttaacggtaacattttctagccccatcaaagaatgttctcaagaatctgccatatactcagattcagatttctctttcttttcttacttaacataaggaagccatctacaaaagaaggcaccagtgtgtctttaagaaaaaattctttggtttgtctctaagggctttactcagatacatcatctgagcattttccccagatttcttgatttgttttcatcatctctgtacagaatctctatcacatatatataaagaagttttccagagtgtaactttaggaaaaatgaaaaactcagaaggaagagtttgttgtattgttaagacaaatatatatgagtggaaatatatgatttgtcttttggtttgatatatataagtttcttctaatgcattagtttacattttgctaatggactaagctttcttctctctaactttcagacatatttggaagtaaaaagtttccaaatcaaaaacaattttcttgaagaattaaatattttgatccccaatctcagcttcaggcctttttcttcttctgcattctctgcagcttcctccatttcaggtaaatttggtaagacaatccaccgaacaccatcgacacacatccccattgtttggaagataacggattcccgctcaaaactgaagataccacgatgcttacaaacttcctggttgtggttatggtcgtgttagctagagacccgaatctgcttattgtcaagaagatgaagttttggcctactgcaccgcataaacagtacataagaatgtcccatgctgcctcagggtgttgcttgcagaactgcacagcttcaaatccgctcccatgtggcaatccaaacatgtagaccatgttgtatatggttccccataaattcattcccagcattatgtcccatgcgttagttttggggtacctgtatccatgtatggcgatgattaatgtccaacatctagaccatgttgtagatgtcagactgggttaagtatctgacagaatgtcaagagtcataccttgcggtaatggaatcctgggttgcgtttgtgaatccatcaaaggcaaggtttaagaagcaaagcccgtaaccaaggggtgcattgggatgtgctagcttgctgatggttttagagcttgtctgtaaaccaagtcaaagacggtttactacatttccacagacaaagtataacaaagattatgatcaaagttcctgaatgcagatttgcctaccttaagaagggcaaacatagatactcctccggcaacaagaaaggtgcaaagatactcaggcaaagtgtatcttatgccataaactaaggagcccatcagcataactacatgaaagaaaaaacatatataagatacacatagcagcagttgagagcgattatggattgatgctctaaattgacacctcacctggaatcattttggaagattttgcaaggacctgcaagaagcaagttttgcatcaatattacttcccaagaaaggttattacctcaactatcaaccataatcaagaaaaatgaggtttttattacactaacaatgcctaatttacctgagctgggtaactaatatactttaaagcttcaatgcccatagcaggaccaatggtattagtaatgccagcactccaatacgtccaccatggggctccaccagaacctccgttggaccagagcttaatcactgctcataatcaatcaaaaatacttcagttccatttattcgtctgttataaacttataattctaaggaataaacaatgaagatgccctactcacttatataagaccaaaccaagcagattacattctgagccaaattcagaaatgcaagatgctcgaatctcttcccatcttcaccaaatttcttcgtcgacctaattcgaaaatgttagagttctatcagctacatttctataaatttccaataattgcaaacgcatcaccaaccaggattccgagaatagaaacaatctcgaacaaacagaatcgagcaatgtcgagagaaaataatcaacgagctaaaataagattgatcgatttcgaccctaacgagttttacttacaaggtctcttgaagaatgccttggtatatgtaagctgcccagatcccagcgacacagaacgacaataacagaactcgccggagaccggaaccgtgagattccatcgccgcacgtcgcttattgttttatccgacggagctccggcgaaaatttgaatttcaattttacgctatttgatcagttttgcgatcaaattatgagatcggtctgaagtggaaacgaaagttattagagagagtgtaggaggcgcgagaaagacgtagattttccacgtgtaactgtgtcattggcttaataatctgacatgacacttctgattggctataggacgtggatttatttctggaatccaagtcatatgcacattcatgtctgagataggaatgggaactatgtgccgttttattgtcatgaaaacgtcacgcagtttcctagaacttgtaaacggatgttctttttacagcttgggccttaatttgattaagcaaacttgcacacagctaatcatgtcagtttgactaactgatgaattcatacaaatctaagatcacttgtggtaagaaaatgaaagaaaaaggcgtatatacacaaatggaggaaagttgccaacatgatttaattgattaaaatttagtgatgacccattgttaagattactaaaacaaaatatgatatatcttaaagtaaatgtgacaataacgtcaacatagcgagaaaagtttgaaatatcgaatttccattatattaaaacaaggtatcacatgcatgcactcatgcatagttcattatgatttgagtaattttctatacgaataatattatactatatctcaatgaaaatagaagttatatatattgggaaacggaatttatatgacatacttaatcctcatgggagaaccaattatacattttgaagagtcaaaagtcaaaactcaaaagagtgactcttaccggatacaaaatgaaaatagaagtcttggtgagataacaaattaatgtgtaacataacaatataatatcataaaagattccaaatggggcttttgtccacacgtgatatgcaatatgcaaaagaaaaaagaactctctttcgatctgccggtcaataacaatgtgaatatagattaactgattaataagtagtttcttgggtcaatgcatgggatattatatttaagaaatacaccaaaaatgtattcgacgttagccaccacgttccattaaaaattcaaatctaaatgatgattaccgtcgtctacatctatgattacaaattttttgtctactatgcgtttagttatttaccatggtttgacgattatatatataacacacataaattatgacggtttaacgttgtctcttaactcaaaacttaattttacaaaaatattatttaagagttgaatctcatactttaattattcatttggtcaactagaatgcgaaaaatccacaatacttcgtaactaatttcgggtcctttaaatcttgatcacctgttgatcaacaaaagatctacacataaagattgattcatccattgactaaacttttatttatcgaagaaagactatatatatctaatgcatgcatgccatatgcacaataatctaatagtaaatccaatacgtctcagaaagataaaatcgtccataataccaaattttattctaaggttttgatatctctcataatttggaagtgtatgtaaaagtttcttaaacataaatataacatccaaagaaaagttgtaaacacttaacatcttgattgaaggggaatctcgctaataattgtgactgaacgatagtaagtattattgtaaaatatcgatcaaaatttcaacgatatgggcgatccagacccaccactttgttgtcccttagcagacgtcaaccatgaccataattagttaaaaaaaacaccaaacaaaaaccacaacttccttttaattctttttaaattctaaatttcagactaacaaaaagtattcataagctgtttcatgtatgaatttaatatcatgaatactaataacttgagccattaactttaaccaaaaaaaaaaacttgaacaatctaatataattccctgtaacatttaaaagatggagatgggaaaacaagaattctaaagaaacattgtaaaaatgaaacagagacaaatattttcaagcaagtcttgtttcatttcatttctgtttgaaaaatgacaagtttaaagtcatgtctcatatgtgtaatattattaactttaaaatataacaaaataaatatctttgattactttttgaaatgttttttatctcaagaatttggaaattttcgttgattgatacattataaaatctgaaaattagatgtgaaacacgactttttgtccaccaccaatcctcctagaaattatcagtttatcactcgattactgaatgaatgaatgagttatctctgaaaagttgtcgtaccatttattatcccacgcggatttactgccgtgagcatgacgttaccgtatctatctcaaattactaaaattgtcctttccgatggccgtctaaaggaactaactcgagggcattttgtcattttgagaaattgttatgagtttgagtacaaaacaaaaggacacgacgactttgtattatttgcttcaaatcctctgttcttcaccttccttgttccttcttctctccttcttttttatatagattttcctttcatgttgtaatacttttattctattagcgttcatattcagctaaacagacattgcgccgccgttaagtcgaaaggatagaaagaaattaaagaaagaagaagcttgttgtctttgcttcttgaggctctcttcttgtcttgatcatctgttacgttgttccacgaaaagaacagtagctttgtctctccatatagggttattatctgaaatgggtaattgtttagattcatcagctaaagtggataatagcaaccatagcccacatgctaattctggtaactatttcctctcaagtctttattgcttaattgggttctatgttacagtttcttggatatttcttcttattctcaaaatgggtttttcgaataagtaatttgtccatctctggatcatcaaaagtcaaactcttttgaattgctctgtttagtacatgtgtttgatccatgtttgtatctgtattgatgttcttagcatcatgagtttgattgaaaacacaccaaactaaagagattttactatgtttgaatgatcattttaatagcttcttcgggctctaaagtttcaagcaagacaagccgttcaacgggtccttcaggactaagcacaacttcttacagcacagatagtagttttgggccattaccaacacttaggacagaaggagagatactttcatcgcctaacctaaaagctttcactttcaacgaactcaagaacgcgactaagaactttcgtcaagataatctactaggggaaggaggtttcggttgtgtattcaaaggatggattgatcaaacatctctcactgcttcacgtcccggttctggaatcgttgttgctgttaagcagcttaagcctgaaggttttcaaggtcataaagagtggttggtaagttcggtttctcgccctttttcggttcaccgtgattaatgagtgtgtgtttgctgacattttgagatattgttttttttttttttttcagactgaagtaaactatcttggtcaacttagtcacccaaatcttgtattactagttgggtattgcgcggaaggcgaaaaccggcttcttgtatatgaattcatgccaaaaggaagcttggagaatcatctttttagacgtatgttttcagcaactcaacaatcttgaattcaagaagaatcttacatgtttctttgtttttcagttttcttataatcatccggtcaatgttacttgcaggtggggcgcagccacttacatgggcaataaggatgaaagtggcggtaggtgcagctaaagggctaacttttcttcatgaagcaaagtcacaagtgatatacagagactttaaagctgctaacattctactcgacgctgtaataaacccgagcatatactctctataaccactttcgggatttgcttctgattcctaactgtttgaaactgtgtctaaatgcaggacttcaatgctaagctttcagatttcggattggcaaaagcaggtcctactggtgataatacacatgtgtcaacaaaggtcattggtactcatggatatgcagctcctgaatatgttgccacaggtttgttctaaacttacatacgcggtaataaactagacaataccacgagcccatctatggtctcaataaggttttatcagtttctgtgtaagacaacttcacaagctttttccaagaatgtttcaaaacctttgacttattaatctcgaaacgctttatctttctccaagaactcgtcaagagctttgacattaaccaaaaatctttgacctttagattgtttttgttttctctaagaactcatctaaacctcatcttcatccactgcaggtagattaaccgcaaagagtgatgtgtacagcttcggggtcgtgctactagaactaatatcaggacggcgtgccatggacaattcgaatggaggaaacgagtatagtcttgtagattgggcaacaccgtaccttggcgataagcgaaagctttttcgcataatggacacgaaactagggggtcaatatccacaaaagggagctttcacagctgctaatcttgcattgcaatgcttaaatcccgatgcaaaactccggccaaaaatgtcagaggttttagtcacattagaacagctagaatccgttgctaaacctggaaccaaacacacccaaatggaatctccaagatttcatcattcttctgttatgcagaaatctccggtaagatatagtcatgatcggcctctgctgcacatgactcctggtgcatcgcctttaccttcttacactcaatctcctcgtgtaagatgaaacacatttaagaaaacagatcgtgctttatgcttgtatgtgtactatatgtaaaaatgcaggcttgtctgtgtaattagagaggagtgattgcaaaggtttatacagagattaactatttacttcaactattttgtgtcttcaaacatatcagagtaaattgaagcaagatatgaaaatgatgtaatagactagacatgaacactgaccaaacactctctaaactcaccaaaccaaaccaaaatgcagaggaaacacactaagtaattgaattcgaccatgtaagatgagtagatgacactctcttttgcctgagccttcaccgtttccagtcggttctggttgacttgtctgaaacaatcaagaaagatatgggttaaaaggttatttatctgagtaaagcttcaatacttttataagaattctgtaaatttgagtcttgcttacgagttatgtccttggaagaagtaaaagatttgtcgccgttcatagatcctttggcagaggctaagagaagtttttgagcccttggagacatagtagtagtactcagcttaccattggctggagaaggcagtgaatggcgccgtaatgccccatttatctcagtcttcgcttgggcaaacctcggagaggcttctcctttgactctggcctttgcagatgcagtcggggccatgtagctggggattttccgtccgctaagggtaagcccatcatcttgtttgtcaatatttgcaggcagcaatgctcgtttttcactttgctttgtgttatcagaaccaacattaccattctcagagcttaccttcacatctgcacatttaagggcttcggctttgtcactggtctctgcagttttcagttcatcttcctccgtcctatccaaaactggtgacttctcatcttttacaatatcaaattcgatgggaactgcatcagctttatctttctctttttcaccaaattcaatattgtctcctccttcaagaacctttccttcagactctatctgcacagaatctccagtatctttttcttttccagaagactcgatattgtctccttcttcaagaaccttcctttcaggctctatctgcacaggatctgcagtatctttctccttttcagtaaacacaatattttctccttctcctccttcaagaacattccctgaaaccttcccttcagactctatctgcacagaatctgtagtatctttctccttttcagcaaactcaatattgtctcctccttcaagaacattctctgaaactttcccttcaggctgtatttgcacagaagaatctggaatatctttcttcttcttctcagcagatctaagggtggctttctttgacccgttcgaaagagaagaccttttgagactaggactgggcttctcatctttaatctccaaaggcgacccctcctttgagccgcttctactttttctcgaattgtgatttgctttgtcactctcatttctcaggggatctttactaagcgtggaagccttcctcacatttcgtttaggtttatttctttcagctgtaaaacggctagggccagttccactagttgtgccagatggtttcttgatacttcgctttggccttttcttttctgcttcaaccactgcttggtagtttcgcttctttgactgagattttggaatctcaatcctaggtactcgtgaaccagaagaccaaacttgtaattgtgtccagcgttcaagccaaaccttggctgagttaggttcctcaggaccatactggatcttcagaggcaatgcagttggtgaagaagctagaagctgaaaagccagagaaataataagttacaaaccagaaaagccaatgttgtgttgcaagattggtaaatccgggtttactgagcaggagttatggaaattattattccaccaagaaccatgaaacataagttaaagataccttatcaacaaagacgaactttgtgggattatccatccaactacacgtgctcgattgcaaaacttctgaatcacttgcttcctaatagaagaaagaaaattgcagcttgattataacaagcctacaaaatcagccaactatgtaatgaaggcgtgataaagagtctctaccatatgttttttctgaaactgaatcgcaatatctgaagatctagctttctggccacgaacaagagcctgaaacttcacaattccccatatacatgaatatgtagcaatggcttgtcttctcaccaagtgaccacggataactgcctgcagcctgatgatacctttaagagttcgaaatgctctacgtgccttcagtagatgaataaaaaaacatcattaacactaccaactctattcacgtagatttgtctttgttatggcaaagaataagtacctgatgagctctgaaggtagcttgaaccttaattgcagcttgttcaagctcgacttctcccaagtcattccttgactcgagattatccttggactcatcaccattgattggagaaaccacattttgagcagtagaagctggaactggttgtgatgaaaccaccggaggatcaactgttaagtttgacaaatcttctgtcaccgattccaccagctcttctttcttagcagatttctttgtacatgtgaacaacattacagttagaataatcctcattcattttaaggatgagttaggaatcccaaactcttaccagtttctggcttcggttatccgaattcgacttaggcgacttcttcccgagaagcaaagtcttgatccatttaccaggagtctttcccattcttgatggcgcctaaaaataatgagttgctaaacgtagaaacctgcagaagaacaagccaagtctgtaaattctcacaaacaaagtaaacaagctcatccagtgaatttcaccagcaaagaaacaagccaattctgtgaacttttacaagcaaagaaagtagctaaatttgtgaatgttcacttttaacacagcaacatagccaacgaacatgaagaagttgcagctgaaaagtatttaacaggaacatacagtaccacaatccatcagctaaagacaatggttcagtaatataataacataaaaaagtagcatgaatcaaggcataaaataaaaaaagtaacggaagccagaaataaaacagatggcattaaatgaagtgaacaaaagcagagatcttgaagacagcaaaccaaaatcatgaagatccagcagataaaccaatatccaaaaattaagctggtaaagttccaattgagaaagaaaaagaaaaaaagttccaattgagcaagataccaaagtaaaaatcaaacctttctatcaaattcagagctgaggaagtgatataaagataaatctaacgatcagagattaatcagatctgggtataaatcaaaagcagacaattttagcaaaaatggtgaaaaaggaaattaaaacgtcaacctcagagaattgaattgatgagtagtagtaccaaacttactgtggttgttcttcgaatgttgtccttccttctaaaagtcggaaacaagatcaatgacctaaaaggcttaaaggcatagtggtagctcactgtgaacaaatagtcttccccaacggttccactgatagcgaaagaagaagatgacagatattaccacttttaattagaaagaaaaaattaattaaggaatagacaaaaacaaaagaaatttcggttcaaagcgacgtcgtttggaatgatgtgtaggcaaagtctaaaactaggcctttctgggcccaattaaaggagtcaaagggagttatttacagaaataccctcctttttcttggatcatgatcatgacattgatgataagtgataaccttttttctaaaacaatactaacaatcaagaatgatgggtgtcattatccaagtggttagttcgcttaatccaaacatctaatctagtattcctaatcaattatttaaatcgtaaccactaaccagctcatgataggaatgtattgtattctaactagatattttttgacgtttcataaacgaatgtgaaagaaacatgattaaattatcactataataaagtttagatttgattctgttcgaagttgaatcctggttttaagaaatgaatatcttaaaatgtttgaattttttttgtggataactttacattagcaaattttatgtcacaactaaactacagtgtaaactttatgatatttttttttttctgaatttattcaactatatgctatataatttgggtaatttattttgaacatgcctaatttatatggacctaaagatgcatattttgggccttaaattagttggatacatatatgggtttaaattctaacctttaataagcctataagcccaaaaaataacagtttgtaagttatctgacaaaggattttaataataaagctgcatataaaattgaaaagaaatgcatgttgtataatattaattgatactttggcagtgtcgcttattacaaaggcagttgcatgtgatgtgcttgcaaactcgcattttatcttcccttacctttttgtttttagaaaatagtatattttttcatcatgattacttggaaacttggaagctgtgacaaaatattggttttgagtgcttctgataaaaccttgtattttgaacttgaaaacttttgttttcagccatttttttaacttactacgatgacggtcacttgttttgggatgaaactttttactacttggtgttggtgatgcatggtttctataattcctcttatacaacaaaacttttttggtttttgtcaaaaattgtatataaccaaccttctttttattaggatcgcacgtcaggccacttaaaaagaagtaaagaacaatgagagatcgatgtaaaaagaataaaggaacaaaagagaaagtaatggacagttcatcacaattcacacaccaaaaagaaaacagctgaacatttgttagaatctcaacactttccaaacacacgaaaacaaaatgacactcatttctcaccgacaatagtgatgaaaatatatcatggccgaactaattggtagtattattagtttgagattggtattttttgtaacagtttgatattgaattgttgattgatgaccacgagaaaaaagaagtacgatttatatcatttgttggtttactgtatatagatgatcatttggtgtccttctggtttcgagaaaaacaacaagtggttaaaagtgtagttcgagaaaaagatttggttaggacatgtaattctttatttgagcttttaatccaacgaacggggttagattttccttgcgacggtggctttggatgatccttaacggcacgatctgatcattacatatttacattgacgaaagagcacgtgtaaaaaaactcgttcactggtctggttgacttttattacatactgtctggtcgctatatatctatcaaatctctatgcattaacaattaatgcaacgttgctcattaattaagtatgtattttttgttattttacaagtagtattgatattacaggagttaaaatgttataaaagaaactacaaacatttattcgtaagtttattcatttatattttttaaaaaattggtaaagatgaaagaatttaccttggggaagagatcaacggatttcgagagaagtactactacacaacatttattcgtcaaacatgtatgtatttgtatgtttatgcatgtattatgtatcaaataaatgcatgttatatgagtaataaagaaaggtcttctgaccataacagagaaattaattaagaaccagttgaagtaaataaataactctaaattgtggaaattttagatcaaaagtagataaatagtcagatatttcatgtggattttacgtattttaaggatctaattcattttatgcttttaaaaaatttcattcactttcttcgaagcagtaaaacagtctgtcaatgtgaaacttatgaacaatcaacataagaaacaaaaattaaacaaaatttgtatttattgtcttcttctcagcagaacttctctccacttaattttgtttcttgctctgtcccaaaaacattgtttcatttttttatctcccaatttccctagaaaatctgcttccgatctaaaaaaatctctagaatttatgtacaaaacaccatttttttagactactaaacaaatactaacactaatctcggctacaataacagaaagaccttctgttccttaagccacaataacatctttctttctaatttctctgtaattcttcctgagagaatgcatagttcctctaaaagccaggccttttctctcacttttcttctctttctttttcttctgccatcagtctcagaatcacagctaatatcaagtgaatcaagaactctattagaaatccaaaagcatttacaatatccaccaactcttcgatcatggagcaactggaccaatttctgctacctcccttcttctccttctttcaaaatcctctgtttcaatggtcatgtaactgaattaaccgtcacggggaacagaaccgttaagctccccggaagattctcaagcgactcactattcactgttcttacaaaactctcaaacttaaagacattgtctctggtctctcttggcatctctggtcctctcccttcacagatcatcaggttatcttcatctcttcaatctctgaatctcagttctaatttcatctctgggaatattcctaaagagatctcgtcgttgaagaatctgagaagtcttgttctagcgaacaatttgtttaacggaagtgttcctgatctcagaggattgtcgaatcttcaagagctgaatttaggcggtaataaactcggtcctgaagttgttccttcacttgcaagtaacttgattactatttcattgaagaacaactcttttggatcaaagattccagaacagatcaagaagctgaataagcttcagagcttagatctttcctccaacaagttcactggctcaatcccaagattcctgctttcgcttccttcgcttcagaatctaagtttagcacaaaacttgctgagtggatcacttccaaattcatcgttgtgcaactccaagcttagaattttagatgtttctcggaatcttctgactgggaagcttccatcttgcttctcttccaagaaacagacagtactgctcttcacattcaattgcttgtctataaatggttctccttctgcaaagtatcagcgtccagttaccttctgtgaaaacgaagcaaagcaagcagtagctgctgtgaagtctgacactaaagataaagaaaggaaagaagaagatacaggaatcgaacttggattggtgattggcattatcatcggtgtgatcctcgtttcagcggttttagctggcttggttttggttaggatgagaaaatcaagatcaaaagaagagcctttggaagcaaacaacgtcgatcaggtcactgtttgcagcaacaccaccaggtccaccacatcaaagacagtaccagatctaagtaggctattactttgaaatcttgaatcaagttttcacacccattaacctaactagcttgattttttcaaatgcaggacgtgtaccgcaaaccatgagatccgcggtgattggactatcaccataccgagttttctctttggaggaactggaagaagcaaccaacaattttgatgcagagaatctctgtggagaacaggtaaaggaaaatgtaaataagacatgatttaaaattgatccgagtgtctaactaatcgatatatctaatttcaaaacagctgtacaaaggttgtcttagagaaggcatagcagtgacagtgaggtgtattaagctgaaacagaagaattcaacacagaatttagctcaacaaatggaagttttatcaaagctaaggcatatgcatttggtcagtgttcttggacactgcattggtacttatcaagatcatcatccttatgccggaagcactattttcattgtccaagaatatatctctaacgggtctttgagggattacctcaccggtaatacttgaaaaagattatcgatttcaagaacttatatttttgttgggaaactaattatttggaaatgtttttggcagattggagaaagaaagaggtgttgaaatggcctcagagaatgtcgatagcgattggagttgctcgaggaatacagttcttgcacacaggagtggcaccaggaatatttgggaacaatttggaaatagagaatgttttacttgatgaaacactcactgtaaaactcagtggttatagtattcctttaccatccaaggtatataaacaaaccagatataatataatcaggatatagcttctaatcttcagtttaacctctcatgaaatatataaccttctgggggaatttcaggttggagcggagagccctagtaatgaagatggagagaaagaagatgtgtaccagtttggagtgatactaattcagatcatcacaggcaaagtaatagcagctgcatcttcagagttggggagcttgaagcttcagctggagaacagtttgagagacgaaccatcggtgttgcgtagcttggcagatccgtgtgtgagaggaacatatgcatacgagtcattgagaaccacagtagagtttgccattaactgtctttgtgaagatcagaggaagcggccatcgatagaggatgttgtatggaatctgcagtacacaattcaagtgcaacaaggatggacaagcagtgagaacctcgggcttggtggttcagaactatagaagagaaatataaaatcaccatccttgaagaacatagagaaactgatcaatgtcaaattcaaggcctatatgagaatacataaagttgaacctactaatacttaaggtacttacgagtctcatgtgaagcttcagattttggtgtagaaattggattagcgtcacaaagaaagcaatgcaattgttaaggcaatgaaagggtgtaacagaaggataaggccacaaacccttaaataaaatatcgcaactttgtggaatttgggtacaaagttgttttttgtagctagcaagtaaatcgtaatacatatatacacaaaagtgaataattcagatggtttggtacaaagttgtttttttaaggatgttgggttacatcaaagcatggaatcacttaaatagttttggaaacacaagacatgaatgaaaagagaagaaagctgttgctgaatcgtgattgagagaaagtagagagagctacaacgcttacaacaaactactactagtcagcagtccagctttgctcaacaacatcacgcactctcctgttgtactcgcgcttgctttcgctgtacatccgagcagcttccgagtttgcaggagaattcggattagggtcacagagcaaggactgcaataacaaagggaaaaacggattagagaagaagaaagcaattcaagcttttaagggcatcaagagatgttcatatggcattttgaattcacctggatggaggtaagtatagcagcaacatcatagattggactccactggttttgtagaatgtccaagcagatactcccatctgcataaactacacaacgaatagagcagaagaacgttaattggaggcaaaagctgaacatcaaccaggtggatagaaaatccaatgttgtatctctataacttactattaggatgaaacatccgtgacacaaaccgaactgttggtggtttattgggataatcttcagagaactgcagtgagagtttgaaagtacctgaacagcatcaagaaagagacataagaacaccactacaacgatcccaaaaatttatgcttcttgtcaaaatgcaataacatatcataaccatacctccatcccatggtgtgtcatcaggcctacaaatttagaaacaaaaaggtctaagtaagtacagaaatgacaaaagtttcagaaatatttagccagtatctaaaggtacttgttcccattacccaaatatgacagcattccagagcataatgttgttgtcctgtggagcaccactaatacccgcaggtgggtcttgctgcaacctcttgaaatccctcattaacctcttccttgctggcgtcgacatcctcctttctttctaataaacaaaacccaccaaatattcatcaccttttaaggtctcgaacctctatcaatctagaaattactactaacgatttacgtatgctaaagttgctaactttgtactagattcgaatcttcctaacaagtctacgacctatgattagcttagaagaaacatataaggcttgaacctagaaacagcttaagatcgcatcaattcaccaaaatagccacacacaaatgataagatgaaagtaaaatcaacggatccagtaaacaaacatagaagaacagagatcggatgaaaatggtaccgtggaaacagatctcgttgttgaggtaaagatcgcggagagaagaggtcgtcaaacaaacatatgtgttcagcggtgttgaccgccggtaatcagagaaagttttccgatcgattcaggtcggcgattctcaatatcaccgtgcgatgagagaaatgggtaaaaaaaatcaataatttgggaagagatcgtataagtgatgaatgaatgatcttctagaagcttggctcctctctgacatatctgtaaagttggattcgctttgccctttggacgaccgagcgagtggttggtttgttcctaaccggaattaaaccgtttagggcaatctacactttaaccgggagattagtgttagttaacatacaacgatgacatgtaatcttttttatgtaaatcttcagatgacaaattagagtacttttcttaatgtagcgtaaactatatatttctaataaaccaatataaaccattgtaccactaaccggactaaaatccagacccaaaccacaagagtagagtagagtgatgtttttgttactagagagaaatgtttttgtggtatgtcttgtttctccaatctctctagacaaaccaattcatcttcaagcctcgtctcaaagcctaggcatttggatcatactagctcgtactcagacttcaaattgagatttgctcttaaatcaaaaacaactaagatcagactgatgttttgagatacaaccgcttaccacgaaatgatatgtggcttttgaacatttggtcaaaaggacgaaaaaataaactacttttagtctcttctgctacctacgaacatatatcaatcctgacgaaacctatcagcaaaacaaaaagggtaggatgatctctgatatatgttcctgttatggccctaagattcatcatctattccattcatagtctcctccatagttaggcgaagcgttgttcacacggcttgtctcttctggtttgatggagtttgcaaatgcatgccagcctataaggtaaggcaagacaaacttgcaatatagaagaaaaaaaggagtttagtaatgtttctttgaaagttcatgccggtaatgttaaagatgagatattttctgatcttacattgaatgcagagataagaacagcaaactctgctcgagtaattggtatgtaaatgctctcatccacattcacaagcttgttttgaacacctaatatatacacggagatcgttagagactatcctttttgacaagaatcaagaagaagattaaatttacttacttaggttgaagaaatgaccagaaccatctgggagaggctcaactttcaacactttccttacttttccctcatcactacatacaacaaacaaaccgatcaggagcaatataataagaatacaaccaatattatcagtgtaatgatgctttttaccttttccccttgaatggatcatggaagaattcacaagattccctcgggcctaggctaactagagttccaatttctgtaacagacaatgagaacacctgcaattttgacatgaagctttaccaaattcataatagaaaaaagactgccttttaacaccaaatccagtcaaatggtcttaacaaagttacagctcaaggatcatctgaagttaaagagataaaaccaaacctgtttcttgctccaatcatattgtcgtacaccagcagaaggagcaaactggagcaataagaaaccatcttttgacaacttgaaagctccagactgcagaaaaacaacagaaatcaaatggaaaactcaaagcatgattattcagttagagctctttgatctttaattttgggatagagacttacgtctaaagccacaaactctggtgctcttgggtccactgttaacgcagctttccctttgtatatcgaatgacccacgtaaaatctagcaggcaatccttcagctatcaaatcgaaacaaagaacacaagtaaacatcacctacgagctccatctatagatataaaaagagttctctttttggatttcaagcttcaaggttacaaatttctcgtaattaagagtacccttttgtgtttttaagcttccaatttcttaattaagcaagctaaaaccctaaagtaaccaagtgagatggcttaccaggtgaaggagaagaagaagagtcaccgaacctctgcttctcgaagtaatccgtctggcgagacttaaccgagaagagcttcaccgtcttcgtcgtcggtttcaaggcgaatccatgccgtttcactgcaaaacctccggtgacgagtactgaagacgaagagagaaagcgaggattggagttgaccgccattagaggagtcgataagagttgcgacatcgctttgtgtttgttccctctcagtcaatgtagtgtgtcttctctgcgaattacgatggaggagagaaaaaggcgcttcctttacacactcagagactcgagactcgagagagatgacgagacaaagaaagtgataacttttcgttaattcgtttctacagctttatttcttcaaaaattacaaatagacccaaattttataaattttgttggaatattgagagaaagaagaaacagagtaagagataatatctcttctccttagagaagacaaaagaacgaaagagaaacttttattgaactgaaacttgtctatatacatctgcaggcacatacaaggtcgtttgtctatgtacctctgcattaataggtctagaaaacgctactacatgcgaagttttcgattttaggaccaacgattggcccgaccaagtgataagacatgagacaaaatatgttccatagatctatatacaattggacttggctatgctgtctcaacaagaacactgttgacacttgacttcgaaaccaattcatatgattatgctttctggaataaatccatatctactggatttgttctctgttatttcccaagtttggtctctattcagtaatttgattattgtcaatgcatattgtaatatttgcttcttccatcaacagtttgttggtcaaattttgcaactcttcaagatattgttttggtccatatagctaataacattcgagacaagataagagagctaattgatgaaagtattacgaggagattgtataattagtataaagatctaaggtattttgattttctcatttttccgtagaaaaaggaacctggatcctattaagaataataatccgaaaactgcgcattatatatgcagtcttagttacaaaacaccattcatagaaaaacattctctttcgttttctctcctctctctccatattgtttttcttgaacaacaagcaaaaacagggcaaaagctttggctgtttgttggaagggggcaaaatggttatgtaatcagcaagcttcaccaagtttgcagccaagtactcctgcatccatggtaagtttccggaccatcgttcccggtttaggtcgaattgtaaacttgtttgggagcggggttttcggtttagagctccacgcatttgcttttccggattgcacaaaataagctccgttgagaaagtaatctccttctgattgccaattccaagatttccattcaccgtatggtgtgtactctctttttgtaatctgtttggcttcttcattaggaggagcaatgaaacgattgccttgactaataattgtagggttcatgttcccaccaattgcatacatttcccaatgtgtgtagtcattgttcaccacatgtatcgttccgtatctgcaacgaggcattctctgttccaatcgcttaccgaagtggttaaacgcaaccgttatctgcattttcttgtcgatcacgtgttcgtccctcgccccaaacaacatcacctgttctctcacaaaatttaaaacaagactctaaattagaggtcttgattgtttcatatgcaacttcacatgagcgaaaacaaaggaatctttttacctcttggtggtcggtgaaatgactgttggaaatagttacagcagtggagccgtcaatagcatcgatcataccatctgcacatcttgtcattgagacatggtcgatccaaatattggttgctccaaacaaactgattccatcaccatcactttttgtcctaagccctatgtgagcctcagagtctctgatcaacccaccgttcccaggaacaatgtgcttgacataaatattgtgaatgatcacattattcacaaattgcaacgttaatccagcaccttccatgatgtaaaccctagctcctcttccatcgattgttttgtcgctcgttatcatcagttcttgttgcagttttatgatcatgcttcttgcgaatatgatccaaagcggtccgtctcgagtcactgcatgccttaacgttcctggtttagggttgataagatcgttgtcagacgcgtctttgacgacgtatatcggtccgtcttttcctccggtggttctccggccgaatccgagcacacagtcggctagtttcttccggttattagcccagttacgatcgcatcgccagcagttgtctatcgggttataagctaggcattttccgctgcttttgtgcgttttacgaccacttctcacctgagtaagctctctccttgtatcgttccttgattccgatgcatccactgctctgttaaaaaaaataaaaagtgtttaattagtacttgtttaggaagttaggttaaacatttgacctaacaaagacaaaaactcacatattgacatggtaattaaaatggttggtgacgttaagtggatgaggatcgtaagagccgatggtttgtttcaatgcatcactttgtcgttgcgtccagtagctatcaaagacagcaacattgcctcgaacctgtggggccactatagctaagaacgaagagaagaaaacgaaaacatagccgccaagattcaagaaagctgctgccattttaaatatattgcaaatgcagagaccaaagcctgtgaactttatattttcccggcaaaacctcaaacggaggttgttgtttcagataggcctgccgggattaaaagattaaagatttgaatcacctgattgctttaataaccaggaactggggagagagaaaaggagatgagaagagtcaatagaggattgagaattaacatagattagacaaccattgatttaaatctctatggtcatttctccaaaaaacccaattatagattttggatgcctttgtttaatccttcttttctggatattttcagttatttttgccttgatctaatattatttttactgagataattacccaatagcacctttaaaacttgaggtaactatttttgtatttacttaattaatcatacatactacatatgattattaaacgtagtatatatcaagtctctaggtctattgaaaataattatcatacaagtaattaaaaaaattccccatggggtcagaagctaattaatggcgggactctctgttcccccaaaagaatttgaagacatgactataaaaaaaaaagaatgaaacaattttattttggactcctgatctgtgaaagactgaaacagttcatacgcaaactgatataaaatccaaaatgttatctctaagaatatggtccgtgatcaataatacagatctaaaattcaccaacttatatgcaaattgcaaaatgcaataaataaatcttgaccatatgttacaaatctaccagatcattatgtacagagagcactgcgagtcttgatcacacatttcaccagaaaagtaaaacaatacaacaccataaatgtttcttctcctaccgatttcaagaaagacactaataattactcaaagaagctttaaatgttaaatctctttcaccggagaaagaagattcttagctgaaaataatgacgcaagaaagattcaagaacaaccttaacgccgtcgtgatatcattcttcttcttcttcctctgttccacgtcggatttgctccttccacgttcaccgttagctattctcaccggcgggaggtgggatcttctgcagccgagtgtaggtatatccgcaatgcacatgcagcttctacacaacaacaaagtcgtcatctttgaccgtacggattatggaccttcgaatgtttctctcccttctcaaacctgccaaaacgccaccgtttttgactgctctgctcattcaatactatacgacgtcgcttcaaatacctttcgcccacttacactacgttacgacacgtggtgctcttccggttctttaaacgcttccggttctttaatccaaaccggcggttatggcaacggcgaaagaactgtacgggttttcacaccttgcgacggaggagttggaagcgtttcgtgtgattggattgagaacagagcgtatctctcctctcgccggtggtattccaccaatcagattcttcccgatggtcggattatcatcgtcggcggaagaagagctttcaactacgagttttaccccaaggatccgggagaatccgttttcaatctcagattcttggcggagacgagagatccgaatgaagaaaacaatctttatccgtttcttcatcttctccccgacggtaatctcttcatcttcgccaatcggagatcgattttgttcgatttcgtcaatcaccgaatcatcaaggagtttccacagattcccggcggcgataaacggaattatcccagcactggctcctccgtgctcctccctctctttctcaccggagacattaacagaacgaagataactgctgaggttatggtatgcggcggtgctccgccgggagcgttcttcaaagcggcgaggacgattcctaaaatcttcgtcgcgggatcacgcacgtgtgggagattgaaagtgaccgacccggatccgaaatgggtcatggagcaaatgccatcgccacgtgtcatgtctgatatgttactgttaccaaacggtgacgttttgatcattaacggtgctgctaacggaaccgctggttgggaagacgcgacgaacgctgttctcaacccgattttatacttacccgaggagcctgaccagacccggagattcgaaattctcaccccgactcgaatccctagaatgtaccattcggcgtctcttcttctgtcagacggcagagtcttagtcggaggaagcaatcctcatcgaaattacaatttcacggcgaggccgtacccaacggagctcagcctcgaggcttatctcccgcgttacctggatccacagtacgcacgtgtgagaccgacgatcatcacggtggagctcgccgggaatatgttgtacggtcaggcttttgccgtaacgttcgcgattccggcattcggaatgttcgacggaggggtatcggtgaggctcgtggcgccgtcgttcagcactcactcaacggcgatgaaccagaggttgttggttttgcgcgtcaggcgcgtgagtcagttatctgttttcgcttataaagctgacgtggacgggcctactaactcctacgtggcaccacctgggtattatatgatgttcgtggttcaccgtggaattccgagtgtagctgtttgggttaagatttaaagcaatccttttattatttcattagttttttgattgattttttgaagaattgtagttaaaaaaaataaaaaattggtgaaagttagttaataaaaaaaaaggaaatttcggttaagacccctactcctcgggagaagatatttgattttgtttgtcctagtagttgtgatggtttgatatgcttctacaatctttataaatcgggtattgtagtcaatccagccactagatggcatcgaagttttcctccacctaggtataaacaagtcattctcgacaaatcttctagtgaatatagtagtgtctttcctttgcctttgcttggattcggcaaagacatcatcaatggcacatacaagccggtttgcttatataattcactagaaagaggactaagaaacgctactacgtgtgaagttttcgactttaggaccaatgtttggaagtatattaccccttcttctccttaccggatcattgctttccatgatcctgtgtacgtagatgggtcgctgcattggttcaccgaatgcaaagaaatcaaagttctatctctagatcttcataccgagacttttcaagtaatctccaaagttccttttgacattgcaaattgtgacaacattgccatgtgcaacttggataaccgcttgtgcatatccgagaacaagtggcctgaccaagtggtatggtcgtttgattcatgcaacaagaaatggcacaaaatgtttacgttagatctgaatatattttctcatgggtttgggaagcactttttggcagtctcaccagtagcagttttggaaaagaagaagaaaaatggtaagttattgttatcttctaatctaatatataagcaacaaatggtggtacatgatcccgaaaccaaatcttatgattttgttttcaagagtaagaattctggaaatcatgtttgttatttcgagagtctagtctctattttataaatagatagatcattttagctatatttttcctagtttttttttgggggggtttatattcatgaaaattgtaatttcaaaaagtttaaattattgttggcattttctgatctattaattgcttctacatcatacattgtaattcatagattttgtttttctacgaagttaatacgcaattgtactttttggaagaaaactaatgttctgttttcaattgaacttcaaaccattctggccaaaaaggcttctccaaactcgcgtggcatttttagttccattgaaggttttgaaaatttacgttgccttgttgacacatatactttgtaaacaaaatactaaaactcttaggttaattagaaggttttcttaatgaccagtgagttcaaggttttatgaccatccataaattttttctaatcatatcaaagagatcataacaggtaaataacatttgtgagtaatttgttttctgaaagattcagaactgaggtataatgtctatgagatctgagtatatttaaaatcaatcttatatgatccacatctctttaaaatgataattaaaagtttaacaaatatcaaatcccaatattttcaaaacatttaatctcttaaactctacaaagttaaatctcatgaccaaatatatacgcttgacctcagagggtctaacataacagttgcagatctctgtactaattcgggctcgatcgatcagtctttattgaagcaatatataggattgttttgcagagaaaatgtgatcaaaaagctaagagtaggaacaagaggggaccttgttttcagctacattaatggagtttccttcacaaaaagataataaatagggctcagaatctcatattttcttatttattgacacccaaataaatgtaatagtgacgactctccatcctacacatttagtccttactgataaactaaaaattacttggcgtcaaaaattaagtgcactatatagttcttatacaagattgtaaaaagttattatttttattctatggtatttcataatcaaattgtcaaaccaaaactcaaaaattgaaccgaatagaactccgaaatgacattctcacaaaaaaatcgtttgaaagaagacaactgaatgagttggatgaacgcattaaaaaataacacattcgacgcatgatacctgattattctatacagaaaccaaagcaaatcgaaacatgtgaacaaaaaacataacatctaattataccacaaatccttttatttatgaaatggcacattacacgaattatagtatacctaaaaaggtggaaatgttatttaattcttgaacatacgtgataaacaaagagggttaataaatgtgatctcgcttgtgacaccaactacatatttactcaaccttatacgtcacacacgagaggacatgacttgcaactcgttagtacacttttcacatctctgttagcagaaattattattttattttctttctttaaattttgttattttattgtatgtgcaagattgtaataaagaatgttttggcctaaagacacatcattctcctaactagataatacaatttttaagctaaggcgtgaagttgtggtctccataaatacagtatccattttagatactcataccgatttcagaagtcatgtagatgagctagggaaatacgtatatagcttatcttgcatgcagattttgtgagcacaatgatcacgaactgcgaaaagtctaatgattcaaaatgatatgtaaccaaagtagattttcttacatacccaaaagaagaagaagaagaagaaaaatacggctggtcatacatttattacaacaagattaatatatataacttccaaataaataaaacacaacaaagagcagaaaattatataaaatccatgggtttaacgagagatagcgaaatgagcttatatatataaaataaaaccaaaccagctagaagataaaattaaaaccctagtagctaacataaagataactaaataattatcaaagatcatataaaaataacgttattaattatatcatgggacgatcttagtcatgtcgttattaccggacagatcaacattgttgagattgttgatcttttcgttgtcgttgtcttcgaggttaatgttgttcttcttggagaaatggatcttgttgttgtgcatccaaaccttaagcactcttctcttcactccaatctcttcacaaaacctttgaacaacacaatcttcttgcctttgtattttccacccaactttctcagcaaaactaagcatcttctccttctgttccggcgtgaactttgtcctgaacctcttcttctggttgtatggcaggtttggtagcgatctagatgcggtggttacgccatcttcctccataaagtcctcggactcggagttgttatgcatgtaccggtagttagagactccaatgggcatgatcatttggtgtggcatagctgatctgatcttttggtggttgagcatgagttttcggtgtggagggtgttggtggtaaggggacatggcggtggctgcgagttcgccttccacttcttttctatggaagttcctgtggcaattgcaagctgagcaagtgagagcctcaatggagccatcttcaccacttggcataaactctccacacccatcagtagcattgcctcccatagctgctgcatggttcttgagacactccttgtactttatcataggcttcttgatgatagcgttgtaaccaacatgatgaggatcttgatgatgatgatgatcataattgttgccatgaccattaccatgtaacggcattggaggtggttgagtagtattgttgttgttgtgagttggaggagcagaattagcagcatgatgatcatgatgatggatcatgtgaccatgactaccaccaccaccaaatgtagtgtttaatgggatgggcatatcatgatcttcttgacttgcaatttccatcttttttaattgggtcttcttcaaaaaccttttgctttctctttgcaaattgtttcttggtttggggacagaggagagactagctaagaagaaaacaagacaattggaggaaaatattagtaactaataccaaaatgattaaactattaaaggtgaatactttcttgattaaaatcttaagaagtttccacttttttagaaacaactcacggaaagcatttttcaaataattttactaaaagaaacaaccaaaatttacaaaacccaaaattataggacaaaacgaaagaatacaaaaaaatggtaattaaggaaaataaaactcttattgcaagcctgcgcaaacaaaagctgacaaacgcacttcgaaagaagtcttctacttcaattcaagtgggaaatttattatcatgaccagtaagtaaaaagaaaataaataacaactgttctttgattaccaatctcctcttctctcctaattttgatgagaaattaacaaaagatagagagagagagaagtcaaaactggttatgaaagaaatttgaatcaggttcttgaacattgaactgaattaggaacacataccttcacaactaaaagtagaaaattactttgatatcttaatatgcttccaaagttcagaactctattgaagatattgcccttaagagagacagagagaagattagagatattagggttttgtaatgaaagactttgaaggaagagaggagacaaagatttgcatttgtgtttggatgtgaaggcaatgtcttaaactaagagagtattagtagtgaaagcctaaagcctaaaagcaagagagagaaaaaaaaaactagatattttcaatttttcactctctcccttccctcccagtgacaaatagaaaacaacagcatttaattatgtcagttttgttagtgtatttatattggttacacaaataaatatggtttctatttaacctaactataattaaaatgcccctaaaaaaaaaagaagatcagagaattagaggggagaaacaaagaaaattaaaggtcatggggtgattgctttgcttgcactatcagacatcaaaatttacacaagttttagagagaggactgtgtcagggagtggtgggcagagagtaagcagtgaaacaagcataaaagtcataataaataaaataacttaaaacattcatgaatcatgagtaaacgaagctaattgcaaaagaaaaaaaaggtatgtgttctgtatatttggggttatttgttttgttgacagaagtatttttctgtatattttatttttgcaaagaagataaacttactttggttcacaaagatatagataattcatacgtcgtctataacttgtaaaactttggactctcgaggttgtcatgtcatgcatgtgaattatattattaaccagaagttatggtcctacaatatttcttgtatattttattctgtataataaaaagccgtaattaattaatattattcaataagtttttaataaatgaaatcctaacattatcttttattttatgatgataaatgttttttcttgcatggattaacatttctcacatctgcatagtatccaaatttttttttttttacatcagtgataaagtgaaaatattggatgatataatacagttgataagatttctttaaaatatatatacaggcgaaataagatccatcacacgtcattcgaggccaagatgaattatttagttcacatacaccacatatcgaactattattataaactatatatatcgtaatttgtaaaaacgtttctgtaatcttttataagtactctggagttttcaatcatatatccaaccaatgaaccaactaaaatttcaccatacataaaattgcggtagcatgtaaaaaggcagtgtatttacagctgtagttataattatgtaccctcataatttttgtagtgaattaggaagcatgggcaaaaggatcgaaagttatgtgttcgtttgactataaataggaagtcgtggtaaaacagagaatattgcttaacatttcagaattactgctcttagcagtagtagtaatcatgtcatacaaccatttcaatttgaaattacgctcgtttaatgaaccattttttttgttaatttaacaaagacatgaatcactttgttctttacttatccctatggtctttaactctttatcctttactacaccagatcacatatatgagatactttatcttttaatttctttcttgtttctgttttgttgtatcttcttctggtaacttcttgaaatccccaattatatttttcataatgattatttttgtcagtaaatcatagatgactaatgtattaactatacatttatcatagtgcattttgaaaatcactcggtctggcataactattggatgaggagttgagctcaaaactttggatatataacagtattatactctatttttaaaatgtatttagtctattagtattacgtttttttttcaagtgacaaaataaaaagggtccacaagaataaatgacgttaggtcgatggtccaatattgttcacaattttcaagatgttcgtatttactcgttctccttttatattatgacactttaatttgtgtatatatgtaagtattttttttagggttgtatatatctgtaagttgtatatttatttatttcctatatatcaaaataaaacaagattctaaatgtatttttagtgctacaaagattgtattcctttaaaagacgggtgaaattttgtattaaaacacttaaaagatcaataatattaagattccttgtaagtcgtctcactaattatatactcgtacattaattctttatattagctagctattaattatatatataagtaaatactctatcaaaagttacaattcaaacatgtcgttttagttaaaagaaagttatagtataaactaatcataatacctatttttaagtgacaagcgtgcaaaggcagacgatttgtttcttcttttagatggaaccatcaatttttggtcaaccaaagcttgtatccttcaaaaaaataaaatcttcttttaagatgccaactctcttttcacaatctttatcacggaaattcaaatacaattaagatttcaatcattttacgttagctaaatcaaatataaagattcaagtcacatccacaactaatgatgaattaatattaggcttggttagtgtaaatatgataacaatatcatttgctatagtaatattagattgaaaaggtatggattatatatatcccgtaattaatgattgttagattttataatctcacgcatcagttattataattcatgagtatatgagttatcatatatgatatgctacggtataatacggtttggaagatgatactatttttatttatttgacaaatgaatcaataccaaaccttatacgcgttgatcttagttcaccaaaatgattttacgaataaaaacgtatttttgtaagttccatcattatatataccgcaacaagcatttactttgtaagcaacaccaaaaatgaatcttaaatttcacattttagtctttctcttccttattcttatatgcatgtgtgtgctgtccttgcttttctcacacaccatttcgattaaactcaaagtttgagaaatttgttttgatgcattttgttatgtataatgttattataaccatttaattaagtaactattttcctcagtcgacctatgatttcagttacaaaacttctccaataacatatacaatgaataaaaaatcgacacaatgagccctataaaacaaaccaagaggaaaaagagatattaattcagccgttgggaacattctcagtctttatatttcttttattaattccttttcgtatgagattcaaaagccccacaccacctcaatccaaagaaaagtataacatgtttaattaagttttatttgatttctagggatttccaacatctaatcatgtggttatatagtatacacggaaagctacgaatttttaaacctatactgcaacatttttatagcttaacccaagatgcctcgttatgtattacagtatatacacattcccatcaccttccatgattttatcttgataagttgaaaaagatatataagttggaattattttaaagtaaccttgctttgaatcttaacattccctgcttttttcttataattttaagtttttaactagagctagtttatttaatttttatcattattcgatgctgcatttcgatacactactagtctactcctattttttttgggtgtgtttatatatagtcatgtgacataagaacatataaataaataacgtacgtatttgatctggcattttatctaaataagtaatcaacttagtaatggatatcaaaattcaaaatctaaagtaaaatacataatgtgtacaaattattaaatattaatacatataaaagttcataagcgcacacattaaattatgtatactagaaacggtgcaacagacgaactggggaccaaattatggaccagctcatagcccatttgctttaaataatctaaattcagaaatgaataaatgttggaaatggttcatgatgtatatagtggaggaatattgattatctattctttttatttttatttttgcggaggaataatatgggttatctaaaacccaaagaattttctttatagatcttctttattcttaatcctaatttgcccaccaaacaaaataacagcaattcaaatcgaatttacgaaagaatcttcatctttttattgacaaaactttagtttcaaaagcattatctttaaaaggaacataaatgacatattctaagatctacatagtccttatattcatgactatattattgccattattttgattactagtgcctaattccgccattgaccggttgggatcatcataaatccatttttgtataagtaagaaatgtctttgggtattgtgaaatttcatgtaagcactatttcgatttgagtaatttctataattttcgcttaattgcgtagttactactagctagttagtgttcttacaaactatgcttaaattataatattcacaatatgatataaaatgataaataaaagagtaataaatatcaaaacgtttttatctagtggttgttaaaatgtttttaaaagatttatatcagaaaacatggatttgaatttttaaattacgagtagagagtagaagattcaaatatttgcaaagttttggtatacagttggaatcgtctgtcaaaattaattactgatgcatcctggaacatagaattaagattcataataaaccatggatactgttatgaggataaaacatatattgtttgtttaaatcaaaataaatcattgtttgcaacagttatatacactattagtattagttatactaaaacacttagtctacttgatatatattaagatacgtacatatttgctttatttatcaacatcaaagcacaacacggaatcagtacaaaactatttgagaattcacataaacaactaaaaagaaaaacattctgagaattattctggttatgtgtttactttaagaaaataaaatttcccaagaatcgaaaatttttcccacaaagcaaatgcacgagttctggttattttaacactattatgggttttacgtgcaatcagtttactgacatctgatttctcctcattcatctatttaattattatatctctttgattcactttttctatttgtaaaataataatattcgaaaggtacagttttatggcagatgaaatggacgtagcgtgtaagaaaatacaaacccgtaccttcataatttagtaaacaaaagcataaagttaaaaaaacattataataattgaaaaaattatacatatttttctgaatatatatatagcaatgagccaatttcatcactcaccttacttattagaatttgttttttccaacatgacaaataattggcaagtgtctcaatttcagagggccaaacaatgctaaatgtaatgggccaattattttatctgcaggcccattttgaaaagcacacaagactattctttttttttttttttttgtcgaccacaagactattctctactgcttaagttatataataaaccgccgacaaaaaaaagaaaaagttatataataaacctgaaagcaacgatctcttaaacgacgcagtttagctaagtagcaagtatcaaataagataagaatatgcagaatcttaacttgtgcgatacaaagagaacctttgagccaacaagctttacagttcaaatatagatatcaaattctttgtattcgatttaaacatgattattaagacaatccaacgaaaactagtaaccaagaagagaccctgagttcagccttgtgccactgtttcaagcatctgcaatcatacaacaaatattttcttgtaagagattatgatacaaaagaaaccctacactttagaacatacgcagaggcgagggatcgcaaccgactagtttttagacaacaaatgcctatgcccttaaaatttttagttactttgaatagttctgatcttctactcaaccttatctcctatgcgttattctaaattttccttcagctttgcttatataaaccgaaaaaaaatgcatgtagtagccacattctccactatctatacgctacataccagagttacaaaatcatttgaatagaggattaaacttggggtgagaagcatgtaatttgatcaagaccattgattccttcaggcattttaaaagctatataaccaactgcacccaaatgatgcaaaggagctcaccaaaaatacgatcttgcacaacattcactacattctcaatctatcctctctttcaagtgttcttttgatcacaatatacaaaagctaagcaagacaatactttgatcaagattcaagacaaattcacaaacttaagctggagctaactacgccaaatcttagagataacaaatggaaagaaactaaggatcactttgcaataaaaacatttcacaacattctcaggtttaagcgagttatacaaaaacaaaagaaatcagttttatatgtaagcataaaaactaagcactcatacactaactaaacgcaaagatcaatttaacatagacgagaaactacatctctacgttccaatcaaacgaagaaaaattcaaaattagcgacacaaaatgaatcaatcatcaaagatttacctcatcgaagaagaaagatgctcttcagtgagacggagcagtctgttcctggtggtggtgagatgatttggaaggagccaaagctttgttgtagatctgctcaccgacgagataaacgcagaaggcggcgacgccgattccaagtccgggaagagcgtgtctcatttgattcgaaagcatcggatgcttcctccattcatctcttcgccggaaaaattcgccggttgttcccaaaggcttcgccattttctcaggtattcgattaatctcctgcgaccgtactattcctcttaactttcttctcaaatgacaaatcatgggcttctttgatgtatatgggctttaaatttattttttgtcgtcatatgggctttaactttaggttatcatttgggcttcttttgaaaaaaaatcggaaaataataatgtcgtaaactagttttcttatggttctctttaatatcaaaatataatgtcggaaataagtaattaagtttaataatattgcatagcatcatatataaattatatcagaaatctatcattgtagagttgttattatttatttcttgttaaacagaaaataaatacaaatggtaaatcatagtgaaacatctactgatctttctagcttatgactctggtttatgggaagacaacatagtgatctcatcagaaaaaaatgtcttcaggcataaacatggtgttcttgtcgttagcggcttggcttggtggatgatgaccatgtcctggaggaggaggatcttttgcaggagaagatggaactgttgggccttttcctggtggtgaatgaccatgataacctggaggagtatgttttgaaggaggatatggaactgtttggattttatcggtttcgtcggtgaacggtctggcaattgtttggacggttattagaagaagaagaaacagagcaatcttcattgtttttgcagagaacttcatgatttcttgttgttgagcttacttgtattgtatatatggatttgtaatttgtatgtagccagtgattgttttgctttggtgagttcatgtgagtataagtagaggtggattgagtaaaatcgatatctttgaagattgaattagtcaatagtttcacttattcaatctctttgttgttacctaaataggtatttttttttggttggtcaaacctaaatattatttctgtgatattttaccttaaaagaaattttaaaagttgaccaaaaacaataaataatataaacaaatactaaactttttttatataacaaacaaatactagtattctactaacttgatacaagtatgaaaaatcgctttattaatattctcgtaagaattatattatatgtatctagtaagatgcttttacatatttctgctcctcctcgtatatatgtaggcaggcactatccgtataatttttgcaataatcattttcataaatgtttcgaaacaaatcctccaatacatacactaaagcaataaaacagtaacttttctatcaaattgagtactctaaaaaaaattacaaatcttatcatttacttattttgctatcaaattcaacattagcatataattacttttaactttcctatatttttcaataaacagtaaatatctcatagtaacttttcttacttccttggcctagcacatgcactgaacaaggagaaacgtctctctcgacttcttcgtgatcgcatagaagtccctttgatctataatcaagtaatcaaaaacgtcagataaatagataaattattttttggttgattgcaactttaaacaagattttgtgaatttaactcactttggttcttcttggagacttttgtgtgttccaacagaaaagcagactgcaaactcctctccctgattctgattcatatcctctgcacaaaccaaacaaaacaattgtttattatgaagatcttacttattcggttttctcttcactgaagcaagattacttacagattgtctttgttgtttgtgaagttactattgtgtagtaagcttggagaaacaggacaatgttccattcttttaccactctgattctcctgaaactcacccatttcacaaatcttcaagactttaactccattggtgtcttcttgaggtagaatttggttcctttcgggttttaaccggccttgtgaaccaggagtcttctgtaaccactcagtttctaatctctgttcttggatgattgcttcaatccttttcattggaatctcattcccactttcagtatatgaactagttgtcactgctatttgtctggtctgcttggagttgagtaactcagtttcagacaagaggattatcctgacctctacgtttcgccgtagtaccatttcaatcgagtttgtgatactgcttacaaacctttcagctctcgctttgatctctccttctccaaatgcaatataagcaactagaatacctgcaacgaaaaatctattagtatgcttagagttttttccttaaagtgtaaagtgatttaaataatttttcggcttaccttcaacttcactgatagataaaagcttcccatgagcatatagaagctgcttcaatgtctttgaatgacatctatctacacactttatccaaatatcatttagtttctctgaatttctgcaagtaagcgtcatggtgcttgccgttgtatcgtcatgtgaggccatggaagtgtcactctctaaaacttcgctagaagaggaggacaatttcacttcacgaacgaggtttccactttttcttatggaagttggggaggctgtattactacattgaaggcctgatctctgtttgtaagcaataacttctcttgaaatgctttcttcagttgctctagagctttgccttctactgctaccggtatgtgtggttccaggagaaggcattgaaccaagctgaagcaaggtagctatgaaccatgttgaacgatcagtagaaactctaagctgcttctcagcctcagaaagaagtttcaaagcatgctttagtctctccaaatccgcttcagtcactacaaaaaaaacaacaaaaacagaacaatacttagctgtttcattcaagataatgagaactaaacaactttgaagtttcagatactcacagttccttctatcaagaaaggcttcgctgtatttttcgtccaaagccttgtatgctccagcaatgatatccatgataagactggctagttgagacatcatgagtattggatcagctcccaagtccagtaactctctagctttcttaacggtctctgccgtgtcagaagacaacgctaattccaagagttcaagcaatttatcatctgaaacaacaccaacctgcacaaacaccagtagtcacatttacattactcattggtccaagttttacccaatgcaaaggaaaggaaacatagaacaaacaaaaaaacttacaagctcatttacaagatcaacggtgattcgttttcccatcaaactcaactgctctaacatggtttcagcatctcgaagcgagccatcagcattcaaagcaatcaggtccaacgcctgtgattccacatctagattttcatctgaagcaatcttccttagtctcacaacaatgtcaccatctctgactttgttgaagatgtacttctggcaccttgactgaatggtccgaggaacattgtcaaggtcagtcgtgatacatacaaagacaaatttctgcagagggttctcaagaaacttgagtaaagatagccaagtcctagatggtaataaatgacactcatctataacaaaaaccttgtatctttgagaactctgaggagctaatgtcaacaattttttcaaaaggtacctaactttctcggctccattcttcttaccagcatcaagttccaataaatccctacttttccctagcatgtaatcactacattctttgcagtacccacaaggtttcatttcttcagtgaccacatcacaattcaaggcggccgaaagaattctcgcggtagatgtcttcccagtacctctaggaccttggaaaagataaacatgagcaaccctacccttcttcacagcgttcattagtgattgaacaactatactctgcccaatcagttcatcaaagaacattggcttgtacttttggctcaagctctgaatactttccggtgtacttcctccttcttcctcttcttctctttctccatcctgactcttacaacaactagaccatctcctcccatctaatctactctgagcttctaaatcaatctctccaaaatcagtagaaagatcatcatcactatacccaattcctatagatgaccctcctctactatcaccaccatatttgagcaaaggtaaaacaccttttgcacttcttaaagcaagcttctgtttattaaacctcccagaggaatgcctatgtctacgatacacagattgactcccacataaaatgctacttcctttcctcctaagagtatccgaaaacgaaggagagcaacaactcctacatccacctctatgtttcagattcctcttagtccaataaaaaggaatcccacaaccttgtctccctttaaaatccaagttatcatcatccaactcatcatcaccatcctcccaagatccaacagtgctaggattacggataccatacatattatatgagctagtcgacaatgcaggtgtactgttacaagtatgagaagaatcctctctcttactagtacctctcaggaacttagaagaagaacgtgaccagttcttgcgctttagtttcaaaagcaaaggagatgatactttagtggggaaattctcagagttgctaaaatcctctgtttcatcagattcatctctcactacacttaaacctgatgcaacgtgaagatgatgacttggaaagttcctagctttcgcagtgctttttcttccgatactcaaatccaattccttactcttcttcttgataaaaccactctttcgaatcatcgaagcagatcgagtttcctcaagacacgaatctccaccattcctcgcgtcactcacatcatcatcatcgtcatcatcatcattgagactagcttggatccaagacgtttcatcttcaccctcagtcttctcgcttgaagttctctgagtcttccaattatacaaaaacaccttcttctccttctccttcccgttattcccaaagactcgactactcggaaactgagaatctaactgattgttactgagaatctcgacgttgttgctcgccggcggctcaacgacgaatctcgaggaagtaagaggagatttccatgaggaagtggttccaggatcgcgtaaacctttagaagcaactttcctgatatgagtaagctccttcttcagatgcaatttgctcggatccgaaatccttaaacccgacatttttctttctttctctccagaaaacaaatcttacatagttttagactaatcttctccgaactatttagtatagtcacaccggaaattgcgcaggtgataccaagaatctttttaagaagaaacagaagatgtgagagcgaaaggatgagagtgggagagatgaagaaagagattactgaagaaattcaaaaaattcacggtgattggctgattgatttgctttttatcaaacaaaaataaaagaatgaataaaataattaaaaaaagacacgaaaagaaatgtgaaaaagtgaaaaatgggtcggaaggagcggtgacgctcgggattctccttcttctggtctctctgtgtcagatctaaaacaagtcttcactcttctcacgcctcttcagtcttcactgtcttttttctttttgttgcccaaaataaattggagaacaaataattttttcttttagttgcattcataacaaaatatagatataggagtattatcttttctgtgacaaatgtcttcagtctttagatctcacgtctgatctgttttattgtttggtccgtttgaaatgtcgtccaacaaaaacgaattaaacatcacatgcctattttactgccattgtttttcttagaatacttatattttcttacattattaaaagagttttgcttttgcttttttttcctctttatgatcgtgttaatatatagtacacacaaatatgtgtatttacatgcatatgaacaaagctcttgggtccttatagttttgtgttcttttaatcatgcattataataattcatacatgcaaaaacaaactaacggtgaatatgcacatgcccactattttgtatgttttcgaagttttctttctggctctcaaattgattcattagtcttgtaagcaaacgttgtctccatgttattttggataatataacatgtagtcatgtagagaatacccaaggaggaatcaaagtcaagcgacagattaataatatcatagatggtcctgttcttttttgtaattagaaggaaagagtatgtacatatcctatgaaaatatcatgattaactattagtgatactttattaattcaataattaatactacctttttcttaatgattaaccaattgattaatgtgcttaatgttgttgttacattaaccaatcgtcctacatttaatgggcctaatactaaataatgggccttaacgagcttatcatgttcagttataaactcaaatattttttaaaaaaatcttcttccacttgaatacgaaacacggaaacactaacgaggaagagaacgtgaagctatatatatatgtctcgagagctcactgtatctcttgccgccatagcttcacaagctctaacatttcctcaattaaaccaaatccatgctcagctcattgtattcaattctcttcctcgacaaagctactgggcttcgcgtataatcagctgctgcacgcgcctccgtgcgccgtcttactacacgcggctcattttcgattcagtgacattccctaatgtcttcgttgtcaattccatgtttaaatacttctcgaagatggatatggcgaatgatgttcttcgtctgtatgaacaaagatctcgttgtgggattatgcctgacgctttttctttccctgttgtgatcaaatcggctgggagattcgggattttgtttcaggcccttgttgagaagttgggattttttaaggacccttatgtgaggaatgtgataatggatatgtatgtgaagcatgagtcagtggagagtgcacgcaaagtgttcgatcaaatttctcagagaaagggttctgactggaatgtgatgatttctgggtattggaaatggggaaacaaggaggaagcttgtaagttgttcgatatgatgccagagaatgatgtggtttcttggacggtgatgattactggttttgcaaaggttaaggatttggaaaatgcgaggaagtattttgatcggatgccggagaagagtgttgtttcttggaacgctatgctttcaggttatgctcaaaatggttttacagaggatgctctgagattgtttaacgatatgttgagacttggagttaggccaaatgagaccacatgggtcattgttatttccgcatgttctttccgtgctgatccttccctcactcgttcactagtaaaactgattgatgagaagagagtccgtttgaattgctttgtgaagacagcattgcttgatatgcatgctaagtgcagagatattcaatctgctagaagaattttcaacgagttaggtacgcagaggaatcttgtgacttggaatgctatgatatctggatacactagaatcggggatatgagttcggctaggcagctttttgatacaatgcctaagcgaaatgttgtttcttggaattctctgatagctgggtatgctcacaacgggcaagctgcactagccattgagtttttcgaagatatgattgattatggagattccaaaccggatgaagtaacaatgattagtgttctctcggcttgtggacacatggctgatctagaattgggtgattgcattgtagattacattcgtaagaaccaaatcaagcttaatgattcaggatacaggtctttgatcttcatgtatgctaggggtggaaacctgtgggaagcaaaacgggtgtttgacgaaatgaaggaaagagatgttgtctcttataacactttattcacagcttttgcagctaacggagacggggttgaaacgctgaatttactctcaaagatgaaagacgaaggtattgagcctgaccgtgtgacttacactagtgtcttgacggcttgtaaccgtgcaggattactcaaagaaggccagagaatattcaaatcaataagaaatccactggcggatcattatgcttgtatggatttgttgcgctgagttgataagcaaatagattaatcagccaaaggtagaatgtacagtccctaagaaattgccaatggatgcacgctcctcaatgccagtcttacatcaggtgagcataatctgtatttgaattgatttaatataaagttcaaaaaaatttccttacaacctaggaaaaggatagaacccaaaattaaaactaatactaaagtcccactcttgtcaatgtaataatatggtcgtctggttagaccccactttttgcctttttttgtttctttagttgcttcttctcccatttaacattccgtgtgaataggatatccttaaagtggtttctatgtgatttcttgggtcttttctttgttatttcttacatgtgagtgcttccctaaagttcacttttgttttgtctaccattctgtgtgggttcacttatttactggtttttgcttcgaagcttcctcctgaaactcccaagcttgccactttattttgtttaagaatgtgtatataatctgaattgtgggttagggcaacgaaaccacagtagaaaaccaacatctgcagaaaggaaactatctcctgaaaagaaaaacaaacttctttgttcctgtttatattgttctctttctcaattatatcagttttgcggagtttctattatataactgtgtcttgatcactgagtttctgcctaaatttttttttctatggatttgagactccaacaagctgctgagtctggaagcatcaatgagttgtatgctcttattgatgagaatccatacatacttgagaacattgatgcggtgccatttgtgagcactcccctacatgtagctgcagtttttggaaacatagaatttgccatggagatgctgaatcttaagccctcttttgccagaaagctgaacacaagcggttacagtccattgcatctcgctgtggaaaaggaacaaagcgactttgtctcccatatgctctggcatgatggtggcctgtcccgtgtcaaagggagaaatggcgtcacgccgttccatctcttagtgataaggggagacgatgatcttgtagcagagtgcctcataacttcccctgaatgtattgaagatgtgaacgtggatcgccaaaatgctttgcatctagctgtgatgaatgatagatttgaagttctccaggttctcacgggatggatccagagaatgagccaaaaagatgcttactatatcgagaaccgagttctgaataaaagggattttgacttcaacacggccttgcaccttgcagcatataagaatgatcagcaggcaagctttactttctttgaaattcgtttttcaatatcatgtatctgattagcttccatatcaatactaagtgataatgagtcaggtgaaatatgatcattattaactaagatctttttcagtatgagatgctctaatagaacgatcaatttcgtgcaggccttgaaactattactaaaatgccggttggtggagccgaacctagttaatattgatgatttaacattcgttgatatcttaaggacccagggagagaacgcaggtggtgggaacctagatttggaacaagctgttataaaaactgggtgtgtagaggcggcttctatgccaaaattcaaggaagagtctgatttgttgaaatcaccaatcaattttatgacatactattccacgtccatgaaacgcatgaagtcttccacttcagatcaagatcgcggagcatttctgattgtatgcactttgataataacagccacttatcagatggccctccagcctcccggaggtgtacaccaatctgagaatgcgaatgcgaatgcgggttctgtggtgatgaaacagacattcttcatccttctttggatttccaacaccgttggtttctgctgcgctgtattctacaccttttgtctcataccactcggtcagttgtttacgatatggtttttttatatagggacatgtctgtgcatttcttatgcactagcaatggcagtaatctcaccacaccctctagtgtttctctctgctacctttgctctcttccttgtttttgctctctatctcttgcttgaagctttcgtagatacttggcggaagcatcggacggtggtacctaagtcccgattcagctggttttggaaggttttacaatattattatatctgaagagagggctttaagaattcaaatggtgtaaccctttcttaagagttgtgtaatgtaatgttccaagtagtaactggcttatatagatattaaaaaaaaagacttggtatgtttattgtttaatgagtttcatcaggctttcggagttaatatttgttaatgatggttaacaaaataagttgatgctaagaagaagaaactagtttgcatagagagagttattaagcacacaattatttttgagaaacaaagaacgaacataaatacggcaaccaatcatcaggcaaagatgcagcaacccttgtgacttttgttagtaatgtcataatgttccaggaagaaaagaagcaaaccagctgcaatatagagagtgtttgtgatatcttagacatgttcgttggttttaactgtaattcaagtcttacaatccattctattcccaagattagctaaaatctatggtagagaccaccaaaccatgagatgtcttcttgttggagaaatcaattaaaccattatattatacattcaatctctggagctccaataaacaatgcataagattatacaaacgaaaaaacaaccattagagacaggcaaaaatttgtatgataaaatacaaaacttggggatagtcaaatcaaactacaaatatgtgaagtttgacactgcagaaaaagctaaagaagaagtgatagagagattaaagagtgagtcaattatgatattacaaagaatctaaaaatgcaatctttttgttgattcttgatgatctaaagaagaagaaaccctagtttgaacgagatggatttgtggtcagtacggcgatggagctttggcgttgggatcccaaatgacatcagagccacccacgtacatcgactctccaccacctccagagaccggcggcgattgtccctcctcttccccttccgccgagtttctttgctcttcctccgtagcaggtaaccggtgataggaagggttcttgaaactagtggcgacgaagtaaacagttccggcggcaacgagaggaccagcgacgaatccaccgatgactttcccctgaggtccggcgagagagacggtgaagaaattggagacgggaggggacaaggaggtaggaggtagaggagggaggaaagtggcggagacagagagaagatcgaactttccgtggaaagtaatggttgagccaggagctgccggagaaggctgacgcaaagtgacatcagcaacggagcctgagccactgaggacgcaaaagccgatggctttaccgcggcagaaacggtttagggcttcaacgacatcgtttccggatggcacttcgaggatgtaaggactcataggagggtcaatggtgacaaagattggagctttaggtttgtttttggaacctcgaggtctgccacgtggacgcccgacggtttccatggagggagaggagggagagaggtgcaagtgtcgctgtgtagggagcttcgacaacatttaatcttttggaattttgtgttaataaagatgcagagagaggtttggttggtatatatgagatgtactgtatgtataaagacgactagtctaatccttttgggaatatactcgatgggcctttcaaagcaacaaactttaataaacccactcattactttagagtttagaataagtacgtttctgccagaagctcattttctatggatccaaggcctcaacaggctgctgaatctggtagcatcggtgacttttatgctttgattaatgagagaatccgtgcttactgtcaatcttgaggtagagtgtcgagtaactttaatgtatccaaaatgtgagtgttaatggtcagaatgctctgtgatatgaaaaatagatttgaacttgtccaagtccttaccggatgaatccggtaaatgaggcaaagagaggctctctctaccgagtatgcatgccttactggttctctctgtttgctttcccttgtacctgctttttcctctccatatcttgatggaagctttcgtaagcagtggtgacagtttgatacaacaactcagaggactttgagaatgcagaggtgcaaacattaaaaatatgttatgtcccttctgacttcttcttcttgtatcataataatgttgtaattataggtagtttgtttctatatacatgttagtacgttcaatatgcttcatcaagcgtgagcctttgaaatttgtgttgtgaatgtcaaatcaaatgagtgtgataccatgaagaaatatccagctgccatataaaagagtcccacttgtttttaaattgtctcttcttcacatgtacatgtgggttcttcggtctttgaactctgtttctttattctttcttacatttgtttgatggttctaggtaaagacaatttctttgttgtcctcttgctgaatttagatcacaaacatttttcttgaattcagagtttttctgatcaaaagctccctctctctctcaccatggatccgagactacaacatgctgctgaaaccggaagcatcaatgacttttatgctctgattgaggagaatccttacattcttgataacatcaatgccgtgccatttgttaacactccgctccatgtagctgcagcttctgacaacattccatttgccatggagatgctgaatcttaagccatcgtttgccagaaagctgaacacaagtggctacagtccattgcatcttgctgtggaaaaagatcatagagagtttataacatggctgctttggcgtgatcccggacttgttcgcgttaaagggagagaaggaatcacacctttccatctcttagcgattagaggagacgtaaatcttgtagcagagtgtctcaagtattgccctgtatgtattcaagatgtgagtgtgaatggccataacgctcttcaccttgctgtgatgaatgatagatttgaaattcttcaagtcctcaccggttggctccaaagaatgagccaaaaagattctgcttccaccgaatctgatttcttgaatagaaaagatttagcacacaacacgcctttgcatcttgcagcatataaggaagatcatcaggtatagttcttaaagctactaaactttttttagttttgtatgttttctgtcatgttgtgtcaaaattggcctgagtataaaagatatgtatgcaggcggtaaaactgctgctacagtgtcagctggtgaaactgaacgaagtaaatgcggatggtttaacattccttgatatcttaagaaacaatggacagagtagagacttggataaggatttggaacaagttgttgtaaaaaccgggtgcaaggaggcggcttctcttccgcaactcgagaaaccgtctgatcagtttaagtcaccagtcactttcttggctcattgctccattggcatcagacgcctaaggtccgacacttcagaagaaggccgtgcagtcttcttgattatatgtactttgatactcacatccacttatcaaactgcactccagcctccaggaggtgtacaccagtccgagggtggtggtaccgcagtaatgaaacagacattcttcatcgtcctttgggtttctaacactataggcttctgttgcgctctactctacacgttttgtctcctaccaatcggtagcttgtttacaacatggttcttttggattggagcgtctctgggagtttcttatgcgcttgctatggctataatctcacccaaccctctattgtttctttgtgcggcctttaccttgtacctgctctttcctatgtatctctttatggaaattttcatagccctgaggctgagccatctgaaggctgcagtaaatcgaatgtttgttacatttgtgaaacagagagggactttgagaatctaaagatataacctcgacaaattgttattgaatgtcatgttctatgaggtaatcagcttaatgagtttcatcgggagccaaagtttaaaacttttaaagcaagtgagataccgagaagaagaaaccacttgacatagactagagagtgcttaaaagacagaattttctcagaaacttaagacaaattagtcataacattttaacattaacagcaaaaaaaaagaaaagaaaagagaaagagacattactaactgtaagctgtctcaatcccattaaaactacgcaatcagaagccttttgtttcttcttcttcccacagctaaactcttgtactgtcttcttaaactgtgaaaacgttttcctctttcacaggctctaatgttattatcactttcaggctttcattttcttgctggtagtgcaacttgggcatttgtaatgtttgatatgctcagcctttgctggtgtgatcttcacgcatttcccatggaaccatttctcgcaagcatcacaacatatccagaactcatctcctccatagttgtcgccacacgcaccacaaacagcaccttgctcgtcatcttcatcctcatctccgctctcatcttcttttcttggtggaggggacatctttgaagccttagtgtgagattcagaatgacgaggctgcattagaaaacaaaggagtaagtagagataagaacccaacacagatacatggactgagagggcgaaaaaaaagagaaaacagaagcttctaccttgccaccactagatttgcttctgctactgttgtggttagcagattgatccttggattgctttgcattgccagttacaacctcgaaaatggttgggagatcatttatcatctggaagagcctcttcctgaaaggaattaataagatcagaggcaagataactaaaccatttgagtctataatatcagagaaaacaaacaatgttacttggctattcaacaaacatgatctttgacctaaattcttaaatctcaataaattttggttcagcttagatggaattcaatacatttgtaggttcacttctctctactgaaggagaaaaaatgatgatcacttcttcagggttgtttcacagaaacaggataacatgagtttagtgtgccagagatcgtcactagtatctacaacaacaactacacggtgtttggatgctagaattatgcagctactatactagtcattgaagctttaccaaacaagcaaaattaacaaacacagaacactgagcagagaaagaaacttacctctcattcttgccaaatccgaaacgtgcaccaaagtaaaatgcaacagagataagccatgaatcactgtgaactgcaaccaaagaaatccagtctttttcttgcattccgtcccttgcgaaattgatgcctaacgctggttcaggaagctcaggagggacctcctcaacgggaagattaacctcccatgtctcatttggaagtccataaagacacaagttttccttctctgcattagcaaaaaacgtaattcactaagaagtcaagaagagaaaccacaaagagaactaacttcatcttaggtacaaatctcacaaacacttaaaaagtctataatctgttcaaacatcatgaaccaaaaaaactgttcaaacagacaacaactctgacaggaagataatcaaagatataacacctaacagaggagtcaactagaaaaaggatcataacaacaagtctactgcagattagatgtaatcaggaagaagctaactaaaacaatctaacagaatttagaaaaacaaaagctgggaacaaaaagaatccgtgaacaaactcatgaagcaaaaaaaacgcatgtccaattacaatctcttccctaattcagacccgaaaggaactcttgcactgaaaaatcttaactttagcaaaaaaaaaaaaaacacatcttcctataaacaagataagaaccaatgcgttaggaagctatatacaagactttaaatgggtaacgaaataactcaccagggtcacactgatggtaaaacttctgtacatctgcaaaacaaaacacacaacaaaagaacatgaataaacccaaaacaggaagaagaaagccaaaatcttttgggggtttttttctcaggaaattaagaaaacccaattgaagaaacgagcactaaacatataaaaaaaactcgcaaatctacagaaatcatctaagattcgatcaaaagaaacagagtaaatagagaaagagagatcgagctgaccagtagagagagccttgatgagaccagctctacgaccacgaaagtcgctaaaaacctcttcgacagtgcgaggtataggatgctgaattccttccatagtattgcttcaaaagccaaagactttcacagatgagaatgaatcagcctcaccaaagaatgcttccaagtatcgagatgcactcagaaacaaaaaagccaagatcggctttttagtttttccttttgagggaattttgtatagttcgggggagagtgaaatctataaactttcggaggaatttatttcatttggggaaattgagaagagagagctgtgctaagaaaaaaaaaccctaaaaacgaaaaggaaaggagacaaaagacaatttgagggatttggaagcattggaagaatagattaaagcgacaacatctcaactttttttttttttttttaaagtcacaacctgtatttatctatttatttaattcactccagaaatataaagtcgttttacttttcttttgttttgggtcaatatttatgtgcgcttttttttcctgaggcatgttctacaacgaactgaagtaataatacagtaaatttctgccagttttactgtgattaacgtttaagaactgtactataatatccatatctgtcgatcaatataatggaaaggctaaagattaaaaaaaaataatgattttaaacaaaattgatggttttacaatattctgtcattaatctctagttaataatgagttaaattatactactaatagttaaaaagaatgcttcaagcttaataccgtagagagagcgagggtctttatctgatttgtttaatcgttaatgttttttgttattattttggttttgtttatactactgttttacatgtttttgttaattttcatgtgaattatattcaaatcaaactctacaaagctttaatacatagaagttagaactacattaggatggatgactatgtatttcctatctttttgcagattagaatttgcgggtaagtaagtaaaatgaggcgttgatgcttttatcctcaaaagaacaatcagttgtttttatgaagaagaaaaaaagaagaagaagttagtcacagttgggagatacttgacgtgtatcacaagttgtcagatacttagcagaaagattaatggtataacgtcgaaaccaaagaaacattttgatcttcataccaataattaagtttccggatgttgtctaagaatcagtttgctccatttcacgtttcgaccttattgacatgttgaatcatcagatgacacatggaaatgattttaaaacaatatgtatttgtttggtttgctcttcatcatggtctaatgagctatttgcatacagcattttttaacatggttgtctaatttgggatgtaagtgtcgttcttttgtataaagttgtttgatggagtttcgtattgtttgattaattaaaaggtagtttaactaataaaatttaaatatatttacgaataattaggattaggaacacattcacgtacttgccacattaataaaagtagactattaactttgtaaacatgttattaatcaatattaaaaatatgctactgtcacatgactcgccttccaagttagctaactattagttaacttctaatatgtacttattagatataataagtataagttcgaatcaatctattgtaataccaatgtggaatgaattcataacaaactatctttctctcaaggttcattcgtaatagattcataaacattcgatgaataatgtagtatcagctgaccagtcaacaatttttgtaaaatactaaggcaacaaaatcaagctgactattcaacaatgggcctaatctcacgaaaacgcccaatttgaaatcaacgaagcccataacgcagtggtcttctccgtccatccacctgaagcccacaattgattatggagatcatcatccgaaatcttcaaccaaatcatttcaacacaaggccctcaaccccgaaattcgatgagaaaaacttttcaacattttgtcactgaaatacggttcgcataatataatggagttcgggtaaacctggtctgaaatttgattacgaaagggctcacaaatgattttactagtcttagttaattaagctcgaggataatggggcaatagttgtaattacaaaagttatgggtcatatttaaaacataataaaaatataaggaccataaactaaaaagtttcagtgtatcttgcatcaccgaggcaagtatgccagtagcctctccaagcatttcaacaatctttgccttccacccgaaggaaagccaatcctataaagagggacgaaatcagatgtaacttagcttgcacatccccgaaaacaccaatattcttaaagattccacattatttcctgaataaagaagaaccaaaaggaacatggggttcccttacctcgccaacaaaagtcaagtaagtaccaatattaagagcacgcccatgacaatttttgctatctttttatttttttgtacgaatactcttcagatctttttcagttgatgtcaatccaaactttaatcatgagtctatcacaatgttgttgaagtacataaaacaaggatttataaacgagttaggagaattttaaaccacaaaagtaacatagtttcacagaattgtatcaaaatatcattattgttgttatatgtattcatgaagtgaaaaaatattaaaatcttataaataatcagttttatacacaaaaatatataaattgatatttcgagttacaaatgaatctaaccataaaaattgtaactacatattatggatctaattttcttaacaatacaagaataaacaaatagtaaatataaattagcataaagaacaatcaatataaatttttcttaacaattttcacaacaaacccacgcatagcgtgggtactcatctagtactattaaatcctagatcatcttgaatttttactacattcacctgacccctacagtcttcctaaatgtgagagagaggaataaccaattaaggagggagggataagttacgggaaaaagtagcaaatgaacgctagaatgtatcttacaacaagataccaaggagtctccttttgatgtaacagaatcgttagagacttctctatcaaactaccaccgtccaactcgatcatacaatccagtttagcctgaagtataagtgtaatgacaacatcagaaaagtaagcgcacatgacatgatgccaagtttacaaaagcaatctttaccttttcctcaacaaaagcaccaaaaagaccattgtgtttgcagtcgaggggagctgcggaaccaactcttccggataccaaaacaaggagattcgtggtgttttttgcaagcaaatcatctgaaaaaaactaaaaaggattatattaatccaaaaccaatgcagatgaaaaataaccagaagtcgaattattaaacaaaaacatatacctaacgatttcaagccgtccacacgggtaatacgtcagcccaaagagttaactctcctgagccatcataggaaataacacattacaaattgattgataaggcgttgctaacattcaaatatcgaaaaggactgggaatgagattgaccttttaattttacggccaaagagataacataatgcaccagcgaatgaaagaaaaacagtagattccatcacctacaaaattaaacaagagtgcatcacacgatcgttccagagttgatcttaaaattaaaataaaaacaaaaacaaaaactgaattttaattttgacatcagcttagtctaagcttatactagtgctttcaattttaatttgcctttggattaaggtcttgtgacctctgcttttattatatctattagtattaactattagtcattgactttatatgtgtatatgggaaaaatactaaaagcctaaaacagttggctggttcgggtgtatcattgagaattttgaattttgataactccttccttggatcattgatgataaaacttatcttcaattctaaatccatttacaaattcaagattttttttttttgtctcatggatgaaataatcatgtgttaagttcaaccggagtgtaacatctctaaagtaacccttgcagtggcacaaacgaaacaacactctgttttattcatcaaggcatatccgttatcgcctttacatttacacatgcatttttttgtcacattttcttttttgttgaaaggttttattttggtcgcattctctaatccattttattagaaagctttctgcttgtagggtttcaccattttagcttggacggaaaatactgcaaataatataataaacaccgattaaactcgccggcatagaccaaagtttgctatataaaatttgaaaacacattttaaagtatatacatactaccttgttggtaagggagagataatatggtttcacttcctcaacgtttacgcggactttgcttttgctgtagagatcatacttgttgaacactttaagccacttcatgttctctctgtcttcattgttcatcaaatgcttgtatgcttctgatttgtgaagagctgccaaccaaaaacaataacaataacccgtagttttataatctagactcatctattaaccaataaattcaagcaaatcagtctttgtgtttcaaataccgtagaacgaatggtatctgatgatgaaaagaccggctgatggtaaagtagtttgattctccttcgcaacctgtgaaattcagttatgtacatcatatagattattcttacatgtcggtaaatcataaacacatgttgagattgtaatgaacttacaaggtacatgtaatcatcatgtccccaagacattaacacattgtcgagcccacagccttcagtgtatatcccatacttagagttgtaactcgggttatcatagtctggattctccttgaagtactacatcaagaaacccgcaatggaatcaatttttcatatgttttgaaactcaaacaaagtttttaaattgtgtttaaggaccttatgtaccttgtggtgaacaatagattcatcaaaagcacatcccactggaaatgtatcaccgacgacagcccactgagggagctcaccaaatgaagagtgaagaagaacttttccaagatctgattcacatacacaccaaacacaaaatcattaaaccggtaaacgatattttaacgtgatcaaaccgaatcagggagtataatttaccgtggataagaccggtcagatggagccagtcttcatcagggtaatcttttctgatggcttcagctgtctgaagcagatgctcgatctgaggttcgtccaaatcaggatcactctcgtcgataaactcattcagaagctcgcaacattcccaaatgctcatctccgtacgatttagcttctcgtattcttctctcatcttcctcacgaaatcaacggtttggccaatgtgattgactctgtaaaattcctcaacacctcttctcctttcactctcagcatcataatccctttcatgacaacaacacaagtaaataaagattaaagatttgatcttgcaatctctgatgtggatatatctacctgaaggtgcgaccaaaagagttggtgtgaggagcctcgaaacctgcatctaacaccaactctgtttcttcctctttaccattcccctgattcttctctacaatctcatctcctgcatctaaagtaactcaaactcaatcatcaaataaatctataataagatcatttcaaaacagagcatagagaaagaaagatccaaagtaaaacgagtacaaaggatcacgaaccgttctgatcagagtggcgatctatgagaatagtcatggagattcttcagatccagagaaaccaaaactagggttttgttgttgggtgatgacggcaaaatggagaaaggaaaatgatggtttaaataggtgaaaagcgagccctgaagtgggaataaaggaagaagtgagtccttggccatattttcatcagaaggactctcaaagtgtccttctatggcaaaatatgcaaaaaaatctcaccttttttattggaatagggttcatgcagagaaaacagaaaggctaagaaacagctgtaaccgtttagatgagttagataacgacttggcgcgtcattaatctttttaaaatatgatatttgcgtacgcgtcagacttttttaatccactaattattaactacaaattttgaatttgttattctatttcacaacagtccgacttcaaaaccacttctatgttgagtaataataaatatctgctgattattttacacgtgtgaagactattagccgtagaaagatcacacaaaagagaagaagaagaagaaatcacgtcacttttatagtgggatctacatgacgtggcttcataaatgacaattttgttttctatgatccgatggtgtctctgagtgttgtagagtatagacgacaaaaaaattaaaagaggaagacgtcttccacatttgtattttcttacaattccgtgaccaaacaaacaatcccacaattttaagtcgagattcacggtttctgttgtctctaatttaaattcatattacaacaaaattcatctaatagacatgtattgtattgtatcagctctcttttagagttttctctctttaacgattaagcagacttcatttagaattgaacaaaattttgtttacataaattctcatggcagacaaaatgaagaaaaatcataaaataccgattgtaattaattaataataaccgaaattagtacgtgcagatatcacctaactttcaattaaccaagtggaaaagaccggtagagaaaagaccaaccagtcaacaaatgactatttgcatttcttaaaaaactacttcgtatgaactgacaacaagccaatgtccataatatatcatcaaaataccaattgttcttccgtctcagaagtcagaaccagaagctggatatctcagtaactatgattctatcattctcacaccaaactactttgaatcagtataaacaagagagacttatactaatcaaccgcattgaattagttagagagaaatcacaatccattgttctgaaaccccttacaatttacacttttgtctatgaaagaaacatgaacccctcggtttaccggtacctacacaatattaacttccggttttaaccaaaaaaaaagaaagacagtttatcttttgacccctttttcagctgtttcttatgtttttctctgttatagtatcatccagtaaaggttacctcagtgtttcgattctctgaacatgttcattggatttgatggtactgtgtgataccgcgttttggcggaagctttcttaggataaagaggaccagagacgatggcaatatctccaccaactgtaagtaaacagaacacactttttgtttagagatttttaaaagaagcttcatatttagattctaagattcacatagtgtgtctatatacacatgcacatatatggtagctgaagaggtgaatggaaagcttaccaagtaatatatgaagtttaggattggatgatctaagacatcaagatctgctgcatcgtcaaacgcatcaaagcacatctagaccattaacagaagatgatatgaaagatctggttagctgtggtttcggagatccaccaacacagagaattcaatcaacaagatatggtctaatggtatcaatagtatgatgtgtatatctttaccatgatacatctgatgaggaaacatgtaaagcatatggttgtcacgtagccaacctgcaattcgtacaacacataaagggggtaaggatccaagaaacggaatttaaagatcggggtaactttggtttaatattcaaggttcacctcttgtagcttcttgcgccgccctttagactctactggaaatcgttgcagcatcaggaaaagcctgcaaagaaataatcatcaaagacgataaatcaaggcgacttcatgagaaacttccttcataacagaaatgatatatgataaatcctgatatggtacaaaaaggatcttgtctagctagcaaccagtggagggcaggaatcctagttttccaaatgatatcatcaactcatttgtggcaggaaaacatgtggcagcaggtaacaagcgtttaaactaagctaccatcatcgtgtagcatatgcaagtgcaacatacttaccttcctccatataataaaaagccaagggccgcaaacaatgagacacctgcaatatacattcacaagagatgagacatagagtgcattaaaaaaatcaatctctgtgtaaaatgatctatacttcaaactatacctgcaaagaacatcttagaaatgattaccataaggtgaacaggcttccaccacaaaaccaaccaaagagcaatctgaaattaatacattcaaatgaaagattaaagctaaggaacccacaacacaaatggatcgtaaggaaattcaataagaagctcaggcccacaggtccaccaagttcaaggttaactctaaactttgaaaatttctcagatattacaaaggccaaataggtagttagtttcacctgaattacgtatacaactgcattaattgtgaagaaacttggcctcagtccatcagtcgatacagcacgtgcctgccaagatagagtaaatatcaacaacaatgcaggaaaaactaaattgaaaatatatacagaatcaaggtttacctggtagtaaatctctgcccaaaagagaaccagaagcgcatatgtagtgaagaaagcaagacttggaatatcaagtaagatatgttgcagaatctacaagaaaaaccgaacgatacttgcaagtttagaaatttcaaatagaccatcaatgaggctaaatcacaatatcaatagaaacaccaaacctctggctgcatgttctgtgcatctcgccggaagagaaaaaccagagctcgaactacaaagaagaagacgagccaatcaacaaaagatacacaaaacaaaatcaaaaactaacaagagacaaacaaacccacctccgttaaccatgaaattgagaaaatgaaagaccttctgcgtcgtccagccatattctggaactctcaattgtattcttaccaattgaatctacaaaaaaacaaatgaaactttaatcaatttagggtttttttctctaatcaacactccatacaacaactatttcctcaatttcatatccttaaatgcctaatcttccgattccaaatcaacacattccctaattccaatcccaattcaaaaccagaaggacaagtaaacggtaccacagcaatgacggaaacgattccatatagaacagcaagaacatggaagatacgatcctgccacaccggagattcattcacatcccaccaccaattcttaccctccttcaaattaaacgctacgattgctgaagatgacatcatttccaagccgccgcttctcatctccacgaaaaaaacacatacaaagattcaaattccttatagatttagcttcgatcaccaaaaagagaatcgatcgaatcacttctcctctctccttctccttcctagatttttattttatttttcttccatttttttttgttttaaggtatttatagtattacccgaaataagatttgagaccggccgtgacagggaatacttagaatgacgtggaagaaactgaagaggagattgaaaaagtaaccggatatagccggtggttctctccgtgtggagatgttctggtgaccgacacgcaacgttgttatcatagttccacgtgtatgtatacgtggataaattaatgctagctggactttttaatgaactttagagagattgtgactaatttaacaatgacgaaactaataaaaaatgctatggatttaattattaacactttccttggtaccttatatattccaaaatatttattattccatatattcaaataacaaacgaattatcgctgcaggaattttagttacacacaattacaaaaatgaatcaaatggggtatacacgtaaatataataacatgaattttcaaggttcgaacttttctcgttgaagacaagtaggtaataactcttttaattaacggcactgcagattcttcggatttgtccatctgaaccagtgagtgtctgaatatctcccattttgatcattgcagctgagaaatcagacgcaaatcgtgatggatttctgctgtactccgtcactatactatctgtagaagctccggttccgaacaaaacttgatcgctttctaaaagtcctttcttctgcatcaagtttctgtaatagttattgtcgaacgagtttggtgtcacttgatctaaaggtgctagagtcgtatctccaccgttgaccggacaacgacgcttacgggtactggagaatcccgcgtcaatgtcactcgagttatcgtaaagcctacctttgaacgtgaggcattgagcttgccctaatgtgtgagctcctgtaaatagggttaacttgtgtcacaagaaaggttttaaatggcaagaaattagtgaccaaaagtgtgttttacggggtgactgacctgagagagcgacgaggtctcttgtgttgagtccttttcgaaggaagagttcagagagatcgttgaggctagccctgaagttggggagatccctgtctgcgatagccctaaacgcgttggtggaatctcttcgaccaaccttcacatcatatcttggacctccgacctattgatgataccaaaatttacatattcaagaattaattagaactatgattaatcaaatttgcaaccgtaaacttataacatttacatgacattttacgtcagagaagtaaatattatattacttgaaaaagtttaaagtagtagttgaatatataaatatgtacatgtttggattaataatcaagatatatgtatataaagatggatatagagactaacatattcagaagcatctctagcagcaacggcaataatatcagcgcaagaaacaacgccgggacaaacactctctacagctgatttggcttgatcgataacttcaaatcctcttgccgattgaaaatttgccaatgaatctctctcactctccatggtgggagttgccacgagcatgaccgatgcatcacaaccctacaaattaaaaaaaaaaaaaaaaaaatatataaagtttagagcagtccataaaacacatatatgtatggacacacacacacatgttgaatcaaatgttttaagtacatacattaacgaagcagtcgtggaaatggagacggatgagagaagcagccattctacgttcacggctgattgcggttcggattgaagatcggatggtggagagagcgttttgacaagtttggtcgtagaaagtaggagaaagttgtgcttgactgaaacaacacaaactcaacaacaatacaagaatcttgaagatcgccatttagcttattacaagagacttttgtttgtaaatttttttagtaatgaaaagaatttcgtaagagctaattgagaagtgatttaatgaattgaagaaacttgatgtgagttttcgaaatgggacgaaatacgtcttatatatataggagcgaaataagtaaccaatcatggtcacttttttctgcgatagcgcgtagacaccacccgacgaccttttccaatagttgccttttctcctttaatatggcacctaatatctttgtctacataataattattattggataagagttaactatttttagaaacgattacattctcatattggatttagcaatctgaaattatataataagtttctgcgatgattattgaactctcataaaaatttattttgataaagaactaaatcttttattggattgaacaatcttaatttgtacattatagatattcgttttcaacaaaagagtgtttgttcggggtatttgattatttcgctttctattttcaactcttgcaattacttgacatttgcattaacgaaaaaactgaaataataaagtatccgaatttggtttagattttgttgaagctggcctacgttgaccaaaccataacttaataattaaaaccgttacgcttacgcggaattttgaaaattgacttttgacttttataaaatagtcagaaagaatctttcgtaaggataatgtgatgtaacattgtccataccgtaaccactagccacaagtgcttcttaacttgttcgttgctttcctatttaggtaagcttcttagtttgtttcagtaaataattaaaaaaattaagttccatttacatttacacctttgaatccttttattttttcaattccattccattttcttaaattctcatcaggatctttcagatgaaaacgatatagaacaaatatctaaaatatcattatgttatgattatatcttgatttctgtttgactattgttttacccatctcccaaaaaaatgcatatattaattcaaatgtttactgaatctcgcggacaactaatcaataggctcaaagacgacaacgtcgacaagcaccatttgatttacaaataaagttcgttttgtaagctttgtatcaatatctatatttgatacgagggagtgaattttattctctgcaaaatatatgtatatttctttttttttgttaaagaaaatatatgtatatgtcttacgtactaagagttatcatgaaggtattttaatttcagcccaacttaagtttgaatgtgtggatatatagcaatacaaataattattgacaagtaaaattaacctcagacgacggtaaaaacaaaaaaacaaaaaagataaaaaggaaccaatttgcctgaagttcatgttgatgatatcgtttttttctcagtgcgtagtagtgagttttcttcattttttctaaagaattatataaacgaatatattaatatttcaatttgaccggtaatcttaatcaatatataaacacacgtcatttggtgtgaatttctaatggaggacagcttttagtctaattagatcatgtaagacagttccatacatgcactgatctagtaacatattcgaacatagttgaattgaccttttcatcaaaggaaaatgaaacttactaaacacatatatatactcacccatatgggcagacgacctagtttgaagaagagctagatgaaaatgacacccctaaaataggaaagtaaatatatataatttttttttgacaaaaatgtttgaaaacatatttggtttagtacgtacgaccccgttaagtattatggtttggacttcgaaatctccattatgttatgctttggtcacgatatcaaaaaaaaatattattattataataaatctaggcctgccatcatatggattaatagatattagccaattcatatgcatacatgtatatattatgtaccatgatactttttcttttttggttgatatgctactattatatttttttcgtagttgagcggtgtctacccataaacataactgtttcaaactatttgtaaattgtaatcataaaacttcgaaattctataggcgagatgttagaagattttgttaaatattatagaagaaattctcttagctaatttttcccttttttcgaactgtggaactatttgaatgctcatctagttgtatatatgctaaaagatgggggttttccaatcgttcgaacataaatacataatgaatcaccacgtactaaaatcaactaaggaaacaaatgaaattacaggtatttttgtgcgtaaatcatttaagagatgaatgattcgaatttcgattcttagggaaaaacacaactactaccgtactacgtatgagatgcaaaacactacaaaaaaggttaaacacgactacgcacaataatgactgtccatagcgatatgccgatacatcgaaattcctaacaaatttatcattattataaatcaaactactgacgaatcaaatttgaggagtggattaataaataacttttaatgttatcggtgttagcccgcaaagactggattatgcgattttttttttaaaggaaagaaaagcgacagtacatagctagcttcatatatgatcgccattgaccatgcattgttttctttcatatatatctctaagaattgtcatcgtaatagggacattgcaagtcctctagttactaaataatcactctttttatttttcacaatatatagctcaattccaattttatttgctaaaaaataccacatcgataaaaatttgtccaccaaccaaattcataacgtgtttcaaacgaatcattcactcgttctgagaccaatatatataattagctactaaattaaattaaaaactattttttgtttggttaatgtgttatattttgactttctaattatatgttcgtcaactattcctttcaaactaatcgcacaaaataattgttcgttatattcttcagatccgaacttcaacctgtattattataagaataaactatttaagcgcttactaatgatgttcttgtttttcttctcaaacttttaggttatctgtttttataagttaacaatttgacaattgaccaaaatacaaagtcagagcccaacaattaatttattttaatccaaatattctctagctaacatatgatagatctaacatattttaaattacagtctccaaccttgaacagcgacaccgcgtgaaaactctcatgcacgtatattatataaacccctagggtttgtaacattcaacatcaatctcaaataattcatcaacgagaaaagattaattcttactaccaaaagaaagaagataaattactattttgttttacgtacgaaatatataccaagtgagatctacaaatatggagagattttcactaaggtttgtgctaatgatggtgagcatcatcctcacgtcatcgatttgtcaagcacaactttctccaacattctacgatcaatcgtgtcggaatgctctttcgaagatcagatcctccgttagaacggccatcgctcgtgagagaagaatggccgcgtctctaatccgcatgcacttccatgactgttttgttcatgtaagtttttattcttctaaatactaattccacatttttaaaaaaccttacccaatcatttaataatagttttgtgtatgtttaggggtgtgacgcgtcgatattgctcgagggaacatcaacgatagagagtgaacgagatgcattgccaaacttcaaatcagtaagaggttttgaagtcatagataaagccaaatccgaagtcgagaaagtttgtcccggcattgtttcttgcgctgatatcatagcggttgcggcaagagacgcttctgaatacgtatgtttgtgattatatatgaatatacccaatatcctttatatatataaaccatgcatatgtataacaactctccaaccaatacttaggtgggaggtccaaaatgggcagtgaaagtcggaagacgagattcgacagctgcgttcaaggctctagcaaatagtggtgaactcccgggatttaaagatacccttgatcaactctcaggtcttttcagcaagaaaggtcttaacacaagagaccttgttgctctttcaggtaggtccaagaatcatatttgtatatacattaagttttttttttgatgactccttaaatgtgtgaatagctatgctaattgcatcactagtaataacaatgtactagacaaatttataatttctaatttatattctttgtcacgataactattcaggagcacacaccataggacaatctcaatgcttcttgttccgggacaggctttacgagaactcaagcgacatcgacgcaggatttgccagcacacgcaaacgtcgatgcccaaccgtgggaggtgatggtaatctggcagcattggatctagtaacacctaattctttcgacaacaattactacaaaaacttaatgcaaaagaaaggactattagtaaccgatcaagttttgttcgggtccggtgcatcaactgacggcattgtgtcggaatatagcaagaaccggtcaaaattcgcggcagatttcgcaacagccatgatcaagatgggtaatatagaacctctcactggctctaatggagaaatcagaaagatatgcagctttgttaattaatacatgcatgcgataatgcattttatattgtttgttaaatttattcgttgatctctttgttgtaatgttttgtgattcttactaccaaattgtgtattatttgtttttaatatttgaataaatgccaattagttttatgattatatagtcatattttttgataattcaatccaagttacaattgctggttcaatgtggtttgggctaaaccaaccaccgaatctgtatggttttatttttagagttccaccatatattgggtgcaccatgccacatggaattc

SEQ ID NO: 6 - DNA, 91001 bp, Arabidopsis thaliana
aagcttgtctttctcatcgattggtttgacctgttcagagctttccgacataggcttaggttgttcgtcgcgttgactttcgtctttctgctcgttgtttcccgatttgttgagttcggcgatgagacgatcgtcaaacactataccggaagatccctgacggcggaaagagattgttgatctttgaagaccctccatggatctatctctctctctgttgatgagctaaaagaagggcaaaactaggaaaagtgagtttaggccttataagtgattaatcaatcattgtgtttcagacttggtttccttttatttctgtcctcattattttttcatggggtcggtccactatttattgtttatttttatgatgatgcttccagtttctatttatttctttgtaacaacaatcatcggaaattaatgtaagcggattaacgatatcattcaaccggattattcaaacattaattgtaataaaaaaaaaaaagtaaaaaccattactgttattgatgattaaggcagagaattacatgttaattttttgtttgttttcacatctttaatcggattctcaacaccacataggcacataagtcctcttatatccatatttgttattttattccaaacttttggtttctttaaactcaaaaggggtaagactttttgtaattactattgttttatcagcaaattgcaaggattagataatagattagaaatgaacaggagaattgacttataggacacactaatttaatatttccttcttccccatttcggtaaaccaaatagactatttccttcttccccatttcggtaaaccaaatctattaggtgaggatgttattaaaatgccaaatctctctttataaaaacttgaaaggaaaaacaatacaaagtggtgaaagtgagtcaaagtaattcggttaccaatttgtattcaaagtcaacatcattgtactataatatggtataacttttgttcaataattcaccttcttatatcgtctgtttcttctcaggatcaccactaactaaaacatacgcatgtggtgggtttagcaaaactgtattctttggattaaagtaatgtgcataacacaaattaataaccccgtctgagttggcacaactcaccaatgttgaagattgagataaagaatttgggcccaatcgccgaatagaagtctatattcattactctcaggcccatccataaatacaattgtcaaaaagaaaataaaaaattggtggtccagctgggaacgagccagcaggccatggtgaatctgagtggcgtcgagctgtgatccgtccactgctgagagcgggaggtgatcgctgctctgtgaaaccagcctcacgcattgccctccactgcaagaaccgcctgagccaagccttcgcttaacacacacggatcactctcagcttggactgggcagcccggaacaatgccacaacagatccgacccgtgggccgagccagtgttccaccaacttattgtccccacacgggtcacaagcccacgttactgagctcgacgtacaagtattgatttaatttcatatataaagtaaaacattttgaggtatgtaaccgatgtgggacaaaatacaagtttgggcttcccagatcccacatttggtggaacacatatataaagagtctcttcgttgattagcttcccagatcccacatttcaggtaaaaacatcgtctgggctctttgccattttagcgaatgtggaaaggtgtggtttttttttgctctgctatggattttttttttcaaatcagggtttctctgttgaagtcatatcaggagcttgacatttgtttgtttgggaattagaagctagatacgtatattatatagcatcgtacatatcaaattttggtgtgtgttctaattgaatctgtacttgtttgtgtgttagtgggaggagctcttctcagaccttaagactattgctttagtggaatgcttctcgtaaatgtataagtgaggaaagaaactccattcgtatctatctactaccctaagccgtttatgcattttctgtccatcagaagatcaacacctgtttctggaggattccattgatttaagggattagatggatgatggaccatgtgggattcagtagatgacaagaacacaaaggaatccacctaacagagacaacccacatgttgcaggaaatacatataataatatcacaagaaacggaaaaagaagcagacagagacacctcttcttgaatttaacgccttacattgtggtatcttccatcttctttactgcctcatggtgaaatccagtgcatatatgattatttatctgaggcgaagattccttacttcatcttgatgcgactactactggtccaactttcattggatcggttgatttgaggccgttgttcttacattttggtgtcccacctgttcttttagtactgttttcctttttgtttctggcaatcagaaaacataaaggcaatcagtcatccttctcaataacatacaaagatttggttttcaagagaatcttctatagaaagctagacgtttacttctgtcttattaaggagaagtactggttctttcatttatatcttggctggtttgggaattgcatccaaatttcttgcagtgggtgtcagcctggagctgcagaaaagtgagttgatgttagagattgtaggatcttactccaaaaagccagaaaaggtccttgcgactctctaacttgaaagttgtttcctttttttgaatctgagctggttttggaattttggtgtcaagatttggaatttgaatctgtagtaagattcaggtttagtgggggagggaacaagttggaagcttttgctagttttgtcaaaggtgtcactaaagtactaactatcagaaaacattttcagccagaagcttggtgatgtatcttcagattttcaacaacccatctcatggcttagctcatttatgctactctagtcgggtttcgtgtagggtaagactgagtcgtgtccttgccatgccaccgtcttcagtcctcttgcatatggacgaaagcaatgatcttcccaagcccaagaagggtttttgtctgagtgaagattcgagaaacagtttaaacagtcttcctgcagattctttgcttaggcaggccaacacagtggggattatcggaggcgtttcaactgattccactctgaaatttgtgaagaaactcgtggattggagctcaaatgatggtaaaagctcgttaccttttgtgctttgctcggatcctgctctcaacaaggagcttctcttatacgaggaaaactcgtatccttctctttaccatagagaagagagtactccggttgatccaaagctaattgtggaaaatctaaggaataagaggagatatcttgagaggtgtggagctaaattaatcttaatgccctgtcatattgcacatatatggtatgaagaggtatgtgaagggagtttagttcctctgcttcacatgggtgaatgcattgctaaagaactgcaagaggcaaaaatgaagccccttgaagctgggaatcctctgcgtgtaggtgtgatggccactagcgccacgttatcagcagggttctaccaggagaaactccaaagcaatgtcagtgttctattgtgtccattggaacaacatatctatcatttgtctaagttcgtataaagctagtattatccatcgtatgaagtgactctgtgattatggaaatgaacagggatttgaggctgtgcttccagacaaggcaacaatggagcacacggtgatcccatccatagaagcaatgaagagaaaagacatggaaggagcacggaaccttctgaggatagcgttgcaggtactgctagtgcaggcggtaaacgtggtgatgctcgggtcagatgagatgcgggacctcttgcctggggatgatcctctgctaaagaagtgtgttgatccaatggatgcactagcaaggtctgccatcaaatgggcagagaatagatgctcttaagggagtttgtgtgtgtgtatatttgtgaatagaaatatagctcggctgggatgaaattatcaagtgtaaaccagtgtttgatagaaaactcaaaaccaaagtctcaacatgtattggtcaaaacaagtgtgaacatctccaaagccaaaaaagtctgaacatgtgttggcttggatgcaatgtgtaatatcccttattattaatacagacaattattagtggaataaaaagatgaatcttgagaaatgtttagatatctgaaggaggatgaccaggcatgcttggactggttgtgttgttagggttcttcttgtccaaagggtttttgttcttatattcttcattgttgtcattgttgatccccaatttgttcttcactgcctctgatgcatcatgtgccatactcttcactttctcccctttctgataaaccatcaaatcttatttcttaaaaaagaatgaaaaacctaaaactacaaacatgtagagttgatgggttaagttaacctgctggagaaaacctgaagcttgagaagagttgttgcaatcattctccttcacctgataccaaacatcatttttcaaacaaaactctgtgtactaatattttaaagttaatacggtcgcaaaaggcacaagtaaaagagaaattgaacagaaagactgacatgagcttggcccacgatttggccggccctcacactgaattcctcatcctgtccgctcgccatttcttacttgcttccttcttctctcaaacaatttcttcctttataatcatatatctatgtgaatgcatcacatttttctcctctattcaatggtgttccatttttcaaggagagcttttctagctgttatgatccatcattttctaaatcatttttgacctttccaacttcattctttccatttttagatacaccttattcttgtctatttttttttaatcttaaaaattaactcttccttagcacaaagtctcgttcatatcgatataaccattacgtattacagacttcttgacgaaagattgaaccttttagccatattcttaacatctaacatcagcctcacacaaatcaaaacttttgccattttcaggagctttatcaatcactcatgtcgtcaaatccttcaaaatcattcacaccatcagcagcttcatctgctgagtcgtctgcctcttcatctgtctccattgcttcctctattccttcttcttcgtcttcatcactgtccttgtcctcatagatcacgggaccttcatcttcttcttcatccaagtcgtccacaatctaccattcacacaatcaatggcgattcagtaacatactatcaagtcaaaaactctgatttcttttgtaattccctaactgattcatgaaatcaaacgtcaaacctaatgccacccctaggttacacattgaaaccaaattcatcctggttttaaggtaagacaatacataccaagtccaagccacttgaaacctctacggcagtatgaatagttgaaacccgtgattcgatgagctgcacacacaaccaaaaaatacatatcaatgattcatctatagtgttttctgatctgtatctctaacagagcctccatggcaagcacagccgtacaataaaaacaagcactgcctaacctgatacatggtgtttaaagcgagtaatgatgactcttgggacataattccactagaatgagtaagtaacagactctttatccatggaattgtacaagccaaaatagcacccctgcaaagcaaaaaagtattaaactcccgatttgataaatcagcttcagcaaacacaacatatatatcatcaactctaaccttgattgtagtattggtagaagggcatttagaagcttgagtacttcggctgaattcaacttagcaaccgaattagcaatcacctgtaacgcatagagaaccagaaaaattaagaaaacaaacaagcaacaatgtaaagaaacagacagaaactatctgaaacctgctcatctcggttgtacaagcagtcgagtagaagagaacgatcatcggcatgcaatgcttgtctcagaagaacgttaacagaagcagcagtaggaggcttatcatcgccaggagcagaatctctattactctcctcactgttaaccttttcgccatttaataagtcaagactctcaagtttatcacctatcgttggctcatttagagtatcatctaccaatactccatctctatcttcatcaagacctatatatcaccaaatacgaaccctactataagaccggtaatgaaatctctatctgaaccaatccagagtattatactcaacagtctataaaccttcaatttcttaatttgataaatcttaccggaatctcgtgtagagggtatatcaggttcaggttcagctcgcttcttgctcttcttcttatgcttcttctctcggagaggagtatcagcgatatcacctgttgaattcataaaaacacaagagaagagctatgagctcacaacaaaactgagtaataggaaaaggaaaagggagatagaatgaaggaaacctgcagcatcagaggagagaagaggcttgagtttgtccttggccatggtcagcgatcgacgagagaagcggggagagagagaaagagaggccggcgttgggtttagttagggttcttcttcttctacttctagccgcaacaacttgacagttcacacaacaactaaaagctacgacgggtcgggtctaaattgggtgaaccgaaacgcttttttttatttgttgggccgacttaacccaatagttgggctcgtgtaatctgttccaatatcttcttcatattttatttcctcaataattatacttgttttactaagaaaaagattgaaatattatagttggaaggctgtcgttgatattgacacggcctctaataccttggacttgactgcataatagtggcaactggcaagatttgggattaggattgtggtatgtgtttttacctcttttatttgctagaaaagtaattgcacgtaaatggaatagataatatgtatatacatgcatcaaaaagaagaaaaatacaatatgtatatacatagatatgacagctaaaaaaaaaatacatattttctttctttcagtccacttattaaggaagataaacttttattttcttagaatacagagattagagaagcatatctttgggcataagaaaattgaaaattttgttaaaaatttagaaagaatataaacctgaaaaagccaaaagttaacattacaatttatttggtttttacagagaaacaaaatatgagtaatcatctctattgaaggaaaaaaaaagaatgatatccagttatttgtatttttctgccaaggacacgtataagtgttggcaaaaaaaactttggaagccgtttaaaaggaaaaacaaataaaggaaagagcaaaagaaagtcaaaaagacaaatgtggtttaaattgggaaaggaaagtagagagaggggtggacttattacaaaaaagatgtaagaaggggtataatggtcatgtttgaaaagacatatcttgtgctctcgacgcctataaaaacccaaccatgaccacccggacaatctcacattcacgcacgcgcatccatcttcaccgtttcatacgaaactctttacgaggagtctctctttacttttctctctctctcaaagaaagaaagaaaagcctcttttaattttctccggccagaggtatttaatagcttccgttttctttttctcttcttatggctgtgatttgatttactccttgggtctctctcgatccctccgatgatgttctgtcgttttgcggtttttgtggtcgtgatcagaaatttctggtcgcgtttgaatttgtttttcttttctttggcgataattatcgaattgcaatcgaattgatctgtttcgtcgtttgaaatctcctgatgaatcgaatgtttatgcgttgatccgatgattgagaacccctagaactgtttccgataagttaatagtttcaatttattttatcaataaattaaaaaaaaattgtctctttcttgtttgattatcatctgctgagaatgtagttttcagtgggattatgttcatgctcgaataccgtacaatatagactgatttgagctcgtccttgttctgtttccttgatctttgtttaacatttgggttgtatctattcggatgtaatggattatggattctttggctttcatattcatctgtgttattttgttgtgtgaattaacactcgtttctattgatttcagtgtgtgggatgcacaaggaaagagggaaaatgccggtttctagcaacagaaatagagtatcgccatacccgcttcgctcttgcaggaacaagaaacaaaaagaagtcgaggcgtcgtcgtcacctgttgagttagagagtgttagtgaatgggaggatgtgaggtgtgtgatttgtatggagcctcctcacaatgctgtcctcttgcaatgctcttctttctccaaaggatgtcgtgcttacatgtgtgatacaagcgctcgtcactccaattgtttcaagcagtaccgcagaagcaacagctcaagccgttgtagtggcaagactctacattgtccctactgcagaggagaggttcaggggactatgaagtcgacttgtgctcggagattcatgaatgctagaccgaggtgttgtactgttgacaagtgcgatttctcagggacctatgcgcagctgaaaaatcacttgaaaactgagcatcctggttttacaccgccaaagttagacccttgggagcaacacatgtgggagcagttggagagagaggcggagtacattgaaatgctcaacgctcgtcagagatgggatgcagaacagagattgttggcgacttctctccatcagcttccatatcgtcatcccatgattgatctcaactttgatgcgttggtgcataatctgtttcttggtgcgtccatggagagccgtgcaagcaccgacaattacccggctcacataccccgtctggagttccatgcccccatgtatcccagatggacgccatgaagattctgagtgccagagtctatgaggaattcttccaaaagttttgatgtctcttgatttttatcataatgtaatgttcttgtagcgacatcagttcttgttctaggcataaatttaatattgtttgtatgttagcttctgttagtgaagtcttcatagctaggatcatcttttgcctattcaaaaatctctgcttaaatcaaattattcacattcttcgtactttttatggttgcctgcaaactgtttaatttctttgctccattttgtattcagatgttagaaactcatatatcaaaatctcaaaatttgtttaaccgaaaaaggaagatgaaaatttccggtgatacataatgcagaaaacataatcaatgattgtttggaacagaacacaagtagcgaagcgtgtactcattggaagaacacatatctgccagatcctgatgggctctggtgatcgccttctgcaacgatctcagtgcaggcaatagagttctgtagttccgctgaatggagcttccgtgagccttgcagatttcctgcacataaaaagacaacacaaagtttgattaagttgagagcatttgagcagagatttatcaaaaaagagaagaaaacgagacattacctgacaccagtgaagtatgaactccagatgaggacagttctcaagcagatccaccaaagcttccataagcctttctaagtatttctggcggacagagatggcaacagcttttatgtctgcaggggctacagcgaagatgcattttttgataaggctatcttcgttcaaacgcatacttagagcaagtgctctgctaacttcatcctcttctatggcagcctcaacagcctacacaaacaacaccttagctttacatttcaaaaccaataatcagaactataaccaccatcagcgatttacaaaaggctcacctctggagtaacatctatatctagatcggtcggatcaaagatgaaggtatcgtcaattgaaaagatgaggactccttctgttgttgcagcagcaaagctccttccagttggggcaatgctgaggctttttgtccggataatgggcctgccacggttaggcctggatccaggcagatcgtaacccagattccctctcgactgtttatcaatgccaccttcttcatcgctgttgtcatcatcgatcagatcaattggtcctgcttctgtcatcttcttagagtgcaagaagtccagaaccccatctaacgaaagattatgggatatctgaaaccggcgcagaagaacctgaaaaggtgatattccagacactttgactaagtttctttatcagaagaacacaagctttaagaaaacctgaactccaagaggagctagttagctaacctgatctgcgatatcatacatgcaaatatatctgctagttcctgcggctagaatataccctccatcagcggaatagcacaatgttgtaaaacactttccagaacttgaattagctgcagaccgacggtcagtcatgacccgacctccagcgatatctctccgcccctctatggtgtacattaacacaccttcaatggtgtcccagaaattgatctgcccatctagcgtactcgaggctaattgcttcccatcaggacggaaagcaactgttagaacatcgtggttgtgtcgaaacgtttccacggtgcctttgctagcaaacacatcccacaaccgaactgtatagtcccatgaggatgaagctaaaagttgctgcagagaaagaaatatatgaactagataaggcatggaagttataacaccataaggcagaagttcacataattgttcagaggcacgaagcaaattgtattttgactaaaagaagtatgagactatgacagtttctttaccgttaagggagaaaacatcaacccatgaacaggagcctcatgcccactcagaatatcctttatttgcccagtcttcttggaccatacaaaaatctgcacataggcaagcataaagtgattcacctcaccaaagtatttgtgagtaggtgactgaaatccttcagggcctaagttgaattacctcgaatgaatctagggtcccagcacagacgacgtcaccactcgggtctgctgttaaggaaacaaattgtcggggtgtaggggttgtgtatgtcttatagttcttgtatcttttaaaatcccaagcacgaacagtgccgtccagagatgcacttaagagggagtggttgtcagccataaaatgaagagcagtcacggcattggtatgctcggtgaatgtaatgaaacatgttcctgacataacgttccacaccttaaaaatgtaacataataaaaaacgggctggttaaattcagaaatagatgagaagcatggtatagaacataacagttaagtctatgaaatttcattaccttgactttgttatcatcagcaccagttgccaagagctgcgaatccggtgagtaagtgacacagttgacgtcaaaatagtgtccttgttgcttcagtatataggtttcggttcgccaatcccagactaacagttgcccaagtttcgcgcaaccaaaggtcagccaattaccacgctcattgaagacagctgttgttagcttctgcctagaaatagagagcagatggatacagatgaaatctggcatctgataaagcccaaaaacaccatttgagaaccccaccacaaccatgtcaagtccctgatgatagtcgcaagcggtcacctttgctgatgcctgattacacccatccttcctcaacaaaacccattttcctctgtgcatatactcttcatcatcatcatctccttcttcatctgattcaagacctttaccgtcatactcttttcgtttcttaagctcagtaccaacaccaccaccattttccaccatcacctcatcagccctatctggagtaacaggtgacggtggctcagagtggccatcttctgattcatccattttgacatccttttcagtatagccccaactaaaaatgtaaccatcccttgcaatcgtgaaagccctgttgaccttgttagtcattttatcaacaccaaagaagcaacccacaacagaatctctatgacccagaaacaaaaatggcttatttaaaacacccttcaactttctaacacaaaacaacctagcagctaaatcccttgagccaacaagcaaataatcagagtccaagctccactccaaggagacaactttatcatcagaattagcaaaagtcctaacccgctcaaagggcaaaacagctcgcctgaaaccaggtgatcgccatatttccaccaacttaccaattccaacagcgataaacttaccattagggctgaacttcaaggcaccgactttatccttgaaggtaattctgtgaagaactacccgccgaggcaagttgatgaaaaggcatcggttttgttcatcgacggcgagtaggaaagtaccgtcgggtgaggaagcgaggcgacatatgttggtagaggtttcgagcggaagagtgaccgaatggttcttacttaggtcggtgacggagacacgattaccaaccggtgaaattagctgagtattcttagtgatgactgcgttcccgcctctgtaaggagcgccaagaagattctcgaaacggaactccatggcgtctggagaagaatgagaaggcggaggattgatatgccggaggcgataattacggcgttaggtttaacgagggtttctgttatgaactggattttagttgttgggcatatatgggcttcctccttatgtagtcgtagtaagcccaagaggaaaaaaaaattaaggatcaagattcgggatatttgaacccgacgtgaatcgaacacgcaaccttctgatctggagtcagacgcgctaccattgcgccacggatcctttgtactataaagttcatctattatatttctaaacgtttaattaattttatacatgcgaattttgcagagaacatcaaacaaactacagattcgcatctttaccatagaagagaagctatcctttgcttttcttctacacaaaaagttaacaaaatgaattttagtctatggtaaagtgattattgactcatagattgaaattatgaggaacacattgacttttttgaaatttagtaccttttcttggaaggttacgttacatatccgtaacattctcgctgtgttaattctttatcgattttcattgctaagaagactatattgacaaacacacacatcatcttaggtttaagaaccaaaaaaaaaaagaaagccacatacaatctgtgttctacaatactatatagttttgcgtatgatcatgatcatgatcatcacttgaaagaataatctctgattctttttgttgattcactcactcccttgtcgtgctcatgtccccgtctcctgcttttactttctccttgggataaatctgcaggtttttaacagcgatcttgagtctataattcttttcacaaagttaagattcatatcaaggatgcataacaaaacaaaacctggttgcctttgtcttcgttaagattcaatgtacggactttaagctcgcctctgcttgtcgttaactcgtctaaaatctcagcatcgccttcttggacgcctctcttcgagtcattcgactgtaaaacaagtttattttggcattaaattcaacaaattcaaatattttaggtcactgtagatgccttagatgacaagaaaacctccatggtttagtccaaagtccgggatcctcaaaaatgtagatattgctaagatatggactaacccggaaagacagttccagcgggtttctcggagtaccggggatttcctcgtactcagcggcatcgagttctcggagatgggccgggttaaagagcttcgggagaatgtactgtctgatagctattaagaggaagaaaggaaccggaaacatgattccagccaccggaatccacgtcaccccatagcacagcccaaagtagaatatctgcaacagtgtgaacgcagccattgacttgtaaggaactttctccacgaacgacgcgtgtgctccctccaagaccctgaaaacaacaatgcatgatcagtctttgaagagaaatctgaataataataacttgaagaaaaaaaaaacagatcattttcagaacatatacttgaatctccggcttgttggaacgaagagaagcgttaagcgttcgaagaattgatttcccgggaggctgtcgatggccatgtaagcaaagtatccccatagaatggaagtcggtatgagcttaatggccggcatagccaacactgcacctgccacaagcagtgactgcaacaagttgctaactctctgctcgttgactcgaacaggcaagtaagcgtcaaggtgcttctctggatcaaaaccactctcctcgtctccctctctttcttcatcattgctcttcattactgcttctttcagatcttgaagctcaattatcactgatggatctgtctgagcctggtttttaaaagcaagagcttatgattattctaaattaaatcttgatttttctttcaccggaacattgaattatgagtctactacttacaagtggacttttatccatttctatgaagacttcttgcatattctcgtacacttgtgaggatgtttctctcttcctgatgctttctttggctgtctttaccatcttcctccggatcaactgaaaatcaaacaggttcattaagaccagcttaacctgaatagtgagtggatcaacaactgagaagtaattaaacctgtcgtttaagaacagcaaggcttttggtatgcataggagactgagggaggactccatttgaaggaggcagacctagcaatccacatatcaacgtctgaaacaaagacaaagttttagagattttaacatatattttcaatgttgtaaaggtagtttgattgattataccatgaaacccaacaagagaatgtcatagtgatacgctgaaggcttcttgaggttgaactccttctgctgagcgagctgcgaggcaacgctgtggtcaaagaagtaaagccctgcgatcatcaatgcgggtataaatgccgcaaatatgtaacccggagagacttttcccatgtcctgtacagaccaaatccatgtattaaaactttaagtttggctcggatgatgaatcaattatctttagtgtactgtgtttttgtaaccttgatgacagtccaatgtgataaagaaggagagtcccatggtaaaggactaaagagtcttctcgggacaccagaggggagttttgatggtgtactaaaagacaatgctgtccaaaccacaaccatcaaaggaactccatagtctgcgatgaagcttctgtaccatccttttcaagaaaccagaaacttttagaccgatcatacacagaaatgaccaccaaagcatgagaaggttcatctatcttacctgttccgtatcgccaagaccttgcttttcgactcttcaaagcggtgtagagaaggccaaaggtgaaaatgaggccgagaagtccgtttgtatagagccactcaaacttatacttttctagttttgagtcctcatcttttggcatcccaaactcactcaccatacccttaatggcttgttgaatgaacagaacggagatcaacataccaaacagctcaccagcaaccctcgtaaaccggttaatgatatcagccgtattgaggattgccattacgaacagtaacagagccgtccacacacaaacccttccaatttaacaaccaaacaaaaccataaagaaaaaccacaactttacataaaaaagaagaagaggagaagagtcttgtggagtaattaccaagcagcccaagctaagtagagttgtttgcctaattctggtcttcctatagcgaagttgtacaagtaaacgtacattaagacagttggttctgcaactccaagtatcaacagtggttgtcctcccaatattgagtgtattactccacataacgctgttgatgctaacgtttctactgtgctcaacgctccctctataatctcctcaaaatttaattcaaaacaaattcaaatttgtttttttctcttcaaatcagagaatgcaaaactaaaacccctcccaaaaaaaaaaccagaccaaacgtggataacttgaatacttttgttccactaaataaacgtgaacacaaaaccgtaaagaaagcaaagaaagatgacaactttgagagagataagctcaaagaaaaagacctgtgtcgcggctgagttgctccccaaaggcgataaccggaagagcggaagcgaaaaaaatatatgttgtgggtgctaaaatcctgcaaaacctctcaaaatatcaaaactttgttctatgtttgtgtcagatagtgattatgtaagagtgaaaccagtatttaagtacccgaaaccagaacggagaccagcgacccagtcttccttgtaacacaaggctcttcctctaagatctgctactatacctctgaatagcctcttcgagctatccactctttcttcctccatatccagaatccctcaaagactccagaactcgtcgcctctggtctactctttatatgacctaaaccacaaaaacaggaagctatatattatgtatgacatctagcaatgactttaaatctagcattttgctgactacatttaatacaaaataatcttcatattatatttttctaaatttgtgacgattccagtctttttccacctctcaatagaaaaagaagcttatagctgttttatcttttgttacttactagtaatgtcaattttctatgcttttatatgaataagaaaacgcaatgtgcccaactcaaatagagaaacatcacaaagcacataaaacaaagcaaaacgtaatgcaaaatttcttcttatgacaaagatctaagtctcctcgtctcctctctcataaagtgaaatttgaaattgcatatgcacccaaaaaaaaaaaaaaaaaaaaagaatccaactttttcaataaaatccattaattaatatccgtcgtatattgaatctacacctttttcatagttttgacaacgaaattagcagtaacaaatcctttcacatctcacaaaaacataatcagacaaaagaaaggattaaacaaaatcagacaaaggagttaacatgcaataactcggaaatttgaggcgtaaggaggagcaaactaccggcgacgaaagagaaaaggagaatagccggagccgagaagtaactgtgtagcgatttatagggtttaggaagatttataggccaaagacgaggcaacgttagcaaatggagagacagggcccatttatacacgtattatgttgggcctacatccacatgtcagtaatcgagtgggtgattctgacatctgtgatcttgacgctttaacactctgtctgttcttttcgtataagaaagtgacatatatatagagaggaacaattcatctaaattaaataatttattattgaaaattttaacttaatatagtttttttgtataatgttgtttcctttagtcttcattttttcttaagttatttccattttaaaaaacataccaatatgttatattctttgcttaaattgctttaacctgtatctagaaaatgtaatcttccatattgttaatttcataaataaaataaatttttttgcaagttattggaaaacgaagttaaaaattaatgctgcaccaagtttgtgaaattttaaaattacttgtagttggagtgggtgtagatgtttatgtgtagaaataggcatgcacacacaatttaatatagtcctagttacttatacaaaaaattcactgctgacgtgatcagtaatgcactcatatatgcatatatcactccacgtcaatggcacttgcccgtgcaaatgcctttattgtgccagaatcttcgaccggtcaaattgcgtgtgtgtgtatatatcgaaatatatgttatcaaaagagtttgaactttgaacccatatctaatacctgagtaaagttttagcattctattcaaagataacatgtagtacatactaaacaaactatatgtatcggttgttatcaggaataataagaattgtataatgcaatatataattaagtggtacttatgattaatacatacacatggatggtagatcgggatttgaaaaaccaattaaaatctagctttgaaaaggactcgagattctaaacgccgtaccaagaaagttcagattattatttcatgatgaatcattgagtcaaacacttaagcatcatatttttaatttcatagtttatacgttatccacatatataatattaattccgtcgacgacagtatttatatcagaattaggacaaactacatgtatatatttagtcaatcttgaaatttaaaaaaatgcctttgctaagaataaaaattatggttaggtgaagttctcacgtaaaactattcaatcctcacgcgattgaggagtgactgaccaaagtttatttctataggggcaatttaataactattgtaaactttcaacgtaaaaattaattactttgaagttatggggcaatatcatcaatagtaataaatataagcccttactcgtaaaatacaaaaggtttatttgttttctgaattgagagcgtgtaactactaccatcgtcgtctccgcgagttcttctctgcgtttaagccatagataacaaaccaaactaaaaaaaaaaagtttctccttttatcattccttctcttcccttgtataggtgtgatcctcttcaaggggatttctctggcgggtcatacattcgcaccgatcaaagtcggattggtctttcttaacgcaatcttgacccgattcaaaaaatttctggtatcctttttaagaaatgaaattaattgattccttgtcttccaaacgagtaaatcgactaattgattagattttgttcattagggtttgttagtgaatagataagaagataaatgggagctccgttagtgtgccacgggcattctcgtcccgtcgtcgatgtggcttatagtccggtgactccagatgggttctttctcattagcgccagcaaaggtatgatcttcgatcgatttgtatttgactatctatgatctttacttggaactgtgcctattttggattatgatttgcatagcgaatgtgctttgacgaatttgattttgctgccttttattatatatcgtctgaagtttgatttgtggctgatctaatggagaaattaggatgataagttgcatacattgttgaactctagctgaggtttctttgacttttgatatttcagattcgaatccgatgttgaggaatggagagactggtgactggattgggacttttgaaggacataagggagcagtttggagttgcagccttgataaaaatgctattcgtgctgcctcagcttctgctgatttcactgcgtatgttcttcttctttcttgttgcgttttcaagtcttttactttaccatttagtcttgcaatttcagtatcctccggtgatgggttgtttgcttaaagttataagttatggggaaactatgttcctagagaaaaatggttaagtgagaatagattaatgggatttaacactatttctttgttttcatgacacatttcaggaaaatatggaatgcattgacaggagatgaattgcactcctttgaacacaagcacattgttcgtgcatgtgccttttctgaggtaaactgtagtttcttcccaagcaaagagtgatttgatcctgttgccaagttttctggtttaaggatataatggtgggattcactaagattacttgtagcatttgagggtctataatcgttggtgtcatttgtgttactattgtggtcttaatgcataactatttatattctaggacactcaccgtttactcactggtggaatggagaaaatacttcggatattcgatttgaatcggccagacgcacctccaaaagaagtcgggaattcccctggttcaattagaactgtcgaatggcttcatagtgataatacaatcttaagctcttgcacagataccggtgacattaggtatgccaccacgtcgttccttgggtttagactcagtcctttagtattcctggtttcattgttcttttgtgtatgtcctctgtaggttatgggacataagaagtgacaagattgttcatacattagaaacaaagtccccagttactagtgctgaagtaagtcaggatgggcgatacatcactactgctgatggatctagtgttaagttttgggacgctaaaaagtaagttaaaaatatagaaatgcatcctcagttacagttttatcgtttttctttgatggttgagctttttctcctgctctcctagttttggattgctgaagagctatgacatgccttgcaatgttgaatcggcatcgttggaaccgaaacacggtaacactttcattgctggaggagaagatatgtgggtgcacaggtttgatttccagactggagaagagattggtaagtttcttttaaaaaagaatgaagttttcattttaggaacctgtgtgtatcctttaaagccaatgtggtgaatgtagggtgtaacaagggtcatcacgggccagtgcactgcgtgaggtatgcgccaggaggggagtcatacacctcaggctcagaagacggaacggtcagaatatgggtggtgggttcggtaaaccatcctgaggagagcaatctaagcggccacgtgaagcttgtggcagaggaggttgtgcgtaaagctgaaagtctccgtatcagtgagaaagccgcagaagctaaatgaaacaccatcgttagcttatgatatcacatagattcatagttgtttttgcatcattataagatgtgacaaaggggttttgccttttaaaagtctctcagaccgaataaaacgaaataatcttcaactatacttgagtgaatagtgaatctaatccaaattttgacaagaaactttacaacggtatcaaaaatatctttaaacaactgtatgtcataaatagttgcaagttttgaaagcccagttgaaactagaggggcccagaaattaagcaaacatcaaatagtcaaatacaaagaaagtgtgaaagttaaaaccctaaacccttaatttgagctctctgctctcctggttttagttttcctctatttcgtgctcaattcgcttgttctccagttccactctgtaaggatctgttacttttctgtaatcctctcaaaattcaatgcttttgcttactgggtctgatctttgcaagtgaaatgcatgacatttcgtccaaaatcagaccttgcaaaaatggtttcttttttacctaatctgtttcgtctgtgtgttttgatctttacaaaagcagatcagtgccggcggcgatattgtccgaggataaaacatgtttgctctttccaaggttttgcggaggttggtttcctcgattatacacttgttataccatttgattctttatttacttttttcatttgtcttctctatcccaaaattggatataattaacagttctctagcatcatgcgagattgaaatgcttcagtctcacagctttctattattaataattttttcagaagtcagagtctccgcctaggagcttgcaatgctgtctactctaagctagatataccattgggagaaagaaacattgctattgaatcaaacgctttgattcatgataaacacgaagctttgcctagattttatgagctctcttggtcttcctctaccggaagacgttcactttcctcggacgctggagctaaaactaccggagatgacgatgacctcgaagacaagaatgtagaccttgcaactccagacgagactagtagtgatagtgaagatggtgaggagttttccggtgatgaaggggatattgaaggagcagagctggaactacatgtcccggaaagcaagagaccatcggagatgtttaaggccattgtttctgtctcaggtctgtctgtagggagtgctcttgataagtgggttgaacaaggaaaggataccaaccgtaaagagtttgaaagtgcgatgctacaactccgtaaacgtcggatgtttgggagagcattgcaggtactgagtactctttgtttcaacttgagctgaatattaatgtccatcaattagttcagtatcaaagaatgttgcttggttctcagtaatgctttctgttttgtctccagactttctgttctctaagtgttttctctcgtttctgcgatgtcttgttgttggtatagatgacagaatggttagacgaaaataagcagtttgaaatggaggagagagattatgcttgtcggcttgatctgatttccaaggtacgtggctggtacaagggagaagcttatatcaaaacaatcccggaatctttcagaggggaattggtctaccgaaccctcctggcgaatcatgtggcaactagcaatgtgagaacagctgaagcagttttcaacaaaatgaaggacttgggattccctctgtcaacattcacctgtaatcagatgcttattctttacaaaagggtcgacaagaagaaaatagccgatgtgttattgctgttggagaaggaaaatctgaagccgaatcttaacacatacaaaatcctgattgataccaaaggatcatcaaatgacataactgggatggaacaaattgtggagacaatgaaaagtgaaggtgttgagcttgaccttcgtgcacgagctctcattgcaagacactatgcatcagctgggcttaaagagaaggctgagaaagtgctgaaagagatggaaggtgaaagcttggaggaaaatcggcatatgtgcaaggatttgctttccgtctatggctatctccagagggaggatgaagtgcgcagagtttggaagatctgtgaagaaaacccccgttataacgaggtccttgctgcaatcttggcttttggaaagatcgataaagtcaaagatgcagaggcggtttttgagaaggtgttgaagatgtcccatagagtttcttctaatgtttactccgttctcttgagggtttacgtggatcacaagatggtctcagagggtaaggatcttgttaagcagatgtcagacagcgggtgcaatattggggccttaacatgggatgcagtgatcaagctctatgtggaagccggggaagtagaaaaggctgagtcttcactgagcaaggcaatacagtcgaaacagattaaaccgttgatgagctccttcatgtacttaatgcacgagtatgtgagaaggggtgatgttcataacacagagaaaatcttccagaggatgaagcaagctggctatcaatctcgcttctgggcgtaccaaacccttatccaagcttatgtcaatgccaaagctccagcttatggaatgaaggaaagaatgaaagctgataacatcttcccaaataaaagattagctgctcaactcgctaaagccgatcccttcaagaagacccctctctcggatctccttgattgagttgcgttacagctacaacatcatccgccttgtgaatctttggtttgattgatcaaccttttatccatgttggtagaaacttcagtagcttagtttaaaaaagacctcctgatatataaattctgtttggttgctgctatctggtttttatttagtcccgttcttccggcttaatataatgacaatggtggtgagcaaacgaaagcaatttacttcgtattccaaaccggataaatttacagagacttgcacgattctgtgccacactcatcttcaagtgtttaataaataaaatcaccctcgaatcatacaaaacacaagagaagggaaaggttacaacactcattagatgaatttacctagcagggcctcaaatttttgggcgacactaatcgattgtaagctaagaagacgacaagaaaaacaagtgatctggctattgactctggagatctggcctaattacaagtctagtgatgaacggggacatggctgcaagaagcgccttgggacactcctcatgtggtaaatgcccacatcctgagattgctactagtctctgttgatgacacgaatgaatgtcagttgctatcttgacatgaaaacaaaccgtagctgggataagagagcttgagtttgaaagagggacttacagagttaaggagtttagaagccattccttgggaggacttcaatggcacaagggcgtcttcggccccagcaatgactagcactggcaggttttcaacagccttcagaagcgaagctgcattttgaggtgcaagcaccatctcagatgaaagtctacctatctcatgaagtgcctcatcccagccttctacgtgtaatggggcctgacaaggaggaaaacacattatttgatacatgtctaccaaattgcaaatctttgtttgatgtagggtaccttgtatagccgtaggacgtctgtagtcatcttggcaggatcataccaagcacggcgattcaccacctgagctatctcagtgcgtaaaagagggcgaacgaggtgcttcttccctagtgatgtgtgcagaagtattcttgcaaaagctggaactacttcccttgataagctagtattaagcaagacaactcctttgaccacgacctagaaatatcagtaccaactaggtttagaaaggaaaatatataagcctggacaatatacatctgattacaagtctactcactttgatgggatcgtttgttgccatcaatctttgtgcagctttgagagcaagtagacctccgtcatcatgaccaacaaatactactgaagagaaccccatctcataacagaaagcaataagcatctctacctggaagatccaggcattatttttgtcaaagaaagcacaaatcccccattgaggtttaatatcaataatgaggagacaactacctgattttcgagtgaataaggattgagcagctgtctttcttccaaatcattcttatgtggcctggccgttaatccccaaccaggcctatcaaatgcagtgacaacacaaccaagctgctgagccagtgaacccatcacatgcctccaagaaaacactcctcctccaaatccatgaaccaggaccacaccaaactgaccactttcacccaagtcttgctcctcagctccaaaattgaatacattcatgtcatccactagtcccgttccttccttaatctctttgaaaagaagaggagaagtaggagaaccatccagaagagggtcgtgcaaggaagaattgttaaacaaactgttgtagctcctgtggtgatgatgatgctggcttttggtgaccatactcaacacttttctgtcaaacttcgaccttcctgccattatctctggcgtattgtaactagaattggcttcgagaacatttgaggagatagactgccgaggtgaaccaggtgaacaaagcttgtaatgcacagtgaggcctcggattgtaacgaataaactgtcaacatcagcaagcaatctcactggaagctctccttcatcgtgggacaaaggctttcgccttgcttctccatcaaacttggaggcctttccaaccacaggagtgggtgaccgcgggactttctggtggccagagaagatgcttttgcatgaaagaacctgccacacacagtccatttaaacaaaaaaaaaacaaagcaaatgacttctattaatgagattcacgtgaaagaaagaacaaaaactcacagcttcagggtcaactcggtgatacaaaattttcctcctcgctctgcaacttgtcctgtatgctacaaccgtatgaccaagggcaaaaaccacagatgagaggaacaaaaccggcatcccccacgacttcttcaggtggagccgtttcctagatggagagaacgaggcttcgttgttgagttgagaattaacagtgaaaaggcaagctttaactgaaagaagaagaaccgaaaccacagaacacagagatacagttccaaggtaaggaccgtgcgagagagcaggaacgtccgagagtaaatagatacctattccacaaaatgtacaactaatgatcattaaaagagcagacttgatcatcaatcatagctatctgcgagagctaactcaaccaacagagctttgaacagtaacagccaaagaccaaaactttactatgacaaattcataaagatcaaacagtttcctaaacaagagcaagaaaaaagcaacgatatgaccttacagatgacaaggaaagatctgacaacagagacgataggaatatcagtcaaagatctcttgaaaccgtatcgcctcagatgctccttggcgccgtaacacgtcacacaagtaaagctcgacaacaagaagctgggaaccaacacatcacctatagctactaacaatggcaacgaggaaactagcagcgaagccaacatagcaaccatgaagaacaccgtcctcaaacatcttctcgccttctcaaccaaaaaccaactttttgccatcctctccgcttcaatcgggtcaaaccccaatcggacggctctaactcctcctcaccaattcaaattttacaatgtgtctacaaaaagggctctgagattaaccaaatcagatcctttctatgccggagttgaaacactagatagaagaaacagagacgtccaacaatccaacgaatccgggttattaattggaggtaaaagtaatggttttgccatctgccgacgacagatcggcggtgacaacgatgataaatactagtctctcttttttcacaaacgggaagaaaaaaagaaagaaggatcaaagctcacaagccaatgctacgattctgacaaagagattgaagaagagtgatattcagaatcgcaggaaagacgaaatagagaaaaacaaaatgaactttttggttttctctccagaaacaaaaacttccgttttcttctgttcttttttttgtttgtttgctttcttcaaccattcttttttaattacattaatattgcacgtcgtgttattttattttaactttatgttttaaaaaaacatataaggaagtaagtactactcctcagtgttttaagaattactatattagttgactaaatataatttactcaattaaacatgcatttaatttgttcagtctcgtaatagacagtgattagtgattactgtattttaatttctcttgtttacgaattcataaagaaaagaaattagtagtacacattacacaacaacaaaacgtaatatagaaaaacttgacaacttggtctgactctgagccgtctctgctcggtctgctgtcaaaatcttttctttggacaattctaccccttgttttaagtgtattaaacattatatattcgaggccgaaagagttttcgcactttattcaaattgactaattgagcatgaaatacagcattaagaaattagttatttgtaattaacgaaactttgacctcactttttattctccacattgtatgatagatagatccattcattgaccattgttcatcgtgatgccaaaaaaaaaaaaaaaaaaaacattcattgtccactttagttaagctggtaataaagcgagtatagaaaataataccgcaaatatccgaatatattacctaatttcctaatataagacatgtatatataagtcgacggaaaagacggtaataattaatatttccatttaggacctaatgccatctcattttcatttccaaccgtaaatatttttaatgtgaaaacggtaaattttggtgcaagataagtaactttactaatactgttgatttgtattttgtagttgtagttaacaaaggaaattcggggaataaagaaacatagtaagggcacaacaaaaattttatctattaataaccacatggtcccaaaaagccataataaagtcgtatgatgacatgtttacacgaccatcgttagaaaattaatacatattacggatatcaaaatcacacccaattttcaaatctctttatctaattatctaaactgttccgtttttagagggacccaacaacaagccaaagcaaaaactttctggtaattgaatgtatattgtatcatttcgccaacaatttgtttgaaaatggatgatttcgccaacatagtttttggaagaatctgaagttttggaaccctatttataaattatataagtccattaaataaaagtatgggccgcgaaggaaaacgttatgggcttcgtattgggtttataatagaaagcccaatatgttaaaatttatgaaggaggctgggcttcacgtgagttattactactagacctctgtattcttctgaatctgacatatcgctgattttaatgcgacgtggagctttataagacgcaattcatcaaaatgaatgagccccactattttgttgttgttttggagtttttctgattgagggaaaagatgaaggggatcttcacagtcccccaacaacactccattggagccatttcccaagttggtaacacgtttatcaaagccctccctcgttttcatcaacaacttatcgattcatttgctttgtagatctctctttgtttcctgagctgagtttacttaggactaatcttcttcttcttttttttaaaagaaataaatgcatggcaagattgaaaatcaaattaaaattcagtaatcactatgctaaactaataccccatcaatttataatagaaaatcaaattttgatacgttaccggtggattttagatatactcatactaattaattactaggatttcgaaaatgactagacatcttcttgccatatttgctaagtatgattgaaatcaaactgatttaaagttagtaatacatatatatgctcatgattttcttgttttttggggtcaacatacatttctgcaaatcaaatatgctggtttaagtctactaaacacaaaagttctcatatattaatatattttcttttgtctcaataattctagtaaataaagtagaggaagagaatgatgcacgccagtagagatttttattcatataaaatcgttgtctttagaggaataatacatgccttaattctcaacaaaaatacatttataatgaggaaagtttactcaagttgcataatatatcaaagtacccaatgcacgaattctaatctttttttaatactaatcattaagtccattttgacgaaatatgtgaacgtcattacaaaaatcttcagaatattcagaccaattcaattttattaattacaaggattatcagcttcgaacataattagacggtaagagccgccctgttagggttttttgtcctcaatgccaaaatcctcccattgcagatattatatcactcccactgtctaataaacaactctcttctcctctctacccagagcgagtcaccttatcgtctctctatctcctccttcctatatccccttgctctctgggtttttgctcagtgtgctacgtgagagatagagagatggaaggtctgattcaaaccagaggaattctctctttacccgcgaagcccatcggagtgagaaggcttctccaaccctcacatggcttaaagcaaagacttttcaccacaaacttacctgccttgtccttatcctctaatggtcacaagaaatttcaagcctttcagcaaatcccacttgggatttcggtttcccacaaggagagaagcagaggattcatctgcaaggcggaagctgcggcggccggaggcggaaatgtgttcgacgaaggagacacagcggcgatggcggtgtcgcctaagattttcggtgtggaggttacgactctgaagaagattgttcctttagggctaatgttcttttgcatccttttcaattacacaatccttagggacacgaaggatgttttggtggtgacggctaaaggaagttctgctgagattataccctttttgaagacatgggtgaatcttccgatggctattgggtttatgttgctatacaccaaactttccaatgttctctccaaaaaggctctcttttacactgttattgttcctttcattgtctactttggagcctttggtttcgtgatgtaccctctcagcaatttgattcatcctgaagctcttgctgataagcttcttgcaacactcggccccagattcatgggtcctctcgcaatcatgaggatttggagtttctgtttgttctatgtcatggctgagctttggggtagtgttgtcgtttcagttctcttctggggatttgccaaccaggtaattgtgattacactcttcgttttctgctactgctagtcatagactcatgttaagtttgatagccttgaagatttggaacccttttgagtcagtatctttgctatttgtgaattaaacttgcatgcaatcttttggtggcagattacaactgttgacgaagccaaaaagttctatcctctgtttggacttggggccaatgttgcacttatcttctcaggaagaactgtgaaatatttctctaatatgagaaagaatcttggtcctggagttgatggctgggctgtttcattaaaagctatgatgagtattgtcgtggggatgggtctcgccatctgtttcctctactggtgggtgaatagatatgtgcccctcccaacccgtagcaagaagaagaaggtaataaactggctgaacatatgaaatactaatggttttatgtaattaaacatgcagcttatgagggttcttctgatttgttacaggtgaaaccacagatgggaacaatggagagcttgaagttcttggtgtcatcaccatacattagggatcttgctactttggtggttgcatatggaattagtatcaaccttgttgaagtcacatggaaatcaaagcttaaagctcaggttaacaaaacccccattgaaaattactacttactactcctactactacacttttcatctaagaacctaaaaatcctttctttgaatgcagttccctagcccgaacgaatactcagcatttatgggcgacttctcaacctgcacaggtattgcaacattcacaatgatgcttctaagccaatacgtgtttaagaagtatggttggggagtagctgcaaagatcacaccaaccgttctgctattgaccggtgttgccttcttctctctgatactgtttggtggcccattcgcaccattggttgccaagcttggtatgacaccgctactcgcagcagtgtacgttggtgccctccagaatatcttcagcaagagtgccaagtacagcttgttcgatccttgcaaagaaatggcttatatcccattggatgaggacaccaaggttcctctctatttctctttaagaaagttgcattctttgcaatcttaggttcttactagctgcggtttgtaccattgttttgcaggttaaaggcaaagctgcaattgatgtggtctgcaacccattggggaaatcaggcggtgctctaatccagcagttcatgatccttacattcggctcactcgccaattccacaccttaccttggagtcatcctgctcggtatagtcactgcatggttagcagcagctaaatcgctggagggacagtttaacactctcatgtctgaggaagagcttgagagggaaatggagagagcttcatcagtcaagattcctgttgtatctcaggaggatgcgccatcaggagaaactacgagccaactatcggagaaatctactcctactggcatttagacgatgatgaataaaagggttttgggatttggttacctgttggttttaatgttttggtcaggagtaatattttgatagtgagaagactaaaattaatcatttagttatatgtttttttggttgttattgttctcttgatgataccaataccaaactagtaataaaatttccaagttcagtaatcttatcaatcctctcctctctgtgttgattaaactcagtaatataacataagaatcatcattgagattttaaccaactttgggagacactgcaattaaggccaaaacgacgtagttttttgaagttgaagatgatccgttagttaagaagaaatttgtcgactttatcttctcgccttaaaaccccaaatgtaaaacctctacgagagtgaccatgttctttgctctgtctctcctacgatggcgtcttctgctcaaagtcctcatttttatctcaatccaggcaagtccaactcttttcagagcaaagcttataaacagagaaacgttaatttctattggaattttggaattcggagacttttcttgagaaaatctcaaggactatctgttcttagctcgagttcgagtagtacccacttttcgaattctcagttacatggactctgcgcgaatgggaagctggaggaagctatgaagcttctcaattctatgcaggagttgcgggttgcggtagacgaagatgtgtttgtggctttggttaggctgtgcgagtggaagagagcacaggaggaaggttctaaggtttattctattgctctcagttccatgagcagtcttggtgttgaactcggtaacgcgtttctcgctatgtttgtgaggtttggtaatttggttgatgcctggtatgtttttggtaaaatgtctgagagaaacttgttttcttggaatgtgttggttggtggctatgcaaagcaaggctatttcgatgaggctatgtgtttgtatcatagaatgttgtgggttggtggtgtgaagcctgatgtctatacgttcccctgtgtgttgagaacctgtggaggtatacctgatctagctcgaggaaaagaggttcatgttcatgtggttcgatacggatatgaattggatattgatgtggttaacgctttgattactatgtatgtgaagtgtggtgatgtgaagagcgcgaggttgctttttgatagaatgcctaggagagatataatctcatggaacgcaatgatctcagggtattttgagaatgggatgtgtcatgaaggattggagttattctttgcaatgcgtgggctttccgttgatcctgatttgatgaccttgactagtgttatctctgcctgtgagcttcttggagatagaaggttaggaagggatattcatgcgtatgtgataaccacgggtttcgctgttgacatatctgtctgcaactctttaacgcagatgtacttaaatgctgggtcatggcgtgaagctgaaaaactgttcagcagaatggagcgcaaagacattgtgtcatggaccactatgatttcaggctatgaatataattttctgcccgataaggccatagacacttacagaatgatggatcaagattctgtgaagccagacgagataacagtagctgctgttctatctgcttgtgctactctaggtgatcttgacactggtgttgagctccataagcttgcgattaaggcaaggctcatatcctatgtgattgtcgcaaacaatctcattaatatgtactcaaagtgcaaatgcattgataaggccttggatatcttccataacatcccccgcaagaatgtaatatcttggacatcgattattgcagggcttcgactcaacaaccggtgttttgaggccttgatattcctccggcaaatgaaaatgacgttgcagccaaatgcaataaccttaacagctgcattagcagcttgtgctagaatcggggctctgatgtgtgggaaagagattcatgcccatgtactgagaacaggagtggggcttgatgattttcttccaaatgcactcttagacatgtatgtacggtgcgggagaatgaacactgcttggagtcagttcaactcacagaaaaaagatgtcacatcatggaacattcttcttactggatattcagagcggggtcaagggtcgatggtggtagagttatttgatagaatggttaagtccagagtaaggccagatgagattacattcatctcattgttatgtggttgtagcaaatcccaaatggtgagacaaggtttgatgtactttagcaaaatggaggattatggtgttaccccaaacttgaagcactatgcgtgcgtggttgatttgctaggccgtgcaggcgagttacaagaagcacacaagtttattcagaaaatgccagtaacaccagatccagccgtatggggagctttgcttaatgcatgcaggattcaccacaaaattgatcttggtgagctatcagcgcaacatatatttgagctggacaagaaaagtgttggctattacattctgttatgtaatctgtatgctgattgtggaaaatggagagaagttgcaaaagtgagaagaatgatgaaagaaaacgggctaacagttgatgcaggatgcagttgggttgaagtaaagggtaaagttcacgcctttcttagcgatgacaagtaccatcctcaaacaaaagagatcaacactgttttagaggggttctatgagaaaatgagtgaagttgggcttactaaaatttcagaatcgagttctatggatgagacagagatttcgagagatgagatattctgtggacatagcgagagaaaggccattgcatttggtctgatcaacacggtcccaggaatgccaatttgggtaacaaagaatctcagtatgtgtgaaaattgccatgatacagtaaagttcatctccaaaacagtaagaagagaaatctcagtaagagatgctgagcatttccaccactttaaagatggagaatgttcatgtggagattagaatggatacaaaaggaatatagacacatcaaggtattgttaagtttattacacaggaaacttggattatatgtggctttgttttgtctgtaacgtttatcatacaataggagttgctctgtatgtaacatcattagctagaggattcattctaatccagtgttgttgatcatccttttattaatatcaatacggcattacaaaaatagaaagaatagcatataaacaaaaagtctctttttatttgtgttacatgaaatagaatgcaaaactataaactgtctatcgtttttggaaattgaaactcttgattccgatagcaaagataacggcaaagagcaaaggaaagatgacgttcatggcggcaaccacacccaagaaaccttctctatatccatagaattctctaatgaattgcttcacactcatattactatctgccataggttctgtaatatcaccgaactgtgatgcgattaatccatacaatgtccatgcaactgggcaaagccagtagtaccattcccaccacacaggcatactctgttttcgtataaacgtttagggtcaatatttaatatttcaataagttttggctcattttgaaattaaacaataataaggttggtacttacgggacgagggatgaggaagccggagaagagattccagatgccgtagaaagcggaggagacgacggaggcgatgtggtggttaggcgtcatagctacagccatcattccgtagaaggtgaaagttaagaatgatccgtacataaagaagaggtaccagaagaacttcaccgccgtccactcgaatcctatcatagcgtacactatgagaccgtacactatcgcttgcacgagaacgtatgggatctcgatgaaaacctggaacaaatcgaagtttgaatttgaggtttccgcaacgaaaaatcgtaaatttcactctctatgatgtttttttgaagtacctgagcgaaagcataaggcatggcggagtacattccggcggcttgttctcggtaaaagacagttctttcgacgttgacgactggttgcactgaagctgcgttttgtaatccgaggaagagaacagctgtgtacattgaacccattgcattcgataaatcctgtctcgttttcctggaggtgacaaaaatattcgaacttggtcaataaggagttttgtttttgtattgtaaagtctagaattttgctgaggtttttttagcttacgttttgcctccaaggtcccagaacattgtgccgaacataagagcaatgccgattgtgaagaggaatctcacggctgtgtaaggaggatttctccagtaggaccagtgttgtttccatagagaagccatacattgtgtcaagaacgattgagagtattgtgttgggaaatataaatcttttgatcctggagctggctggcttagctccttgattagctccttgtttctcctaaataagagaaaagttattggcgagatcagattctgctgtataatatgtgaattaacctcaacatgatgactgatgtacttacttgtaaagttctgaatttttgtagacttgggcgaaatcgactcctaaagccgcttcttgagatgtggttgagacttcaagcatccaggttgctgggttgtatccttctgtgatcttgttgattccttgaatactctgttgccgagtcaacatattcagtccatgtcttccaaacaagttttaagtatggtgtgtttgtcttagtcgtatttattacctcaaaatagttgatcaaatgggttgattcgtggccaagaggtccaacgtatatctcctcacctccacgcttaagtaggaacaactgcatatatacgcatacccaagcatgttaacaaatgattaaagttctttttcacttttttgttttgaatgtagtttgaatacctcatcaaaggcttcaaagatgtcgatgctaggctggtgaatggtgcagacgactgttctaccagtgtcaactgtgttccttacagtcctcataacgatggcagcagctcgtgcatccaatcctgaagtaggttcatccatgaatatgatggaaggatttgcaaccagctccaccgcaatggtcagtctctttctttgctctgttgacaaaccgctctcaccaggtagtccaaccagtgcttgcctcagcggcgttaactccaccagctccatcacttcctctatgaatatctgtaccaaacaaaacaaaaattgttagtatagtttcgatttcctcattttacttctggaaatgataatgtctctgaataacctttctcttgtttttatcaacttctttaggtaatcggagccaggctgagtaaaccaaggactcgtaaacagtgacatgtggggaatggatatcagtttgttcacagtatcctgagatacgggcaaatgtttgttgattcttagggtaaccggaaatggtgatgttgccatcaatataaccaccggttttccttccggcaagaacatccatcagagtggttttgccagctccagagacacccatgagagccgtgagcacgcctggcctgaatgcaccattcacacctttcaacaggacaagtctgtcttcttgtgtgccttgctctatcatttcctgtgagaaagaatccacaacaaaaatcagtatgaagtttcttgcattaatgatacgaaatcctcgagcaaggttattacctggggcatgtcaactgagtatacaacattgtcgaaggtaattgaatgtggctcaaatggaagcaccatccctcttttcttattggcaccagcttcaactacaccttctgacctagcagactgaagttctgtctcatcactcgcaggctcttctgcaataacagcttgaggctttcccaaggctgtaggcaaacaaagttcacaaggattttttattttaagaaaacagcttttgtatcagaagatgagaacaagcaaaacggaatgattacgtacagttcagaaacgtcagagccagcgtgaaaccaaaattgaataacacgacgaacccaagtaaggctccagttccaatccagtaccagtatgcatggggtaagaacccacgagacttaaggaaagtaactccaagtgtttcgctcgagttttcgacagcctgtaatacaatcaaccctatcagtcctgtctaaaagaaataccagaaccatggaaaatgatttccgaatctggagtggacagaggagggtgatacttactcgactccagctgtgtccaaagaactcattggctaggatcgcgttctgtccatacattattggggagatccagtaaccccatatccaccacttcttaatgtcgtctgttttgatcaggttaatggataaaattaatcagcttttgatatgagaaactggacgcaaacagatatgcatcaacacatacctcgtgaaagtaccacaccacccaaggcaaagaagacgagcatcgcaaatgcaccaaatgtatttgcaacgatcatgtttcttcccaatgctgccaccatcttaaacaatgctgaagccatttggttcatgagcacgaggagaatatactgcttaaacagcctgcagcaaaccaacaagaaaccaggagaacccttagcagctccttcataagtatccaaatttgtcatgtttagttgtttagtgtatttatgtaccttccaacgttgggatcaaagccgatgacatagtaagtgatgaatgttgtgagagcggcttccatgaagcttataggtatcttgaggagccaaggaggcagagagtacacccatgcagggtagaagaggagatctctttgtttgtaaaacacaggaagttttgctatggtcattgaaagttcagacattccattgaacatgagcatcataaggatgaagaacaaggctccagtgtagagactcccatcaacctcagtcttcttttgcatctccgtccgaaagaacaacgtcattgtcaaaaatgccattaccagcagctgtaaacacaaggaagcaagcacaacatttccatgagtctctcttaaagataaggagatattattgcaagatgtgaagaattggtactatatgcgtaatcacttacttgtccaaacttgaagtagtaaacaaaggagtttcttttcatgagtaagtattctcttgagaagctggtcttgacaagttctttaatcccaactccgtatttcttggtggttagagcagccggatggctctttgtcttgtcaaagggcaaagcaagctcatctccgattctccggccaacgtggaatgattgaaacgcctctgcaaactctctcactctaatgaacctgtaaggctcatcacgtcgtgcccagtactgcatttggtctttctttgatgtcacctgcaagagtagtgatcgttaaagtgtaagacatggaacaaaatcgctcatatgattgtgttcttatgaatcaagtcttacttcttgaaggaaatcagcaacgccttttcttggaggacatttgaatcccatggtctcaaagaactccacaacgtgatcacgagggccctcgtagatgatctcgccttctgcaatgagaatgatatcatcgaagagattgaatgtctctggcgcaggctgaaggagagagatcagagctgtcccattgaagatatgaacatagtttctgagggagttcactatctggtaagtcgttgaactatctaaaccagtcgatatctcatccatgaacagagccctagacggtccaaccagcatttcaccagtagtgacacgcttcttttgtcctccggagatgcctctcaacatatcatcgccgaccatagtgtctgcacagacctcaagtcctaagatctgtaaaaattacaaagagtttagatcatgtcaagtacaagacttgataattctcttataaaagaaaagttggaaggaaactataccttgaggatataatctgtcatcacatttgttttttcacctgctgttgacatcgcctgtaatggagtaatgaagttatgacttagttgtgtactccaaattattacaaagttaactgtttcgggagtgatataactaaccttcatgaatatatcaatatcagggtcaggtttgatgtttgcttctttctctcttcttgccaactctgtcaacatgtctaatgcaccaccaaaacatctatggttagcaaaatcaacataccgaaatcgaatgttttgagaagatagaaaagtcgaggaaatgttcaaactcaccataacgcgaaccaacaccttggaagcgagctgcgtaagcaaaagtctcacgaacagtcatctcaccgatatgaacatcgttttggccgatatatgcagctgttctttgtggcacaaactcgttcattccatgaccattgtatgtcactcttccagtttgctacaaaatcaaagaacaaagtttacaattgattcacacagatcatataaacatatccatgaagttgaaacagagatagagagagggaaagatggttacctttagttcttgatcaagctttcccgccaaggcaagcaagagggtcgttttcccagaacttggaggacccaaaagcagagccatcctgtagaattcaaagatgggtcaacaagtgcaagtataactaaaaatactttccaatattttaaaatggtgaaacagaatctgaaaattcacctgccaggcttgacgattccgctgacgtcgttgagtatagtgaacttcttctttcggttcggaacaagatgcagagtattcaggaacttctgttaatattaacgaaaattccactgttagagatctagtttttgtttggacacaagaaacagataagtaaaaaaaacgcattcttacatcagcaaaattggagatgaaattgacgaacgtaggtaaagctctgcctccaacatgaacctctgcttcaacttttagatgatcaaaccgaacttctattgtcggaagatcgattccaactctgtcattttcataattacatacaattaacacttaagtctccaacatgaacatcaaacaaaaacagagctcctctgttcccattaaaagctaaactaaaaaaaaaaaagagagaagtttgtatacctatcgatacgtttcttgagtttccagaggagtttctcatgctcatcgtcaccgactttgatgagcctctctagcagtttcttagtatcttgaaacccaagcttctgaatatcgatctcgttgatgggtcctccggcatgtgaggcagttaggattcctttcctgagacgatcaaaagtgggaagcttctcaagagcagcccatctcaaagcttcttcatcgtcttcttctctagatgacctcgagaaaatctcccttcctgaatctttcttccacaccgatgagtttcttctcatactattactcgcttggtgaaaactagttccctccattttgtatccaagaaatcaaagtcttcttcttttttttcttctctctttttttgtttgtgtcagatgaaagatttaaagaatttagcaagacaataagactttaacacatgaaaagaaactcaagagagaaattgtagatgaaagatgatatgaatgttgggtttgtgtgctccgtatatatatgcattgaggagatttcactattcataataattaggcacatgcatgtatgtttcttcttcaccaaagtggaaaaatcagagacggaacgtgaccaagaaataaacgttatgtgcttttgaatttacgaataaaggaaaaaaagagaaactattacatcagctaacaaaaaagaactattacgtcagctgtgactcctctgtctgggaaatctagaaggagtcctactgcatcagacgttaattaaaagtaattaattgatcccacactaaagtctaaactatttctctagacagtgtgaactcattcatgattaaaggttttgaatatacagtaatcatgttttttcatgcaacaatcatattggacagtttttcgttgttgtctttgccattttaaatgcaaccacaaaactttaatttggccacaaaaagatctttacaaaacaaaaacactgggtccaaccaccattttacgtttccggattaattatatatatgttccaatgatcaaaatagtgagaaactgattaacttattgtaaaatcaagtgttcaaccaaaacaaaagttggaatgtacaaatagtaacgtgaggagaagaaaacaaacgaatgtaagtattacttctagacgttgacgactctcgttacgtggtctcagcagccccttcttgttcgtagtccgccattatttaattgaattgtatcagccttggactttttatcttcaaaataatattcatattcttctgatttcttaaaactaaacctgcattttaagagagaatatatgtgtgtggtttgaattggttatgtgtaaattaacgtctagagaaatttacactgaatttataaattgacttctcaatgtataaattaagtatactaggtcatgaataaagagagattaaaaaatttaaatggtaaacgtgtgtaaaaaaaacatatacagtacagttgaccgatttatatattcttttatggttatttcttttattagtctgagtcgaagattctaattggaccatgaattgaaagttggtcttcgttaacttcctccaaaaaaaactaacgaaacaaccactttcttggaagttgccatttttaaatattccaattctatcgagaacgtcccaaaccggaatgtagcttaggatgatgaaaccagttattggtaggccaattcattaaataaaacaggtgatttggtacttgttgcgaatcatatttattggtcgtccaacgttctgttccaatctaatttataggtaggtgtgtcaaatggctaccgtttctcttccggtttgattcaatagtgaaaatactactattttattcttatttgactcattaatgggccttgttaatattatcatggtccatagttaaagcatccactgtgagtctaccttctgaaaaagagtaaatgaaactgaaaaacaatgtagtacaaaaatgtctcctacgttatgtacatctgaataggctttcgaataatattaacaggcctatgggcccatagaccaacatgtaaatcaaatttcaactttactattcctcacaagacaaaaaaaaaaaaaaaaaaaaaaaaaaagcaaaaacaactcatgcgtgagcagccgtggagtctgccgcggcggcggccggcgtgagcccagtcaacaaatcctcttgtggtgagccaagcagtagtgaaacgatctctctcatattcggccgcttagctggatcagggtgacaacaagccagacctaacttgagtaacaattcaacttcctccatcgtctcacactcgctccttactctctcgtccgctgcatcaaccactcttcctccaccgtacaaatccctaacccaatccacaagcaccatatcttcctcctccgcgtactctatcggtctcctcccactaacaacctccaacaccaccacaccaaaactatacacatcactcgcctccgtaggcgccgaagcagacgcaagctccggagccaaataccctaacgtgcccaccacgcgagtcgtgtttggagccccaccgtgctcatataacttagctaaaccgaagtccccaagcctcccacgcatctcagaatccaaaagaatgttacttgatttgatatctctatgaatcaccacttgatcccatccatggtggagataattaagcccttccgcaacatcgttaatcacctgacgccttctcctccacggcattggctctttaggattatcaaagatccactgattaagacttccgtttggcatgtaatcgtagacaagcatcagctcgtttttccggcgacaccatcctctcatttgaactagattcttatgctgtaacctacccatactcgagatctccgccataaattctctcaaaccttgcttcgaatcgtgattcacgcatttaacagcaatctcactgttgtttgacaaaattcctctgtaaactttaccaaatcctccagatccaagcagacgatcgttagagaaaacctccgtagctgcagcgagttcttcgtagctgaaacggtgaggccaaaactctaactcccactcctcgatctcttcttcttcttcctctctcattagtttcttccaaatcaaataacccccaaatccgattagagctacgaagacaacacaaccgataacgatcccagcgattgctccagtggaaagagaagaagaagagttttccaggaagaaaacaggtaaattcgtagtgttgatctctcgaagagctcctgtatcactcaagctccaagctagaatccttcgagcttcattccaattggttttggaagcagagaagccagcatacatatctgccgagacataattagcaataacaggatcacggaaagtaagagttggccggcgaggtcgaagcacaccgacgggagcgacggaaacgttgatctgaaagttagggccatcgaaatcgatccaagctcgaacgttgtttccgttacgcatattaaagcgaacgaagcttccattaacagaatcgtagtagccagcggttacggatgtggtggattcaatgttgttaagatcaattccgacgtggttatcgtcgatatcgtttacttcagagtttctaccggtgtcgaattcgacggcgaggagaggagcgttgaatctgactgtggcgttagtgaagagaccgaagtattggctggagatagcatttggaggagaggtggaattggagaggacgaagcagaggccgaagccaggacttgtggatatgtcagggagaatggagaagacgaaggaagttgagaaagatgagagtcgggtcgggtttcgggttggatcgggtataattgtgagtttttgtgggtaaaaaacacggccgaaagagagtggatcggagtcgttgatgaggctgattacggtggattctacgcgggaatcttcgatgaggattacgtcggttctgttagttacggagctgaaggaattgtagagaaaatcaatggcggaagaggaagagacgagatgaagaacgatgaggataaggaggagaggggatggccactgccgtcgccgccattgccacgacatttgtgtagatttttccggtgagaggagaaatgtgaatatctggggaaagggaaaagcataataagaccgtcgaggtttcttcttatctgtaccaaaaattctaccaaatcaataagtgagatagagagagagacggtggtcaacgtcgacggctgaaagtcaaaggtattttttacagttgagaaattacgaaacgtcaaacccagtctcgatcggttcattaattagatttaagacttaaccccgctccgttcaagaataaaataatgggctttgacccaaaattagcccaataatgcactactacggccttatcgatttctttgtttctttttccatgtgtgtattatagggacatgtggattttaaaaattgattcggacaatacgccaaggaaaagcatctataaaaactgagcttttacatgagtttttcgtatgaagcatatttcaatgtgagtataagaacacatcatccgttacacaatggtcatatgagtaagtataaaaatttcttaaaagagtgagtaaaattaatgtaattaagctttttgttattatagtttatcttcttcgtccaatacatggttaactatattgtttggtttttctaattcttttctaataaactaactatgatgcttaggatagttaaaatgggtgggaatgaaactagagagcttccgatcatcaacctctctgacaagaacctaaaacagaacacagagctttggagcttcacgagagacagcgtccgtgaagccatggaacaccatggatggtttgtggccgagtacaacaactttccaacaggacttcaccagtcgattttggaggccgctaaggaactactcgatcttcctgtcgaaatcaagctaaagaacgagaaccacaaggccggacacggctacatcaccatgatgtcagatggccagcctgttcatgaaggtcttggtattgatcaagtcaacgatgttcaacagtgccgcggattctctcgtctcatgtggcctgatgatcatgatgataacgaccgtttctggtaatatatatatatatttttatcaaataacataaaacaatcacaagtatttgttactatgtactaacaatatgatatgttatagtgaaactgttcatgcatatgcgaaaatgcaagcggaactagagcaacttgtgataaggatgctattcgagagctataacgtggagaagtatacagagaaatacataggaggaacaaggtaccttcttcgactgctgaaatacaggagacttcctaatggagaacccaacaggaaattcatttctcatacggacaagagcttcatctccattctccatcagaaccacatcaccggactcatgttgaaatccgagaaagaggatgtttggtatcattttactccttcaccaactcggtttgttgttatagcaggcgatgccatcatggtaagctaaaatctatcaaacggttcaagtttcatataatgtcaaatcatgtgtgtatatcaaatcatcaggcgtggagcaacgacagaatcaaggcgtgttaccacaaggtggagatggagagcgtggaaatgaggtactcgttagggttcttttcgttccaagaagggatgatatcgacaccggaagagatggtggacaaggaccatcctttagcgtacaacccatttcaccatgacggacttcttgagtactatgaaacattggaggttcatctcaaggctcaccgtaccatgaccaaggcttattgtggcatcccataaacctgatcattttcttgatcttattataggaaaaaatgtctgcttgtatcatgtattttgaaactaatagtgtgttttagacttatttggttccttgaaacaaaactaaaaatttctactgttttctctatctgcttggtactatagtaaaagctattttgtccttgtttgtctctataatgggccttgtttatattactatgggccttggctaatagttagttaccctcgatcctttttcgaggtttcttttgcagtttggttgtggaaaataaaacagaactccacatgaagtctattatacgaaaaagttaatttctatagtctaatcaataacaatcaacaccaaaagttccataaacatgggccaatattcttctgcaaacatcgagacagaagatatttcttgtaaaattaatgaagataagatagtataatgaatttgttctcgtcattttccttttctttttagagtagacataggcttgtcttagatgtgcgttgtcattttattttcagacaatctgacaaatagcaaccaaacaagatgaattgtgatgggattctgaaaataacaccgtgtagtttgtccttaatgttagtataaaatagattttttagtggttcaatcatagaatttcttgggaccctcaacgcataattttcatattttaatcagattctcattagtggcaacatgtcatggggcgattccagaaagtgctagatttttttgggaaattgcaattttgatatgtaatgcagttcagatatgattgaggacaaacaaatcatattgctgaaatcatttacaacaatttattaatcaaactaactagtagatcacaactattattatctaatcattcttctctgtgatttctaatcattgaaagagctttgttgaagtgagttgcttttgttcgaagatactctttccatgtcaccgattggtatagaggcgattcaacgggactaaccagcttcggtacaggtgatatcttgatatcagattgcggaccccaaaggaatgctacagataaccgggctctggtttggttaacccgagcgcggtgcaacacgcttttaaacaatccattggataggatgtggaagaggtcaccaacgttaaccacgagcgagccaggaaacggtggcacggtgacccaaccaagatcatcgcgaaatacttgtagaccggcggtattgttctggtacagaatggttaggagggtggagtcggtatgagctgctagacccatggctcggtccggttcaggacaaaccgggtagtgatttagctggagagcagcttgggcccagtttaaatctgaactgagactggcccattcaatgtcttcttcgctgaccccaagtgaatttagtgctaaccacatcaatttcgatgccaactttttcatatgttcctcgtactcttcaacgatatcgctgttaattaaaaacgaattgtattcatctaattagtacagatgagatttagacacaatttgcatatacatacattaaatatttgtacgacctttaaataaaatagaaaagcaagttgttgtttttttgttttgttttctccgataagattaaaagaatacatatcttcaaaatctttgagttgggtccactactacactagatttcattatgcacttaactcttaaatccactaaactccgaggacaaggcaaatttcggttgcttctgttatctatgccccttgttactacctatagggcgtccaacgtttgtggatgttctaccttaaatgtaaacattgtgtccttatgtatatgttttttgttaatgtagaaaaaggtctaataaacacaagtacaagtatataggatcgagtgtataaaagatataccagtagttgaggtgatgttggggccaaagtttacggaaatcgttgagaggcgagccagtgatggtgaaaccttcggaccacatttgcttattgaagaaagatgcgatacgagcgacgccgtagccggacacacctgtctccgaccgagcagacttaagcttgcgttggacaggtagcccgaagagactaccggtgagaaactcaatgtcttggagaagtcccaaaggcacgccgtggtttgagatttggaaggcaccccaagttctacatgcatgaccgatttggttagtcgcgtccgggtggtcgaggtcgatgagagggatgttttcaccggtggccggaggagaaggagcagcggagaagaggagatcgtctttaggggtccacttgtaagaatccgggagctcccggagagatgtgaagtcaggtatgtgagagtgtgggaggtgaatgggatggcctctaaacacatctgttaacatagcaggcatcttgctcttttttaattagttttaaaactttgtaaatttgatagatgtttgtgttttttttcttatgagaagtgtggtgtttggtgatgggagattggaagagttagagagttttatttatagtggtggagtagagaccaagaggaggcaaaagcatatgttaaagcacttgttttggtccaatattattggttattctacttgtttattggattaatacaatacgaacaaaccaaacctctagaaaattatagaggtcccgccatttccttcttttgtaagaaaataaatataatttcttatttgattatgcaagataagatacatacacatgatgggttgtcaaactatgtataattcaaattgaagttgaggtagtaatatggtatattgtgttcatatgtagaagttaaaccgtatctatccattacaatataatctataaatttaagaaagtgattaatgcgtatataaagggacaataagtattcaaaagaaagaaagagacaaaaaaaattgtagtctaattatttgttttgtttatgttgatttggttatttcctcagtcattggaattaagtatatccaacatttttcttcaattattgtcatactaaaaaagaagtcttaaaagtcttaatatcttcaaatcaaattttaagaaagttatatacacaacagtagatatatattttttcgccaccacaaattacttttttgtatttccagcgactgtggtcaaattagtgttgattgattgaaatcataattgtgaaagggggagacataaagaggagtgtttttgtttgggacaaaagaaggaacaaaaatagaaagggccaatgttgtcttgtacaaacaatatatagctaactgcagcaaacaacaaaatagcttatcttctttagattttccacaaagaaaaatgaaatgattttcgcaagtaataatttggagtaaaaaatatataaaaataaataaatatttatttgaacatacaaaaatactttggaagggaacgaatctagaaacaactatgctgatgacagaagaaaatataattaaaacataagaagatagacaataagaagacacacctatctttgaataccagttatttttaccacgatcgatcgatgacattgagtgtgatgaatgtctgatgtattggttagacgattacggagttaaaagttttatctaccgtacgaccatatcaataacgttatagcgtatcaaatagatactagcgcaagaggcgtatagaataaagtattagcaatgcgttaaaactacactcttgggaagtaatgtggtcgctagtctataaaatttgtgggataaacctatatttgccaaatctagaatggccacgtctcattaagatatgcaagcaagattcttacctagttacctacaatctaatatggtgtttggaatccaattcgaatgagataaactatatgaatacgtcttcatgatccaaattcataatgtaattttgtccactaaagatttaattaattcaagatccatacattatactagtttataacttaaccattagatatatttttcgttttttttaccaatttacctaaaattattgaaaattaatggtagtagtatctttgaaataacattacaccaacgttccctaagattttcagtatctggattatttctaaatctatgagaaaaaagcattcaaacatttatgtatatataacacacgtgcatttgttttgtatacactacctacaaattaacaaaaaaggtatttgcaaattaatattttgtgatttttgttagtagtaatgtatatatgctgcaaagtagacgattgatcgtttggtataaaatcgaaaactatttattaagacgcaaaatagacaataaaattagcagataagttcaaatggacatataaagtgattttagtttttagatgaataaaatggtaatgaccgtgatatgttaaaatattccagttttgtttagtggaagaaaacgttatcgtctttctttttgcattgaataatgtccttttccggaacagtaatacaatttacaagtgtaatgaccaaatttccacaacatgacttgccttttcgcgacctatttaagcccctctactgtttttggcttctaactaaattacaacaaactcatttctatccctgatcaaattaaagacaaatttgacattcaatcctatgtatataaagaagattcacgaaacaaatatataacaaaatgtttaatagtgtgatgataatcactcccgaatctaattttattgttttcttttggacaaaattgcacgtacgtcacgaatcaaggaccccattcataaaaagtttcgacggaccagttgattatgtgtacgaatttttctaaaggaaatagttacagtttttgttactttatagaagaaaaaagtaataattatattacttgaaacggatcaaacgttgaatcaatattgggaaccaataaaaagtgttgagagactggatgaatctctttttcctctggcatcttaacaaagggtaagactaccccattcattttctttttaatttatttaaatttggtcatttcagtcttattttcttttgtttttttcctactcttttaatttatttttctactcttttttttttttgtcttcttctatccgacttggctctcactatgctatattccaaaaataaaaaaatatctacaaaacgacaaaaaattaacatctcgtgggtcctttattttatctcaaaacactagtccttaagattaacgcattgtatgttttaaaaaggaagaacatatctataaagttataaacgcattaatatacccactatttttcacgacaatcttagctaattagttagcaatgaataatcagaagagtcatatagcatgtagcacacactctggtgataaaaaattatgtgtgtgcatgttgtcagtgtgtgtgagtgtgactgtgtgtcattatatcaataacaaaggagaaaatttaattaataataattgtctgttcgatcgatttaagtgaacaaaatggtatcgtttggtattaatcttgtattttgatgaatggtgatgatgaatcataaccaaaattttgtggttataaggtagtggtaaatgatctcacacgacaatgtccaacaagcctgaatgatctcatgactcgggtttgttggtgtttcaatttgtttacggtgaagcttgatattttattttagtttatttttacttttaggtgttgtttttaaattatgttaatttttttgtgtgctaagaatgtatatatcttagaaataataaaaagagttaggatcgaattacaatgaagtaaaaacctatatatattggttccatagcaaaaacaaatgataaaaaaaacatgaaaaaaacaaaaaagaaatcagttttttaacagttacgtacatacattattaaaataacaaaaaataataattaaaagaacatagccaaactaatatatggaaaacaaccaaacaaggaatatatgtaaataatacacataacacatggacatgtacacagcacatgcatcatcatccatgcacgtgctcctcacataatgatctctacatcgctttccaaaatgtcacaaaacagaataattatgattttcatcatagagcatctcctctataccttgtcttctaaccccacacccataacacatcacatacaactacgtacattatttctatttattgagtgtaatgtaggagcatatgtgtaggtatgtatgaaaatactatatggttgcatgaaagagcattaatatttatttcatggatggttatctaaatttcctatcataatttgtttttataaaatagaaacttcaataaaatggtgatatagtgatctgaatttgtattgctttaagatatacaagatatcgatttttcttagaagaaataatttgttcataatttagcgaaatcaatatctgaatatcgtcttaaaaaaacaacgtcatcaaaaatgttgtacgactaaattatattgagtagtactttacatgtcaacataactgtagaacggtagaagcattgtactctagatttcgttttgggagtcttcgattcgcagttcttaattcaagaaaccaaaatcatgagttttcgtagatatgttttgagtgaaagtgattttcttgtacgtttcatatttatgaaaggaatgtagataaaggactttcatataataatttgtatttatacgaaagtgtaacgtataggttaattacaatgtttttttcatatataattacaatatgaatttggagatattacaaggggaaaataatatatatatatatatattcgtgacagccagaatgggatacttatctcttgggtttaagggatgtatacgtctttgacatggttgataatcatccacgtgtaattaaataaaccctatctggacttattagggttttttgtttcttataactaaatgtacaaacgccacctagagttttggaattatatgtcggacctaattttaacagtggcatgtctcttactttaattttaagaacaagatttataatcatctttaattaaaatctaataaaaaagcaaagaaaagttaagatgcgtttgcttccaacgtcattggataccatcgttttctttgccataagcctgccccatatctttatccttaaccttacatggatcccgacattaattaacaccacacagacatttaatcaaatctgttttcgttttctatctataaattacttgcaagtgttttatattcaaacgagtatgtactgtatgttgaaagaaaattacaaaaaaagtttcaaacgagtatagacaaaaccaagaaaacgacaatattgaaatatactccgatatgctaccaagaaaaagtttcaaacgagttagctttttttacccaacatgctacgatatcactacaaaaaaagatcattttaaatcacgtcaaaccaaacgactctacaataatatatcagcgagttactttatatatgcagttaacttttactgatgactcccaagtataattatcaccgcacatactttttttctttccttttcactacccttttcttctctttctttttcgtttgaatttcgagtaacttgtatatgttaagctataatgtaaactatatctatatttacatcacaattaaatcggtatatacatatatacccttttagtaaaaaaagaaatatatatatatcattttagtatatctattttactaaagttaaaccactaaatcaataccagttcacgtactttaatttgttactcttgaaatcgaatgtgatctcatatatgtttgttgtcgaaatgacaagcatattctctcaaatttttgaaccaaaaaaaatagtggttaaggatttgacaacacattttattttcttgcaaatgtaagacgaaaagagacacttctaaaaatccaagtacttttgaaattggtagtaaattttatttcccattttggtttgattgaatttttttttataatgacaaagagcatattactttataaagcttctcttcataacaccttaaatattttcagagaaactaagaagaatgaccatataaacaagtaataatcaaaccaatgactttgttatatggttagggtccgatatatatatgtgatgacgaaaatgcatttgatgacacattgttgaaccactacaagaatatacttttattgatacgaaacatttcgtcccaataatttaaaaatcgtcacaatataaatactgagacgattttgtgacaatttctatcagttacaatatactcgtcacaaaaataatttcgtatcaaaatcgtcacaatcttgtgacaaatatatgtagtatctattttgtcacacttcgtaacggaccatacgagtgacaaaacagttaatattactaacaaaacatctagtctcaaaaccgtgacatttggatactatagtaacgtgacatttccgactctatttacaactcaaaaatagtcaccgaacgttataaaaggtgactaacaaatggtaacttatacgttacaattactaactaaaattatcgtcgccaaaacgtattaatttcttactattataatgttacaatattgtcgcaaattatgacggaactatagtaacaaaatcatcataagtattgactacaaaagacgtcatcaatcagttctgttttttgccactatttcagtgtctcaacttcgttatgatttattactaagaatcggtcacaatgcttacaatttagctactgatttcattgtacaaaactagtcactctttagttaatggttttatacgctctaatgtatgtggtcaaaatcctcgattgaaaattaaaataccagacaaatttaaaaaaactgcaaatgaattaccaaacgccaaagaaacaatttgtttttaaaaaaaacatacgtagatcgtcttagattaaaagaaaaacagaagcaaacaaacttaaattttgactaagcaaacaaaccaaagtaaacttatgtggtacgagcaaaggaacgaaaacccatgaaagcttgtggagaagccgatgttcctataggaggaatggaagcgaaagtagctgctgaattgatcccattctggcctacgagagattgcagtgaagccgaagttcctacaggtagagaagaagcatgtgtagctgctgaattgtcctcattcctacctaaaaaggattgaaacatttgctccatagtgtcaagtcgtttatgaacaagcacattttcattacgactcttttgcaattcagtttccagctctttcactcggacagttaacgtttccacttctccagtactttgaagaggaataggcgcaccatctaaagacaaagaagtcccattttgaagtgagccaagtccaaatacacgaccatgttttgatattccagcaacctacaagaaatataagtgcatgaacaatgacattttaaaaattaaaatgtttagtaagaatcagtttgtactccaaaactccatcaagtctctaaacctatagaggattaaagtatgatctttacaaagaaaacaaatgtaagataagaaaaattacctgaacatagattttatttttctcctctatggtaaggggattcattgttgaattctctccatcaaaaagctgcatttgtgccatgcgttcttgtaaaagttcatcatacttttcagcaattactcttgctttttcatcaacatatgttccatcagctttttgatgagtttttttcatcaccgcaatgaaagaagaatcttcattgtttgcttcctacacataaaacattaaccaaaagtaaacatacctttcaaaattataaaaacaaatcacaacaactataaaaagtaaataaatatgagcattaccaaagtatcttgaaccttggcataagaacgtgatcctgatctgtgacagtgtggacccaaaccatcacgattaaacagccgagaagaacgcgctttctcgcttctttctttagctattggagtcctccaataagctaccataactctccaatgtgcagccagaatccagtcaggttgtttacctcttgactttgcaaggctaaccattcctttgagccgagcagcagcaagtgtttcaaagtttgttttcaccagatgctcaattgaagcatcccactcaaaccatgtctaaaataaaaattatgaaaattgtattaatataacaatcgtttctgaaaatattatagagaaatgcaattaaaccgaaccttaaatgttgaaaaccaagcttctttgtaaaaaattggcacttttttccagctataccatggtcctttaaaacacccttcaatgatctttcgaacacgtgttgatacttcggtgttgtttttgaacctgttacatgtgtattttcattatttacaattctatttcatgaaatgaagtagtttaccaaaaaggaatatcattaccatttagctccattccttcgagatgggtggagaactcgaacattaagttgtacaggtgcaatttcttccatctggtcatttggttcatcgtttggttcttgaggatttccaagatcaggagaaggaggtctttcaaaaacaggaggcagagaatttggtaccctcccatacgaacgtccgcctatcacgagtggtggacgcatctggcaaaacaaaagaaattttaaaataatatgaatcacaatattcatggttgatgctatatgttctcagcttattgagataaaattatggtactaattttttgacgcatacaaaatcaaactaataatctaactaattgtgtatcccattgtgtatctcaaattctctgttttcagattacgttgcttctgggtaataaaaatgcagtttgtgtaacaaaaaaaaaaaatctaactaattatattttttttaacacgccacgaagttttatctcaataatagttacaaacttttttgctttcaatagtctgtacatgaagaagaaatcaaacagtttccagcaaaatcaaaactcaaaagattaataatagaattcaaaccttgaaatcagttgatgtggaagtgacaaaggagaaaaactataaattcagaatctggaaaaaagaaaccggtgggagagcagagctttgcttaagagagtcttggagtaaaacgtaagaggaagaggagctttgtgactcatttaatatattaaaaaatattctagggtattggtaacgtttcattaatattatttagtcacaaccaaaaatttcaatagtttttactgggtattacaccgcctaagtgtttttagtttcccactcctaaaactagttcctataatcgtggcttggaatcatattctcacgtcgccgtatctcacgtcgcaaagacgttttgcatatttcttctcttcgtgtgatatttttagataacttaaattaaaagctagaattttagataaatctaaaaatatttttaatatatttcaattcaacaataattaaaaaggtttggtcaatatatatttagtccaggatattagctttttcatcgttagtttgttaacttttcatgatctatatatatatattcattatcttgctacatttcaattatttcatacatcaaaaatcaggaaaaaaaaatgcaacaagaaagcaaatcacaagatgatcaacccattagcaagacaaatcctcacaaatttgatctaaacaaaccctattatggcgaagaagtggttcctcttaacgaagtattggaacaaaaagatattagagcagaaaatttccgatctatcgagaagacaatctctactcgtaattttgatctgaaccatcagtatttcgaagaaggagattctcaaatcaacaaaagatggaatgaaattaaactggaaatgctgaggcttttgctgcctcctcgaaatttgaaggattgatttggctatgacttaagagaaaataattatcttatactctatttattaagataattatcttatactctacgtagcttcaatgtcaaaattgattattgaattgttatttgttaaaatatatgattggatttgttttcaagatttgttttgattattgctttgttaattaaaaaacgtgtgatgatatggaattatgattttgacacaagctggtaatcaaacacatgctctgttacataattataaaaagaagaaagagacaaacattcttcttttacacaccaccgtcttcttcttcttcccaacggagagtaccagttgttcgccgacgacactagcttctttttcttactcactaggaattgtagaatgattaactaaaaataaaagccttattgaatgatatctatataaaaattaaagaagtccacctacgtaggactctgattttacgtaatcattacgtaatcactgatgtttctttttaaaatgacattaaattcatgaactcattatgttctgtgattaaattcaaaggtaatcagaaggtatgggaaattgttaatccaaaatgagatttatacctgagcattctgaccaattcctgacataggaaactgcattttccaaaaaagaaaaaaagattttcaaccagagaatatacgaatcagatgaagttttttttattctgatatgttaccaaaactacgcatcagaggaagtcaatgttgtaactgtgaatcaatcagttcaatgaaaataagtccacagattcagatatgtacctggctattttgaccaactcgcaatgatggatactgcattttagaaaggaaaataggcattcacgttagagatttgttatctgtatttcaaaatgctggcaaaaccatggctacttaagtcgtatcccaccacatatggatcacgttagacttcgccatattctcgctcaatttggagaactcggaaggattataaacagagaatgtgatttttaatggctgccaaaatatagagggtaaaatatcttcatgaagagggtaaacagatagttaactatcttcatgaagagggtaaaataaaaaagaaatctgagaaggtgcagtacaattcttttagtgtaattaaagaaaaggagatgttgaagaacgtttttatttgatttttccttaaaacaaaataaatgttgaagaaggtgtaaagtttttctagtctttcagaccatttccaattgttgcttctattttttcatctaaatatagagaaaaaattagggatctctattttcactctaatagtttttcaaaaataaaaatctctacttgttagaagaaaaaaatagaggaaacaataaaaatctctactttttcctctatatatagaaaaaagtagagatctttattttacagataaaaatagagatgagttggagtgaaataacgtcaaaaataaaatataaaaacaaaaatagagatgagttggagatgcctcatgttctccaaatagtcactcgattaatatattacacaaactcaatcaaaatatgcgtacaaatgcaatttccacaaatatgcctttaattttataaaaagtatgtcgttaattgctaattagagtaattaacatcaaaagtatggtttgggttgatataacaaagcattgatatttagtactatttgtttgccccgaaaacaagatgttttagataaaagtgcaaagatttatataatggttttaaaaactagccataacttaatagttagttgtatacaatattcaactaatcattaaaaaaactgcataattaaagaattaatcaaaagtatcaaaatatatttaaagtttatttagaaaattgtaaaacatcttataagaaagaataaaaaaccttcttaaacatcttataaaatttgaacagagacaatagtatatgtttctattttaattgattgaggatcctatgtcatcgtaggtctctacagatgttcttatgcgatggacgaatcgctattcaaaaattaaatttgtttcttattatcaatttttcattttgtgttgttttatcttcaattacacggtacaaaaaaataatttttaaaataacactcatcctaaaaattgcttcacatactttttattgtggaatctgaaaaaaaaaaaaaaagtttataaatcttttgtagatgtgtgctctcggttgaatggtcgtaaatgattagcgacttgtttcaaagtttttatgaatcttttgtagaggtgtgaggacgatcaacggctcgtttcaaagtatttgttaaatgtttacgatttgagtaccaaaaattgaaatcaatattcacacaagagtaaatttgaatatatatagttatttatttgagaacaatatatacgaattttaacaaattctttacttaaaaaaaaaaaagttttgcaacaaattctatacttcctccatcagttttgctttctctcaattattattaactttttaactcattataagattattagttccgtaaagtgaactgttgttcacttgttcgtattactcttacaccagtcgggagtgacgaaaattgaaggccgcttatttgataagtttttttgtgtcagtccataaagtccaaattcaagtagataaataacgataaagatttgtctagaaacatttcgttttacttattggatataaaacaatatctcataacgacaaaaaaacaaaacaatatctcattaagttattaataattgttaaaacaaagtgcacctttgttattatattggttaatataaagaggtcaaaattgtagttcccaatgttagaaagatgaggaaacatgaaggagagaaatattattgctgctgacataatgtaagtattttccaaacttcatatatataactaaggactgtttacgtaactatgcaaaaaaattagaaaatgaaattgaaaaccacaaaaaaaaaaaacgatatttaacccaaaatgaaacaacagaaaagtgacattcgcgactttttttcccctaccttttttgtagacatttaattacattttttcccagttttgtaattaaccacatggttcttagaatgcaaataaataaaaaacttagaaagttctgatctttttatctttttaaaattttatgtttcaatactatatattacatagtcaatcataccacaacctcttaccaatcaaaaacaaaacctttatctccaagtctattattttctgctaaaacctgcaaccgtcttgaatcacaaaaaatgtctatagttttgtaaatatcttaatagaaaaatagaatagtgataacagaaaacaaaatttcatatatacttctaatccgaagataatcacaagttgatcaaaattatagattttttagtgcaacaaaaactgtcatttttttatattacgtaataatcatttttttttcttttaaatatttggaaattcaaaccaaaaaaccatatatcttttaaaagcggaacccacaccaaattaaaaatatttctttcaatatgccttgaatccaacacttccacctgaaagatttaccattggaccatgagtacgttgcaaatttcatattgtgtttcattgtgataaacaaacaacaaaacaagaaaactaataaaggctctttcattgcactgtagatcatatggactagttttttatgtagcgtctaagttattatacttgaagaaaattggtatcataattagtcatgatctataagaatgagaaaattggtatcataaagttagtcatgatctattagaatttattcccgtttatttatgattttctctaaacttttcttcgttgttcaagtcattgagtaggttttttgctaaactgttaatatcattagaaaaaatgaaaatgtttggcctttacagagaaggagcctttggctcttgaaaccttggcaaaaataagtcattgagtagtttcaaagtgagtattatctacttcttttgtttgtgtgtgtgtgtgaacatgggtgtagttcagttcaaattacacttttagctgacaatgataaaggcctccaatctcaaactttatcttttatgtcagtcgacaacagtccaaacgtatcatttagattatatctcttccatagaagcaacattttaatttattggttgggataaatcagttaacaaatgaattaaaacaagtaacgatcaagtggagatgttttggccaatctgaactctgggaaccacttgtcatgtttctcgacatctgtgacacgtaccttgttcagtgcctcttcgatatcacatttgctattggagttttcgagatagacatcgtcttttagacatgctcttgagcttaattatccctaaggttttccattcatcgacgagtacctagtcatatttttcagatcctctacattatatcaattgcttcccatagccgtcttctcaataacttctgatgtttataatggtcgcattttagttatatataacaattgaaccactgatcatctaacctcaagtgttcttaatttaatatcgataggtgccttatgactttcgatggtgggaagatcaaagatgtgtatatgtgtttcgccagcctcctcctggaacctatgacattcgaacagtctgagtaagatgaaatatcaaaaaaaaagagggaccctgagagctccatctaggtcccatgggtatgcaaatatttaaggctaggaaattaccgtaagagagttgcaaagaaaatcaatctcatcaatgaaattattggtcacggcccgttttttattgggccattactgggcctgttttataagagaatccagcaaagtcagcggtaaaggagttcttttttaataaaattaaaattttcttataaaaaagtgattaaaataacgtcacaccactatataacgcgacgggaccatcggtttcaaaaacataacataaaacaaataacatatttcttttaaaaattctttgtttttctttaaaatttttttaaagccatggttactattatactcacgtgattgtactgtagaatttaaataagtatgaagaaatggaccaccaccaaacatatccattatgtaaaatccaattgtatcctatcaattcatgttctaacaaatgtacatcttatatagttaatgcgataaggaggaatggagggaaaatctgagttcaaaacttgaacttggaccaaccaaacagtaaattttgcatgagtataaataattcttagatctctcttttaacttttttttttttgggtgactttgtttgtgttttgaatattagatctacctttttggtttgttgataaacattattaggtccatgacttcttgttgttatacgtccatctctcgttagtattttagagtcattattaaactttaagactttagagtaagtaagtcaaataaaataataagactttagatatacacaaccaagtttttagtttgaattcaaaactcgaacgaagtctgattatataatcacgtgttgtaactaatttcaaagaaactatgattgactcatcatactatgaaaatatcgttgacttattacagttttttcatcaacaaaatatatatacatctcatatggttgaagtataactactatcatatcatcattcatcaatcacttttgttgttactgttttcagagagattactacatagtagtacataacaagagaaaacaaagccatgacaagaaacatcaacaaaattctaaaaagcaagaagacgaagctggacaagatctctgcagcatttaacatacaccactccactcgcaatgaagttttatcgtgttgggacctccgattttggactttttttaattttacttactttggtaattaagtgatttttttttgctactacatgtgaaccaaaaagaaaatgaaaacagaaagttgtattaatggctagggattttaacttgtagctcggttgcttctcattaattagtaaacggtgtgaattaatggcatatataccattgtacgtaacaaggatcataaatgtggcaaaaattaaatcacagttgtagacaaataataaccccagatctcacgggttgatctcccaaatctatgtttaagcacgctactaaattcaaaaaattaagcactaatttaattaactcaagtctcccccaataaaaacacttcctttttgtctatctcccatatatgtaatggtcaacaagtcaaatttttaaaattcattatattctctgtacatgaaaacatttagtaatgtttctttttaaaaaacactgttttgatttaatgtcgttagtaaagtttattattttgatttctttttaactttccttaattatttctaaatgtgtcttctttatcgtttaaaccacactagtgtgtgcgtgtctccttcactttcaaagacagtctctttccccaaagagcggattcaggattcaccatctcgatctgtgtccaaagctcctatctttcttctttcttccctgaagaattttctggagcttctcaggtcaaatctcaaatctttttttaacttaattttgttatttctatcagaaagtttcgatttttatgctcatgcttgtgcatccgcgtacctgcatttcgttttgtgtttgagccgccaaagttttcaacttttttttttgggatttattgcaaatttgtcgatgttgaaaggttttctcaaggagaatgtgaagaaaaaggaagagaatgtgagttgattttaggcatagggttttgtgggttctttcagatttatgtagaatggtgcagctctgattcatgggtttgcaaatggtttctcacgatctgttcgttttcccaaggaaatgtagctgcttttttttttttttttgtcatcagattgaaatgtagctgcttttgaagagaaaagtctgatgcttctcttccgattttttatggatggtatttataaaagaaagaaatagtagttagattgtcgaatattggttttcctaatcttttttcttctctagattttataaaattggagtctttttctgcattactgtttgcattgttcaataaggaaatcaaataacttttgattctaccattgaatcttacggagttttgaaaaaaagtttgaagctttgaactttaatgtatcttctattgatacttttgttgatcagtggaaaattttcaaggaaaatcctctgtaagactcaattggttcgattattaagtcaaattggccatctttttttcagaacatttttatatgcatggttgcagattgctatctgctctgaatgttgatctctctattgccttaactaatgatctttgcgttcttttgacagatcagaggaagatgatgcaatcctaagactctaagacttcttcaaggctgtgttttatcgtgggatttttaaacatggggaaggaaaatgctgtgtctcggccattcactcgttcccttgcctctgctttgcgcgcttcagaagtgacttctactacacagaatcaacagagagtaaacacaaaaagaccagccttggaggatacaagagccactggacccaacaagaggaagaagcgagcggttctaggggagatcacaaatgttaactccaatacagctatacttgaggttgttaaaactatattatgtttctttatagtgtttggtttcctgtgaatttttgtaaagatcttgtgaagtaaaacatgcatcactgaaacatgggttttgccatttcaggccaaaaacagcaagcagataaagaaaggacgcggtcatggattggcgagtacatcccagttggcaacttctgttacttcagaagtcacagatcttcagtccaggaccgatgcaaaagttgaagttgcatcaaatacagcaggaaacctttctgtttctaaaggcacagataacacagctgataactgtattgagatatggaattctagattgcctccaagacctcttgggagatcagcttctacaggtgatccatttaacacaagttttcatatgattagttcctattgtataaaggagtggtctttaatgacttataaatcttttttgcaaatggttacagctgagaaaagtgctgttattggtagttcaactgtaccggatatcccaaaatttgtagacatcgattcagatgacaaggatcctttactgtgctgcctctatgcccctgaaatccactacaatttgcgtgtttcagaggtaattcctaggctttgatagtctctaaagaaacttggtgagccaaaggactgaaagttttattgcttgtgcttctgtgtcacttctcttctggcagcttaaacgcagaccacttccggactttatggagagaatacagaaggatgtcacccagtccatgcggggaattctggttgattggcttgtggaggttagtgtttagttctacttttgatgctaacttttgaagctactatgaccttttccgggttctcacaaaagtctgatttcaatcacaggtctctgaagaatacacacttgcatctgacactctctacctcacagtgtatctcatagactggttcctccatggaaactacgtgcaaagacagcaacttcaactgctcggcatcacttgcatgctaattgcctcgtatgttcctctccaatctcactagtaaatctcttctcaaaagctaaactaaacttatactgcatttgtttataaacttttcaggaagtatgaggaaatctctgctccacgcattgaggagttttgcttcattacggataacacctacacaagagatcaggtataccgagattgctgtctgaatcctcaaaaaagaaagtgtgcaatgtgctaatggagtcgtgatgtgcaggtcctggaaatggagaaccaagtacttaagcattttagctttcaaatatacactcccactccaaaaacgttccttaggagatttctcagagcagctcaagcctctcgcctggtatgcatttcgcaatttgctcccctatctcttctaattacaaagtttagtagaaagactgagaatgtgtccatatttgattgctgattcggcagagcccaagccttgaagtcgagtttctagccagctatctaacagagttgacattaatagactaccatttcttaaagtttcttccttccgttgttgctgcttcagcggtttttctcgccaagtggacaatggaccaatcaaaccacccatgggtctgtgatgttgcttctcttttgtatatccagacacagtttagctccacaaaatctttgatctttaacatctttttgatttttcccccggcagaatccaacacttgagcattacacaacgtacaaagcatcggatctgaaagcatctgttcatgccttacaagatctgcagcttaacaccaaaggttgccccttgagcgctatacgcatgaagtataggcaagagaaagtaagcttatcagttaaaaccacatactaaaacctgtttggtataactttagtttggtttccttgattctcataagacttattatggatttgcagtacaaatctgtggcggttctcacgtctccaaagctacttgacacgctattctgaaggtttcaactcctaaccgataatagttttgtcacattgatggtccaatttcgttttcattcatctgttactctttgttcataaaacagaatttccacagtcccactcatctaatacctgattagaattcggtttagcctagtttgatccgtggtttggttcttccaaacccgggaacatctaatcggtacctagagttttttttattgtaacgagaatgtacatttttctcccatcttgaggcaatgtaaacagattcggaattttcatatcagttttctgatatgaagtaggtttaagtatttatatttcaaatttcattgattgttgatattgaactgtcatgcagtagcttataagaaccgcctctagactttagtccagtgaccaaaagataaagatgaatgaactatgtcaaagaaaacaacttctacagaaatttcggaaatcttagacttccgaagagaaatattgagtaactgcaaaaatgtatatttagatatctgtaaggctcactcacattcacatgtgactataaatatcattcatcctctgttacatgatctcttcataatccttaacctcttgcacgatccaaggaacattctgcacacaaatagtttcataatttattagatatcaattaaataaaagaaagtaaatttgaatgttatagaggtcgctagaaacttactcccaaggaacatctccagcaagcatccaatctccatctttgtcttcatatattggtacacattcactttccttcaacgtatcatcttcattttcatatataaagattataaagttaatatcgatgttttggatcattagttgccttgataagtaaagactaaaaccaaaaatatatactatatatagaaacataaactaaccaaaattgatatagcatccgaacagaatttgcagagcggaagcaagatcttggtaacatttgtacatttccaaatcaatcttccttaaaaatgcagctccatctacactcactttcacgtacgaacttttggtccgttcgagactgttctttctccggtacgaacaaaccggtggccaacccacaacttgactctttttcgccggttcacatttcaaatcaatctctacttccggagaagccctcttcttcccggagatggactcaccggagacgacgatatctccgggaagacctagccgtagttcggtgatttcgagtccaagattattactctcattcgccatctttgatgtttttgattgaaagtattggtgttaatgtgtttgaactttattctgttgccactttatatgttctcatgggaacataaacgatggcgtttgagacaagcttgtttagcattgatttatcttgtcggccccattcgaagatcttgtcgaaatttttatgtcatgttttttcattcctttgccgcttcgtgtttaaatgtcgataatatggatccgttggttcgacacactggacggccacgattttgttaccgacaaagtagggtttctttctcagccgttggatcagaaacacgttactttctattagacatcccatgttatgtgtgatttgttatgtctgtatcccattcttttaatcaacgacataataataaaacaacatattcatggtcgaatatatattagtgcactttaaaatctacgtatatttatgtttctcgacaaccgaacacgtgttactcaaggctaagacaagttattatattatttcatttttttctacacgtaacacactacacagtgcatacataatttcaaagaaaaaaatgcatctacgttttcgtcatatatcttgtttctgctattcacacatgtgcccgatactttcattacatcatacgtaatctacacatgtacaccatacttttgtcattatttgttacgaaatagaaacagaactgatcaaaatatcaattacgggatatatttccatttttcatagatatttccatatctttgtatctccaatagtacatttttggaatgttcacatgttgatagataagctagattagtcaaatttccttgtacacaatttctagttttcgattgatcatgtagaattgcgtataatatattgtcggctggctttagccaatgaataacacaacaagactttgtgataatggacagcgaatcccacagtgataatgatgatcacataatcgacattacaaacgatgaagattcttcatcaagatcgtctttggacgagagaagctatccttcattaagttcgtctctgtctacggatgacgaatcgtcagatgaaggtgcaagttcatctacgagagactgtggtagtctttggaatataatggaattagtagtcactttggttcagattgttgcatcattaatagttttaactctggcaaaagatgaacatcaacaagcacttttgttaacatgggtcatcggttacacttgtggctgtattaccattacgctccttattctcctctcgtgtgtccgcaaatacaaccgaattggtgtttactcaaaaacgaggtataataaacaacacttgtttcacttaacattaagagtttaattagctaaatcaaaccgaaccgttgttggtggcagaacggatagggtaatggatgctttgaagatggggaatgaatgtttctttgttgtgtggttagttatggggattctatggatttgttatggacactcatcttcttctgatactcctaagctctacaggtttgactcacaatcatgtcacagtagagatttagttaaaccctaactaatcagtactaacttttgtcttcttgattatgttttggcaggttatgtgtagtcttcattgctttcagttgcattagatttgcatatgcattactattatgcgcaggtatttttttcgcttaatgttcactagagtttggaacatttttttctcatatctatgatgtggataagttgaaatcaaatgatgtagattctgtaagggaaggtataggaggtagatttgttttcaagaaaccgagccatgatgatgtgagtaataatttcatatcacattaattactctgttttaaatagcatttttttgttgttgttgttgtttaattttcatggtttgatggtgtgtgcagagttgttgcatatgcttggggaaatatggagaggaaaaaggagtaggactaaggaaacttgaatgctcacacgtatttcattcgcaatgtatagacaaatggctgaaaatcaaatccacatgccctctctgtcaatcacaagttaggtggtgatgagatgaggttgattttttttttatttttttttcgctcaagagtaattgtacacattcaataaacaaaagtggtgggaaactgaaagatacgatcctgtcttcttgtgttgtctgtcttaaaacagaaaataaatatcatacagatcatttgacctattaacaatttaacttgtccaaaacatctgcaatatatataaacattgaaatctcagctttgatcttcatttttcaaaataatgttttatttgtaacacgactaatacgtacttagtattgatctggtctaaaaaaatactaataattttatcaacaaagaaggaaaggtatatgctttgtgctcgtcaacgcaaatttgaatgaacttttcatttgatcggcaagaaataggaaaaaccaaaagtgatcaatggagggccctttgttgagcgagtgtgaacacatcattgacattacaagcgatggtagttcttcatcaattgatggtcagcaaccacacgagggtgttgaattgggtgatccatacacaaatgaaagcatttgtaattcaatcgagtttgttgtgactttggtcttgattgctgcggtcataatcgttctgattgagccaagagatgaagaacatccacaaacaatgttgtctatatggatcatcggttatacatgtggctgtattgccactctccctatcctatgttggcgtttttggctttataaccgaagcgttggctccgaatctacagatgaatacttaagagagacaaggtatatataaattgtgttttcttttatctttttatgcattagattgagatataatggttttattggtttgcagaatcaacaaggatatggacttttttatgacgggtttcttcgtgggttggtatgtggtgtttttatggattctttcttccaaagcattcgactcatcagctctagatgatactacaactcaatacttctggtgcgtatcaaacgaaatttccaatcatatgtataccttaaaacgtatatattgacctttcttatactcatgcctttggccttcttcattgtctcttttgcaggttatgtttggctctccttactttcagttgcattagatatgttctttttaatctaacattggcaatggtctgttatactactcctttgcttttacttacgcctgtggtcatatgtgttctccttgctgtggaagtcttaaaaggcattgtagcatgcattgtatcatgcatctgctgaaatcgaactaataaaaatattttgtttgtaagcctaggagaatgggcgtttaaaatcaaagtaaagcagagtaccagaataaaaatgttttgtgttcatgttgatgattttaatcttattaaggtagagaaaaacagtagctaaggttttttgaaatgatcaaatatgatcatctcgtcttatttcctctttttattttatttttctccctcgttaatattattctccattaaatgacagttttgactgaccattcttattcgtgcgttttcgctattcagatatgtattttaagggcccgtactttaatgggctttttaaaatctgacttatttcgagtcgagtcctacctcattgtgacatttacccaaataatcacgtgtttcagaataaccttttataggccttattattttgacagatttgggtaaatcgaaatggatatatagataactttaacaccaaagataagataactaagaaaaataataaaatattatagtttcccaaataataaaatttaacaccaaagatttctccttttacaaaaaagacatattacttcttctagcttcccaaataatacatcaagcaccaaagaattaggaagactataatttagaaccaaatattttgaaattttactctaacgggctacaattgactaataattggtcttggtgtaggtaaaacaaaaacacacaaaacaaatgtagctccgaaagtctactcattgtaaaggactttatgtgattgacttagaattggtattggtgtcgattaggtcttaagataataatatagctggaaatgtctattattcgtatttagagaagaatgactaactttttttttgttcgttagaagtttacaattgacttatagaatagatcttgacgtagattgggtcttagaataataatttagcaccaaagaatcggagagggctttatgtaatttgtatttcaacgcttgtttagatgaactattaattcgattggacaaaatagaagaaagcaaaaaagtgatcaatggagggccctttgttaaccaagagtgagcacaacgtcgaagacgttacaatccatggcgattcttcctcaaatgatgagcacatcatcgacattacaatcaatggcggttcgtcatcagctgatcatgagcaaactccacatgaggcatttcaatggagttgtccatttacaagtggaagtttctggattttggtcgagttagctgtgactttggtccagattgttgcagccatattttttctgattctaacaaaagatgaacgagatccagaactagatgtagctttgtttacatggatcatcttttatacttgtgcctctattgccactttgccttttgtatgttgccgtttatggcagtatatccaaaacgctagctcagagacaaggtataaactgtgtttctttttctttttcaggcattagagactgatatcctcaacaatggtttttattgatttgcagcaacgaggtgatggagtaccgtttggaaaattttcttgaatctttcttcgtgtccttgattgtggtgtctttatggcatattctaaccgagtcatcatcacgtcaagatactagtcgacacttctggtgcgcatctaactaaatttacaattatggctaaacaacataatttacctctctagaactaacaaatgtccttttccaggttatggctgggtctacttgctttcagttgcattcgatatgtgcttcctaatttccaatttaccgtacagttattcatgttgcctggggtgtcccttgttactgcacttgtggccgccatagtaacgatgattaattcgttactctcactctttttggtcatcattggactctttgcgttaaccttttcgtggatcattggaatgtgcggataaaaatgatggatcatgttgttttcttcaacaattgttgtaatactctctttctatttattaaataaagccaagtgtcattagcattaccgaatcctctattcctgaaatggccggcaaaactgaaactaaaggcttctctgtaccaatatctctgcagcaagataaacatttcagtatctgcatttcaacatgtacaactggtttgtctattgtaaaaggcctctttggccatcttgatgaagcgcttcatgttgagacagcatgtggcacgcccgacaattctttttaagagtgcacccataacatatatgttcttatgctatcaaacaacccacaaggaacctgaagatgataactacttgatagagatgatatgacttcaatcaatctcgatcgggttcggttaagggcactaatagataacctgctatatgggagtgtgaagaccattaattggtttttcacatatatatgactgaagaaatcagccgtaaccaaatattagtgtttttgcatcagttggggccttgggggtcaattatggagtggaataatacatgaaaacttgaatggtcgcatgcagagcagaggtagcctttaaattaaagcacacatcaaaatgtagtgcaatgttgcgaacttttattcaactaaacaatttaacactcgatctttgtgcgccaatacctctgcacaacaaacaatttaatctcatcaatatgatccgattttgaagaaccaccttcttcttcagtgacttctctggctaccttccattaactgtcgctgtcataacgacgtggaagttaacttaattgacttttaaaagattaatgatgctgtatattggtcttaaaatggcacaaaaggttccgtctaggctttgtgtttcactttaagtctataacttaaaaaaaaaaaactactaatttagcaccaaataatatcataaccattttattataaatgactataattaacgtagaattggaattggtcagttggtctcgagataataatttagctccaacgaatcggacatatctatgcttttatgtttttttttgggtataagaatttgttattaattcttataccaaaattatagatatgatattgttttattttaaaacaaaataaataatatatatatgaatggtttgatctgatattggttacggttaggatacaaattttaatcctgataccatagaggttttattagttcaattttctttccgtttgtttatgctcaacttcagattcgttgtcttgcaatattaagatatggttcaattattgagatatcatttcagttacgttcgcatccgatttgtttaaggtaattgtaatgttttaatgatcacttttatttgaattctgaaaattgaagttttaaagatattttttaaataatcgatttcaacaaaatagaaagaattgtaatacatattttttttatcataatatgaattttatatttaatagaaagtttcgattatgcatttaatttcatacaattgacttttcgactgttcattttttttaattttattttacaacgacttttagacacttcttagcacgaaagaactaaacgcaacatgtgctttgtaattaaacgtcgaatgaatatgaattatatttgacctaggattacgaatgatgtcgatctggagtaataatttagaaccgaacgacgacttcgaaatattacaattgacttatagaatagatctcgacgtagattggtcttaaaataataattaagcaccaaagaactggagatggctttatgtgctctgtgttttaaagcggattaataaggacttttaattcgattggggaaaatagaagaaagcagaagtgataaatggaggaccctttgttgactcagagtgagcacatcgtcgatgacgttacaatccatggcgattcttcttcaaatgaagagcacatcgtcgacgttacaaccaatggcaatccttcatcagctgatgagaaaagaccgcatgagggtgtccaatggagtgatatatttacatttaccactgtttgtattttggtcgagtttgttgtggctttagtccagattgttgccgccattgttgttctgactctggcaaaagatgaacaacctccacaaaaaatgtttcctacactgatcctcagttataccggttgctgtattgccacactccctattctaggtttgcgtttctggcattcttaccgaagtgttagcacagagacaaggtataaactataatttgtatgttaattatttgttttaaaggcattagaaaccgaaaccgatatagtggttttattgatttgcagaatctacgaggtggtggacattttgaaaaagatgcttgaatatttcttcgtgggttgggttgtggtgcttttatggcatcttatcaacaactcatcatctatagataatactacgcaacagttctggtgcgcatcagaagaaaattataactatatattcgtgtcccgaaaacagactaaattaacgaagtctctctaataataccaccctgcattttccttttgcaggttatgtatgactttccttgctatcagctgcattctacatgttcttcgtaatctcccctgtgcgggagtttgttttctgtatcctatgatactatatctttcccaatcgatagacttcgttggtgacattactgatgagataaatttgactacgtctataatcctattatgctttggaatctttgcctgcattatctgtggttgttgttccagatgcttatgcagataaaaagaagaatgatcatgtcgctttcttctttcttttgtttaaaatgttgtaatactctatttatttatcaaataaagccaagtgtcacgattgaatcctatatatcttcctgaaattgttggtataaaagaacaatttagcgccagcgaattggaaaggtctatgttttgtgtttcaaattcaataaacaaaagcgactttatataattggttttggtgtagttggtcttaaaataataatttcaccaaataatttgaaacagtcaatgctttgtgtttcattgtagaatatactataatttagcaccaagtagttcaatagttatttcattgtaggaataccataattgacttaggaatggtcttggcgtctaatttgaaaggtctatatatgctttgtgttgcaacgcagattttgattgaatccaagagaagtagaagaaaatcataagtgattaatggagagccctttgttgagcaacgatgatgagcacatcgtcgacatcgacatgacagccgatgactatgcttcattaatttatacgctagtatcaattccaattgcaattgctttgaactcgattgagtttgttatgaccttggtccagattgtcgtagccatactagttgtgaaaggaacaaaaggtgaatatccagaagcaacatggatcctcgtctatgcttatggtagtattgccaatctccctattctttgttggcgtttctggcagatccgtcatcctgtctcacacttaaggtatatatatataacttgtgtgttcttgtttttctttgttcacgcattagaacccgcaaaatggataatggtttttgattggtttgcagaatcaaccgagtcatgtttcgtttgaggacgatatttgaatgtttctttgcgggttggttcgtggtgttcttctgggtctttgtttgcagctcatcatctctagaccattctagtcaactcttctggtgcgcatcgaacaaagtttacaataatgtcccaaaaaaatacttatgctactctctctaatatatattcaacatttgtccatttgcaggttatgtgtggttttccttgttttcggttgcattcgatatgtgctccctatggtaatatgtgcagcgacgtgttgctgtgtgtttatgacgttatgttttaacgccgttaacacttgaggatcggagtgattaaactcgttgtgtcacttatccgtggattccttgcgagatacaaatggtggatcatgttgttatcttatttcctttgctcaaaagttgttgcaatgctctttgtttttctcttttttgaatgaaattgtttctttgtttgaaataaagccaagtgtcattactgaatcttctcgtcttgcatgtgtatcaaattacctcggcaagagaacattttaatcatctgcattttccacaagtcaacaactaattgcctttataaactgtcaagagaacgctagaactcattaatggagagactcaaaagggtttcataaaaaaataatatatatatatatattaattaatttaatattgtttaattatatatgtaaaatttatatatttttaaagaatcaaaccattaataatgtgaaacttgtttggagaggttctaaagaaattattaaaggtatatcatttgaaatacatgtatatataggattcagaaactgaaatcgataatggtttgattaatttgcaaaataaacgaggtgatggacaatttgaaaatatggttaccatgaaagtacagaattataaaaagcttttattcatattgttattattatatagattagtctttcgttatatgtttttcttctatctttgattaacggtagtttttttttttggtggataattttaatggtacgtgttgatccacctgcttgagaaaatatggagagaaagaagatggaaaaacgaggaaactactcgcttgtattttcattgtaacggatgacaatataattgactaataattgatcttggtgtaggtcaaaaaaaaaacaaaacaatttagctctgaaagtctactcatcgtgttcaactgttcattgtaaaagactacatgtaactgatcccaaaaacaaaaagactacatgtaattgacgtattgttggtgttgattcggctaaaaaataataatttagttggaaatgtctatttttgtattttattgtaaaagactataatttagttgttattttacagtataatatacaattggttgaggaatcactatttgttaaattgtaatgtacctttttttttagtattatagatgtgttagcattcagaatcaacctcatataatacatattcacatcgactagtgtacaagtgaattttagaatagatcttgacttagattggtcttaaaataataatttagcaccacagtattagctagagagccatgtgatttgtatttcaacgctggtttagatgaactattgattagattggacaaaatagaagaaagcaaaaaagtgatcaatggagagccctttgttgaccaagagtgagcacaacgtcgaagacgttacagtccatggcgatccttcctcaaatgaagagcacatagtcgacattacaaccaatggagattcttcaccagctgatgagcacatcgtggacattacaatcaatggcgattcgtcatcagctgaagagcaaactccacatgaggcttctcaatggagttgttcatttataaacggaattgtctggattttggtcgagttagctgtgactttgtcacagattgttgcagccacattttttctgactctgacaaaagatgaacagcatccagaactaaatcatgtacctttgttaatatggatcatctgctatacttgtgcctctattgccactgtacctattgtatgttgccgtttatggcaatatatccgaaccgctagatcagggacatggtacaaactgtgtttctttttttttctttttctttcaggctttaggactgatatcatcaataatggtttttattgatttgcagttacgagttgatcggtttggaaaattttcttgaaacttgcttcgtctgtttggttgtgatgtttttgttgggttttttaacggagttatcatcacgtgatcctagtactagtcaacacttctggtacgcatcgaactaaatttcaaattatgtctaaacagcgaagttcacctctctgaaactaaccaatgtccttttccaggttatggctggctctaattgctttcagttgcattcgatatctgcttcctaatctcacatgtgtcaaagagtgcttcgtgtggcctgtgcttttccttgttaaacaactttgggaaggcataatagcaatgattgatgcgttaactgcactcattgggctcatcattgcaatcattgggtacatcttatttttgatcctttcaatctttatgtacatctgcggataaaaatgatgcatggatcatgtcgttctcttcaacaattgttgtaatactctctttctatttatcaaataaagtcaagtgtcattagcattactgaatcctctattcctgaaatcttcagcaaaactgaaagatctctggcaaataaacattttaagtgtcagcattaaacaatgcggctttgtcttttgtaaaagggcttcttttgtcatcctgaaaaagcgcttcatgttgagaaaacatgcgccatgcccaacaattcttttgagatcgttgagaaaacatgtgctagggttggacataaaacctgaaatccaaaatccgatctgacatcgatccaaaaaatagttataaaattccaacgaaaaaataaattattctatctaaattatctgatctgaatccgatacgaaccgaaaaccgaaaagatatataaaacctcaaaataaaattatatatcaaaaattattagttatatttagttagagttttatattcaagattactaaataacaaaattatccaaaataacctagatatcctaaatttttttagttttatttattaaaattatacatttttttgtaaagagtaaccaaatttttcgtaaaactaaaacaaattttttacaaaattgaactgccggattatttttttttgcaaatgttctcatttgaaggaagaatttgagagaaaaataaaacactagttaacaattgaaacttaagaccggtcttaaaataataattaaagggaaacactagtttaatattgaaactttaggccggtctcaaaataataatttagcacgaaataattaaggcaacatgtgctttgcacttcaacgcggaatcatatgaattatacattgacttaggattattattgacgtcgattcggcctttaaattataatttagaaccaaccataattataatatcactacaattggttagtatcaaacaatttaacaactgttaaatatcactgcaattgacttttagaatagatcatgataaagatcggtctttaaataataatttagcaccaaataattagagaggctatgatttgtattttaaatcggttatttatggactttaatttcgagtgggaaaatagaagaaagcaaaagtgatcaatggaggggcctttgttgactaagaatgagcacatcctcgacgacgttacaataatccatggcgattcttcctcaaacgaagagcacatcgtcaacattacaaccaatgtcgattcttcatcagatgatgagcaaacacaggatgattgtggtgatcatttgagacgtataatagctctttttgtggatgaagggtgtgatggatttacatctagtcatgtttgggttatggtcgagtttgttttgactttgctccaggttgttgcagccattgctgtcctgactctgacaaaagatgaaacagatccacagaaagtgtttcgtacactgatcatctgttataccggtggctgtattgtcgtgctccttattctaggtttggatttctgggattattgcggaaggtataaactataatttgtttattctttgtttttaaggcattagaaaccgaaatcgatagataacagtttcttattgatttgcagattctacgaggtgatggagaatttgaaaaagatgcttgactatttcttcgtgggttgggttgtggtgttttcatggcatcttataaacaactcatcatctccagataatgctacacaacagtactggtgcgcaacaatactaaattttctaactatttagtatgtctcgaaaacagagtaaatctctctaatgatgataatccaccatgcattttcctgttgcaggttatgtatggctttccttgttgtcagttgcattctacatgtgcttcctaatctcccctgcgcggcggcttgttttctatatcctatgatacttcgtcttacccagtctatagacttctttgatgacattactgaaaagatagaggacattaactggttaatctttgtatacttttttggaatcttctcctgcattatctgttgcatttttacttgttgcagcagattatgtagataaaatgaagaatggatcatgtcgtttctcctttcttttgtttaacaatgttgtaatactcttatctatgtatcaaatataaagtcatgactcatgactgaatcctctcttcctgaaatcgttggcctgaaagacacgatgcttacgtcccaattacctctgcatggacgagcttgtgaaccgcatgtacaagtatccattcctttgttggtcctagagctgatccattcctgcatacgaattaataatccaattcaaagagagagtagtagaccgtgagttcaagtcttctgaagcagcatcacgtttgaaccacgttatcgatcggttcagtcttcaactaaagtgaagtcttaggtgtatgaaatgtaactaattagtcttccaacaacacttaaaactcataagagcaaaacttcttttaggaataagtaaaacagagcagaagaagcagtcaagttaatcgggattaccaagaaccaatggtcaacctccaaattcttcaaatttcctggaaaaacacataagggggaaagcaaaacaccaaatataaacacattcctcgagcgcttaactacgtaacaacaatattatcaatattgcatgattacaactctaaatctctatatattttgatgatctataattttttgctttgataaaataaagttatgatctttgatttaaaagtataaaaagatttggaataggagaaaaaaaaaaagcaaaatatagatataactgaaattcatagttgcaaaaggggaagtggagaactggagttcgtgggtgaacggttaagaaaggttggctggtttgacattattggtccatcatgcaacaataatatattaagagtttagaggataagaatttcaacaagtggacgtgccggagtggttatcgggcatgactagaaatcatgtgggctttgcccgcgcaggttcgaatcctgccgttcacgttttttgtttttattttaccttatcccagttttgtcctttttagtttcctcaatgttttcaatcccgcctatattttaccctagatttttaattaattgataccgaatcccgctttctgaaatcattttcaattttcaaaactcatctcctctctctctttcactctatctccttcgatctctctcggtgtcagtgaatttaactgaaatcccatcgccggggaattttccggtgatttagatggctgatgtgagccggagttcaagtttatataccgaggaggatccccttcaagcttactcagggctttcgttgtttcctcgcacactaaaatccttgtcgaatcctcttcctccttcttatcaatcagaagatctacagcagactcatactctccttcaatctatggtaagctcttgatctgcttaaaccttcgattttgatgcattagctagggtttggtttcctcagtgagtaattaattacggagacgattcgagtttgtgattttgacggttacgaaatcaatttcaaatctggctgatttaatcgtatccgtgctttgtttcttctcatccgcttctgggtgttcccaaatgaccaagatggatgctttattttttgggtttcttcaattaggacgaaaagtctgtggtaaactgcaaatacttagctgttactttgaaattttaagcagcatgattatactggataactgtaaggtttaggcgttgtgtctcaaggaggcacaatatctccatgtttgctcagtatatagcctgctaatgtacattggcttcttcctattcttttgggttaatgcttttcttagggatttagttgtgaagaattgcagtacgagagtttagtaaacaaactgcagatttttacattattctttgtcgcttgtgtatattttttctttactgacatatcaacttcagtatctcaaactaaataattgtcaaattcttggcttctatcttacagccttttgaaattcaaagtgagcatcaggagcaggcaaaagctatcttagaagatgtggatgtcgatgtccagctgaaccctattccaaataaacgagaaagaagaccgggattagaccgtaagcgaaaaagcttttctcttcaccttacgacaaggtaaagatcatagccactgatccattgattcagtataacaaatttctttatttgttactttatctgattcctttaccaagttagttgaagcctctatcaaatattcttgttgcagtcaaccacctccagttgcaccaagctttgatcctagtaaatatccaagatctgaggatttctttgctgcgtatgataaatttgaacgtgagttatagaagtatcttttctgatgttcatagccttccacgtttattatataactgtcattagctggatttgaaacagttgccaatcgagaatggcagaaacagactggctccagtgtaatagatatacaagagaacccgccatcaaggcgccctcgcagaccaggaattccagggtatgtactatgagcaactctgatagagcatgtttaagagttgttccatttgcatattttgctttctgtttcccttgatggttacatacttacattttcaatttccaggaggaaacgtcgtccattcaaggaaagttttacggatagttatttcactgatgttatcaacctggaagcttcagaaaaggaaatccccattgcttctgaacaaagcttagagagtgccacagctgcacatgttacgactgtggacagggaagtagatggtgagtgagcacttgttagatcattgtcgctaccattttgttaaatcatgctaccatctgatagggtcagacactgtgttttgcagattcaaccgtagacacggacaaagacttaaacaatgtgttgaaagatttgcttgcttgcagtcgagaggagcttgagggagatggtgccatcaagcttttggaggagcgcttgcaaatcaagtcctttaatatagaaaaattctctatccctgagtttcaagatgttcgaaaaatgaacttgaaggcatctggaagtaacccaccaaaccgaaagagtctgtcagatatacagaatattctgaaaggaactaacagagttgcggttcgaaaaaatagccactcgccatcccctcagacgataaaacatttttcatcaccaaatccaccagtggatcagttttcatttcctgacatccataatttgcttccaggagatcaacagcctagtgaggttaatgtacaacctatagcaaaagatatacctaatacatccccaactaatgtaggtactgtagacgttgctagccctttcaacgactcagtggtgaagaggtccggtgaagatgattctcatattcattctggcatccatagatctcatttaagtcgagatgggaatccagatatttgtgtgatggatagcatttcaaaccgaagttcagccatgctacagaaaaatgtagatatgcgaacaaaaggaaaagaggtagatgtgcccatgagtgaaagtggggcaaatagaaacactggcgacagggaaaatgatgctgaaatcaatgaagaaactgataatttagaaaggctggttagtttctccttcactgtacgggactttgtactaacatatttggatctcttgttgattacatctcttgtgaatttgtttgttatataggcggaatgtgcatctaaagaggttacaagaccatttactgtagaagaggatagcatcccgtatcagcaaggtattaaaactttttgtacatgcatgttatagcaagatcttaaaaagtatagtatatctcctaacttaacttgtccattagatgcttactagttgctaccattaacattttcagtcaccttaaaattgtggcacgaaggttttctttatgccgttatgttgcctacaggtgcatcctcaaaatctccaaacagagctccagaacaatacaacacaatgggtggatcccttgaacatgcagagcacaatcagggactacatgaagaggaaaatgtcaacacgggctccgcttctggacttcaagtagaaaatgctccggttagttcctcatcattgtctcttcacctctgtagagtcttgataattaagtcaaggccaattcatcttcatgttgtttcaattgttagactcggttcattttttctctatctttatccttcgctaaaggtacttttaattgcagtagtgtgctggatccgtatgtttaaatccatgataaaactaacaatctgtgtttgtgtaagggtgttagttccgcttaggctactctaactatgagcttgcttaacaaaatgaattcgagagttcttgattaacttattttcagcaggaggttcacaaatattcacacaaacaaacaaataaacgaagaaagagaggatcttctgatagcaatgtgaaaaagcgaagtaagactgtgcatggtgagactggaggggacaagcaaatgaaaacattaccacatgagagtagagcgaagaagcaaaccaaaggaaaatccaacgagagagaagagaagaagccgaagaaaactcttacgcatgaggggaaactattctcttgcaggaaaagccttgctggtacagaaacttgccaataaatactaaattccattactcgttcttcagagctgtttcgtagaaatattaaacctgacatgtgttctttttttttttgcctttgtcaaagctgctggtactaaaattgaaggtggtgtcagacgaagtacaaggattaagtcgagaccgctcgaatactggagaggtgaaagattcttgtacggacgcatccatgagagtaagtcacatattcgttttacgacatcgatttcaatacggatgtttttcaattcataatttatctactatttccataggtttgactactgttatcggcataaagtatgcatcccctggagaaggtaaaagagattcgcgcgcatctaaggtgaaatcattcgtctccgatgagtacaaaaagctggttgattttgccgccttgcattgatatgaagaatgataagcctaggaaggaaatgatcaaccatcctcttgtgatcattattgatagtatcttgtgtcaatgaccttcacttaggtccaaacttgtcactgtctttctttaaaactgcaacacttttaagactttgcaaatgtaacggaggttttcaactttcagtttagtctcttccatgagactttgtcaacttgcatttgtcactttagtctttgcctctttgatatttctttagggcacttgttgttatcacctttctcgcttaaatgctgcctttgactattttattataaaattataatctcttaataaaagtcaaatataatttatttagggttgctactttgatttaaactgaattaaccagatcaaactcaaatcgtgggtcattgtcgaattaaagtatctctttagaagaaaaacggtatacaattttcttgattctttttttcgccattttcttgataattaactctatgatacaatgattataacaatagtttttaaatacttttttcttcataagtttccaaaacagaaacgaaatgtccactcttaacttagctgtttagactttttcatcacttgaactcgatattcgtaccccctcctcgatccacttttcttggatcgtgtcgtggaaatgaaagttgaatagcaatatcgctattgatacatatggtcctaatcttttaaaagaagtagcaacttgattttggtacaaacagtttactttttaggtaaaatgccaatattggcaagaacccacaaatttggaagagcacaattaaacctgacgttattacttcttttgatacgcttcaattttctttgcgaataaaagtatatgaatttcgactttgagtaaaatccgcctctgtctttagtgacctttctcgaattttgtcgcccgctttttacgctttacttcaggacaagcttacagaaacaaggagatacatacaagtaaaaacaaacaaagactcgagactcaagagtcaagccttttattattatctagttttgaaaatcaaattactaatttatctccgctatagttttttttgttaaacatgtaaagaaccgctatagttttactggtaaacaaaagacaaataatacacctcagcaaattggataacgatcatacaagttgatgaaaaaccacgggctcgttacaacatttgattagacgtcgaccgtacaaaacaagaatagagtccttcttttgtcacgtagtaaatatataaatgttactatgtcttaatctgaccaaagatatatttgacaagttcaaaataaaaccgattgtatggatttggcaaatggcctattctagatcttaatacgtaattcagtatcattcgtagtacccagtcgagttaaaatactactcgctatcgttcttacatcatcaataaaaatattgatctgattcatttggtgtttcataataactcgacttttttttgttgtacttgtttattttcttatctatgtacgtatgattgagtttttctatgtatgtttattgcgttgacctaaagaatcagccgactatgcttgcctttgagatattgacaccttatcgtttgttattttccaattattgtcaccagacgccgtgtcgtttttccaacgattaccagctagaatgccgtgccatttttgctttcctttgtttgatctgactactccaagagttatatgcctacatgcttacaaatcaaaatatatgaaaagtaatgggaattgtgaaactgttgcgcgacttgtgacttgtgagtctcaatggtttggtttagtggtgaaaaacgttttttaggctataccaaattttcaagattggtttagaaatgggaatttggagagtggacaatccaatttgttttcctatattatttcatttgaatggaaataaagatatcagttgcgtaaatgacacgatctggatttggggatgttgtggaccctagaacgagtccaagttgcatgggacatgcagtttcccaaactttgtaatagtatcatttcatgttttttgtttgtcattttcttatcaaaaaataaaaagtttatggttagaaccatgttttgactcctaccatagagagtaaaggatggcttaataaacccgcgcatggtacgttatgcatgctcaaaaaatgtttggcaaaagagatgatcggtccgaaaaatgagattgtcgacattcggataagggcctaatggtagatgttttctgaaatctacttagggagtgacgtgattcacttgtctttagagctatttatgtcgattgtaatgtagacataccgtttcactcgttggtctcatctagtattgattcttttaacatgtcatttaactgccataggttgattggcaaccagaaaaattatcttcgtatatagtatatttaagtcaactttacagaaactattataatttcggaggggacaaacttaggattggatacgtcattcttgttaatataatacatatacgatcattaatattttgctatgataatattgtatttgtatgaaactaacaagctt

SEQ ID NO: 7 - DNA, 84974 bp, Arabidopsis thaliana
gaattccaatctcactagtcattacaactaaaatacaattttatgaactttcaaaatgctgcacatccgagattctaaagtaatgtaaaatatatagtaaactcgaatttcctaatcgttagaaaatactttaagagcttttgatagatgatctaatttttgcttggacagtcaagtggttggaaataatatcattgcacttaatcattagaatttgcaagaaaaaaagagctaatggaccaaatttctcttaaagtaaatatgataatggtgacaattgttgactttgtttggatgtttgtgatgggaatgttcaaatatccaaaaacacatgcacaaagcaaaaaaatacaccacattgacgtgacaagagcattaagacaaaactacgagacacgaaacaaaaatgatgtgtttggtttttagtattttgccaatcttaaagtccctatatatgtcactctcttctcttttcctttccaacaccaaagtttaaaacgattggaccattcgttgacttaaaatattagagggtgtgcttgcttttgtgtgtgatttcttctttctttcgccgtgtctttttttcttcccatttgatcgactaaaggaagataaggaaaaatcataagatattatgtcttaccttcaataacgctgaaataataatgtcaagatgatgacaacatacgaagaattaataaatctaaatggtcaaacaaacaccgattccgttaggtaaaaaaagtaatgatgtcaagatgatgacaacatacaaagaatcaataaatctgacttgtacaaacaccgattccgttattaaaaactcacattatattttatttcaattgatatatattcttataaaacgaaggaataccaaaaatgtactctttcgacaaaaaaattgaaattgcgcagaatggtcttgtataataaaacaaaacgaccaagacattttacatgttctccgattataggtgcacgatattgactaactctctagttgcctgagtaaaactaattgtagtatgtgttattttttttggtttacattgcaagttgtttctgtaagttgagatcatgactaactttcattttggtacatatacactgggaatagtcgagtctaagattcaagaatcaggacaacaaatgaattaactctctagaccccagcagaaactgatctttcatgattagtataattaaggatagtctattgctcactaatagtatctagatccttcttccaaatggagatgaactgattagcttcaagacaaatgaaaggacttacccttcacctagttatttggttgaatacatacagtttccattatgaatctctaaccttttacattgtccttcttcacttggttgcgcaacggaattcagaattagcttgaagatggtaaaactcaaaattggttagatcacaaattcccttacaaatatccaaaggaatctatactcttcattctggtgctaagtatccattctctcaaagatgatattgttggagtaagctcaaagacttgaggaagaagaagaaagtctaaaccaagactaaaccgagttatggctaaaccgagatatggtttaatgtgaagataagattagtgagatttaggagatatctaaatcatgtaatcctattaggtttaggattagaatcttatataaaggacatgttggttgtaacatagcctttgagagagttgtagaatacattgagagtttaggttttgaggaattttcctagactaataaaaagagagtcattcttttgattttgtgttcttaatctcttcattgaaatctatatttggtatcagagcggtttcttaaatcaagagaagaaaacatttttgaatcaaacatgggagacttggttacgatgaaaccaacagagaatggaccctcatccatcacatgtcctatgctgaactcgaacaactacacggtttgggcaatacgcatgcagatcacccttggaatctataaggtatgggaaacaatagatcctggttctgatgatttcgataagaatctcatggctaggggtttactctttcaatccatacccgaagccttaacacttcagattgggaacctgcaaaccgcaaaagaagtatgggactcaatcaagactagaaacgtaggtgcagaaagggttaaagaggctagattacaaaccctaatggcagaatttgagaaaattaagatgaaagaaacagagaaaatagatgattttgctggaaaattgtctgaaatatctacaaaatctgcagcccttggagttaacattgaagttccaaaacttgttaagaagttccttaatagtctaccaagaaagaaatacatccatattatcgcctctttagaacaagttcttgatcttaataacacatcttttgaggatattattggacgtatgaaagtatacgaggatcgtgtctgtgatgacgatgaacctcaagaagatcaaacaaagatgatgtatgcaaattcagatacaaacaatgactattatcaaggagattcacgtggtagaggacgtggtggcagaggaaattacagaggaagaggtcgtggacgaaacgggggaagagacacctctcaaataatgtgttttcgatgtgacaagcttggtcactatgcctctcaatgcccagacagactacttaaactgcaagaagctcaagagaatgcagtgaatgataacaaagatacacaaaacgcagacacactcatgatgcacgaggttgtgtacttaaatgaaaagaactgtgtgcctagcaagtttgaaacaaacatagaaggagatgaatgttggtaccttgataatggagcaagtaaccacatgactggtgataagagatactttgacaatcttaatgagtcaattacaggaaaagtaagatttggagatgattcaagaattgatataaaaggaaaagtacaatagcttttacagatatggatgggaagtcaaggatcatgaatgatgtttattacatacctgacttgaagagcaacataatcagtcttggacaagctacagaatcaggctgtgatataagaatgaaaggacaacacttgataatgcttgatcaatatggaaaacttcttgtgaaagctaagagatcaaagaatcgattgtacaaaatcaggatgggattgagagatgaagccgtttgtacttatctaccataagcgaatcaaatctgtggcatgcaagaatgggtcatactaactttgctacactaaaatctatgattgacaaagaattagtacaaggagttccagatatcaaagttgagaaagaaatctgcagttcatgcttacttggaaagcagactaggaaaatgttcccattagaagctactttcagagcaagtaagaaacttgaattgatccatggagacctttgtgtaccaataacaccgagtactaaagctggaaacaagtacatctttgcacttattgatgatttttttcgttatatgtggacaattcttctcaaggaaaaagcagatgcatttcagaaattctgcaatttcaaaagtctggttgaaaaagaatcaagtactagagtgcaaacattcagaacagacagaggaggagaatttgtgtcacatgaatttaactcattctgtgagaaatcaggtattacaaggcatcttacagctccttatactccacagcaaaatggagtagttgaaagaagaaataggactatgatggaaatgactaggagtatcttgaagcatatgcatctacctaactatctatggggagaagctatcagacacactacttatcttctcaatagaatcataacaaggtcactcaaggacaagactccttatgaatgctttcgagataggagaccaacagttgaacacattagaatctttgggtgcattgcatatgcaaagatagacaaacagcaactgagaaagctagacgacagatcaaggatacttattcacttaggaacagaacctggatctaaagcatatcgactgtttgatccgcaaacacaaaaggtagtagtcagtagagatgtggtctttgatgaaggaaaaggttgggattggaagtacagtaacacaggaaaggatggggatggaagttttgatataacattccataactttggaaatcatggacttcaagattatgaagaaatcagtcaatcagaacatgctaacatagaacagaataagcagaatcatgatgagacagaagaaatagagcatgaggtagagaatgaaacagaatatgaagcaaaagaagaagaggaacatgaaactgcagaaaatactgcagagaacactaactctccaagtcctgtgttaagaagaacacaaagacagatcaataaacctaaatatcttgaagattatgttctaatggctaagaagaaggagaattcttgttactaactctaaatgatgaaccaagaaactatgatgaagcaaggggacataagaagtgggtgcaggcatgtgaagaagaaataaactccatcgaaaagctaaaacgtgggaactagttgagctaccaattggcgccaaaccaataggccttaaatgggtttttaaactcaaaaggaattcagatggaagtattaacaaacataaagctcgacttgttgccaaagggtatgtacaacaatatggagttgactttgaagaagtctttgccccagtagcacgaattgaaactatcagacttcttattgaccttgctgcatcacacggatgggagattcatcacttagatgtcaaaacagcctttttgcatggtgaactcaaagaaacagtttatgtctgtcagctagagggattcgagaaacagggaagagaagagaaagtgtatagactcaacaaagccttgtatggactgagacaagcaccaagggcatggaataacaaactgaataatattctcatggaacttggatataacaagtgttcaaaggagccatctgtgtatcgaaaacaggttagcaaccatgttatgatagtagctgtatacgttgatgatttattcgtcacaggaacaagcttggaactcattctcaaattcaagaaagaaatgtcatccaaatttgagatgagtgaccttggtctactatcatactatctcggtatagaagtgattcaacacagtaagggcataactttgaatcaaagtcgttatgcaatcaagattctggaagaaactggaatgaaagactgtaacttagtccatacaccaatggatccaagctacaagccatcaaaagttgaaactgaaaaggaagtagatgcaacagtttacagaaggaatataggctgccttagatatctgcttcatacaagaccagatttgtcatatagtgtaggagtcctgagcagatatatgcagagtccaagagaatcacacgctgcagcaatgaaacactgtctccgatatctgaaaggaacaatttcacttggtttactctacaacagatgtgataaagcaaagttaaatggatatagtgacagtagtcataacgttgatccagatgatggaagaagtacaacaggaaatgtattctatctaggtgagagtccaatatcatggtggtcaaagaaacatgatactgtggcaatgtcatcctgtgaagctgagtttatggctggaacagaagcggcaaaacaagccatttggcttcaggacttgttaagtgaaatcacaggaaactcaagtgagaaagtcaccatattcattgacaacaaatcagcaatagccctcacaaagaatccagtgtttcatggcagaagtaaacatatcaatagacgttaccactttataagggaatgcgtctagaatgatcaaatagaggttacacatgttcccggtgaagaacagaaggctgatattctaaccaaagctcttgaaaggattaagttcaaagagatgcgagatctcatcggtgtaagagatatggagaaagaagactttgagcttaaaggagagattgttggagtaagctcaaagacttgaagaagaagaaagtctaaaccaagactaaaccgaattatggctaaaccgagatatggtttaatgtgaagataagattagtgagatttaggagatatctaaatcatgtaatcctattaggtttaggattagaatcttatataaaggacatgttggttgtaacatagcctttgagagagctgtagaatacattgagagtttaggttttgaggaattttcctagactaataaaaagagattcattcttttgattttgtgttcttaatctcttcattgaaatctatagatatggtgttgtcaagaatctaaaagctcgtgtctttattaagcaaagggggtggttacagttcttacaacagaagtatatagtttgtgaccggatcttaggaactagaaacgatactaatcattttacttgtcagaacttttgttaggagtaacagcgtcaacaatggcttccatttcttccatcatacgcccgagaacaccaggtcctttaacatcatcaacccttgtcttctcatcaatgtcttcacttcttccatgagtctctttcccatgaaacatcgattccttctcttcttttctgcttccaatcacatttgtcttcacctctaaaaaaacaacaaaaaccaaaacccagaaacgatcaatgagattaaaacaaaagagttgtcttttcgcccaaattaaccatctcctagataaacctaaataacccaaaaggtccctgattcgattacatatagaaaccctaaattcgataaatcagggggaatctctaggaggaattagacaaattaataagtgatgaaactttattaaaaaaaagggcgcaaaattcgtgaaattgatcaaatcggagaatttgtcttaccagaaagagagctttgttttggttccgccattaatgatcttccttctttgatcttgtttttgagttcttcaaatgtagacgagtttgtttagtttggtctgagcttgaaatagtgtgtacaaatgtgaaccatccaatgtaataataacagattaacgagtagatcgaaccgactcgggtattgtgcaaacccgacactaaaatggattgagttgcccagtctaataacttatgggttaaaaattgagaatacaaaagtagaggggttctcagggaatttctggaacaaataatataaaagagaaaacctaaagtttaaccgttattttaagaaaattgctttcgtaccccaacaatttcaaaattcaaaagttctctctctgcttcttctttttaacacttgcgaacttttgtcaacatcaatctcaatcaacacaaccaaattcccagaaacaatctttttgcttttcccacatttcaagctccaaagcttcgaatttttgaatcaatagcttccgaagttgtgatttttgtagaattcgaaaaccaaggtctcgatttgagaagatgggtgggtcaggaaattggattagatcactgatatctaacagaaaacccgtaaatgatcaggtaagctaaaatgcctcgatctttgttgtttcttcctactttaccaaacattgatctctctgttaattgtgcagcaggagaagttaagtgataagagcagcaagaagaaatggaagctgtggaggatttcatcggagagcttagcatcttcttctttcaagagccgaggaagctatgcagcttcttcgttaggttcagagctaccgtctttctcggctgacgaggcttttactacggccatggcagcactcattcgagctcctcctagggattttttgatggttaagagagaatgggcttcaacaagaatccaggctgcttttcgtgctttcctcgtatgtgaatcttcactaatctctagttacatgagctattctagttgtggtttgatcattagtactcacgggtcttcttgttcattgtgttgtctgcgtcttttcttttttcaggcaagacaggcgtttagagctctgaaggctgtcgtgagaattcaggccatttttcgtggcagacaagttaggaaacaagctgccgttacactcaggtgtatgcaagctcttgttcgtgttcagtctcgtgtaagagctcatcgtagagcgccttctgactcgcttgagctaaaagatcctgttaagcagaccgaggtatatattaatctattgagtaaagtctattgaacattactttaaagtatgtgaatctggttgatgtttttacagaagggttggtgtggtagccccagaagtataaaagaagtgaaaacgaagttacagatgaagcaagaaggggctattaagagggagagagctatggtttatgcgctcacacatcaggttggtcaatgtgttttcagaacagaaattcagagtgttgtcgctaattgtaataatgtctcatgagttgttttggcagtcgaggacgtgtccaagtccaagcggaagagcgattacgcatcatggtttgcgcaagagcagtcctggttggaactggtatgatgatgttgggacattttcaaggaaaagtagtgagagcagtgtgttatctgaatatgagactgtaacagtcaggaagaacaatctttcttcaactagagttcttgccagacctcctcttcttcttcctccggtttcgtctggcatgagttatgattctttacacgatgaaacatcaacatcatcgacatctcaatcaccagttgcattctccagcagtgttcttgatggtggtgggtactatcgaaagccgagctacatgagcctgacacaatctactcaagccaagcagagacaatcaggattatcttgcaacggagatgcaagacgcagtgctggttcagaccagtgtactgatctataccctccggggaatgtctgggccaagagccagcgaagctaaaagagcaagccatgatgattcttgtcaagccatattcaacagcctgttggtttatcttttgtcttgtttcaggaacggttcctgtgaaacgtatacacgaactatagatacagaaacagcttctgtgtaccgtttacatatataagaatattgatgagttatttgagcttgtaatttggctacttaggccacttctcaataacttgtaatcagagtcgatttcgtttctccttgtttgtttaaccttccatatgaatgctagtattgtttataataagatatcaagaattaaaggcagacttgtaaacaaaaatcaaaaacttagcttaccaaaaagggtaaataggaactcgtacttccatttgtatctcaaaaaagtaaaattgttccaaaacttatattgtgagagaaaacaacaaaacggattcagatacaacatagtaaatcttactcaggtgaaaccatccacgactatgatggtggagatggatgtatggagatgacttatcagctaaaagcttattgcttaagaggagcttttttctctctgtctgcaattctagcaggggcgtttgagtgtgacttgaaccggcctcttcctccttcgtctctctcctaaagattccagaatcagcagtacaaagttagatagtctcatcaaggaacagagatcataatcatagatttgaatgagagtatgtcaatggaaagattttcgttttatgtacctttttcttgacgatctgaacaacatcttcgtcttcaagatgttgagaaagaccacaattctgtggattgtgccttgtgcttgtgccccaaacgagtgcatacttcatatccttcaccagagtcctgtggacgtggttacagaagtcttccactgtgcagccacctcgatcctgatgaatcacacgtactcaaagatgaatatcacaggtatggaagagtttcaagggttatcttgcaaagtgaaagaatacttacagatgagaggacaaaaggctcatcgaaatctggttgctggccttgcggcttcgagtaaactctcacaaggcccatttcgtcccacatccttgcaagtagtctgtctaagttaagctgtttcaagcagcagtaaaatatcaataaatttggcaaatatcaaactcggaatgaaaacggaaacctagaacagcaacaaattggttttttagcattttctatccttgcaggtctaaaaagactactcgttacaaaacttaccttaagattgcagctaataacaatggaatttggctgccgggatagtctatccacatcatcaattccaacaacatctattttgttgtagacataaacacacttaatatacttgcggttgccttcaatgacatcaataaagtcatccactgtggcattctcacgaaatagcacctgcaatactcaccaccacagtaaaaactaccataagaaagctttcaatatactcacaaatgtctgatgattataaaattctactcataacacttagacaagacaagaataaagcaggaaccacgtacctcagcattgtgaatcttgtattcatgcaggatttgataacagagcttctcatcaatgtgagtcaagggtgctgtagtgttgaaagagattccaccagtctttttctttttaaagtatatctgttgggcagaacaaaccaaatatacataaacaaattccacacgaacccaagtttctgaatggagcataacaagtaaacctgaaggagtttagacttcagcgtattacatgacacatctataatttgatactgctgataagacaagctttacctgcggaggagttttgtttagtcgcaagcccactgcctcaagttccttagtcaatatttgcctgtggccttcgctctaacaaatttaaacaagcaaatacaaagcttaataaacaagtagagcatgacaaccatataccaattcacgtggacatataaaccgtaactcacttttgaggcatcaagaaccatcaatacaaggtcggaagactttgcaacagcaataacctgagaaataagcagtcataacgaaagttcatatcctcttgattatctttttctgataggcgaacttgggcatccaaaaagaaatcagataaccaacaagaaaagaaagcaattggatttcaacctgccttcctcgcccctttccttccgaagcaccttcaataatcccaggaagatcgagaagctgaatctttgtgtcgttgtagtgaattacaccagggatgcatgtaagtgttgtaaattcatatgaggctgcttcagaatgtgttccagttaacatagtcaaaagcgtggactttccgacactgcaaagtacaaccatttccatcagtttccctaaacttatgccagcaacttcttaaggagcaacataattttataaaacaggaaataatttgtaattggatcttgtgagtataagtatctatgcctttacctaggaaatcctataagtgcaacacgtccatgaccatacttggtaacttcaaaaccttccccgcctccactagcaccctgttaaaggaattcggaagacaattacaaactgaaagcagtaatgaaaaatgtttgaaattctacttcagatcaaagcagcaggaaaatcttaaatagattatagccctaaatagataagctaaggtgacgaaaacagtagttactcatcgtctatcttagtagtaaacatacagcaacacaccagcaaggaaaactataaaccgagtaagaaaggaaacaaacaagcttcaagaatcactcagctatatagaaatataagcgcataggctaatggtttagtattttataaagagcttgcattacttttggaggctccaacagttgtgtcctgagttttgcaatctttgccttgagctgaccaagatgatactctgttcacaaacagaacattatcaattagcaaatgtaagatcagaagaaggggaccagaaacttgtcatagtgattatttggaaaattggcttaagtgtctataatgtgttgtaaaggctcgcaatctgtttaattcgtaatgtttgttatctaatttcgtctactaaggatgagcaacatgaaactgataagtcccatgcctataactgaatgttctctatgtaaaaagagaacctgtagctttattcttctgagtccgagccatctcggcctcgatttctttaatcctttcgatgatccccattgtgcttcacttgtttttgctactatctgtggagagagagtaaaggacaaagattgttacttatcaatagactcagaatcagagagttcatagataataacataaaaattttatcaataactcaaacaaaaaacttcagattgctaataaaagagctaaaatcaaacccgaagaatataaagctttaagattcatatttagcttaaatttatcaaaccatatatatccactcagtaaacaaatttgaatgccaaaaggcgaaagctgagctctttacgtctaatcgaacaaaaaaacgtatgtcgagacatcgattccaaacatgaattccattagacgagctcgaaatgcaggaatcatttaaatataactgatttaacaataaatcaaaatcttagcatgaaaaagtaggaatatttgatgtgcgactcacagtggaattggtgaagggcgatctccggcgaagagagggagatagatggagagaggagagagagcacgcctgtaatagggcgcccaaaaaggattacagtcccatttactgtatcttaaagcccaaaggcctttttccatctcgatgcttattattatcttgttttcgtgaaacgctgcgtttaacaaaagggtatgaaacgctgcgtttcatttatgtgaaagtgaattcttagtagtatgtgtcttgttgtgcgaatttgataatctggtttggtttggttcagtaatatggagagaagtgttcatatcatctagaaatttccaaacaccagtcagtttacctttagactttagtgattctgtttaaatcatgaacctaccttaaaactacaaactcgaaaagtaaaaacagagaagttaacctcacagaaaactacaaatttatacgagagtagaaacgctacaagaaaccgtttcttgatctcgatctcttcaccactctagccttgctcactacacgtgaaatcggtgattgtttttgagcaagctctcttacctgcaacataatgtgagtaggaatggccatcgacccgtgtttcttcagacctccttcctgcaaatacacaaaccattcaccactttaatcttaaacccaagttattggttaattggttaaaacatgtggcaagtgctaaccattctgtttgaagaacttgctttttgtagatttcgccatttgtcctatcacaagagacacttgtgattaaacaaaaggattaagaatattgagatgagacagttaattagttatgttgaaccaaccttgagatccacagtggtacgatgcgtgtatggtgaaaatgaaagctttttgatctcagtccatttccctactccatatttggacacaccttcgactagtttttcaacttcagagatagtccaagctcgatgaagcttccttccacttgcactttgcgtgattggtgcatcaacgaaattatcatctgagctatctccagatgagtctaagagctctggctccatcatctcttgatccacatcagtgaaaattggttttaaatggtctttgtcactctgataaccaaaatagataaagcaatgagcaactgtctcataccagaaataaaaaatatactgctagatgattagaaacagtctttttacataccatctcaactaaaaaccataaagttcagagcaattgagacttcgttggatagatagaatcaaagtaaaatggattttacatttacaaaatgctctccactattatagaaatgaccaagttatacagaaatgccagagtgatcttacttctttctggacacatctagatgcagatttgacacctggaactcggttcacatcattgctcaactgaggtgggcttagattcaggttaccctcctctggagcagctttcacctcccatgacttagaacgaaattcctacaaaatgtacaggtaaacaacattatcctctattaccttgattgcagcaaacacaatttaaaagatgaatacttctatattcctttttccagtgtgtaacaatagacataaatttagcatgtgccagataagtaaaaatattttgatagctcatatgataaggaatggggttaataaagatattgaagagcatgaacaatagagacataccccaagagccattatgttttctcttggacgacttctccttacatgagaaacatagggaacctgaattctggaaccagcaagggataccatcctggtgacaacaactctcccttctgaagaaacggcttgaatagagcttggatcttttgaagggatcattgacccgtcaatttgttgtttttcattggtttcttcaatatatctccttgtaggcttcctcactctttttgcagacccatcttcaccttcaaaatcttcgtttccagaataatggtccacaaaagtttcaacaggactatgcccaaaatcatttgaatgcccctttatgccgtcaggactagctggtgtatctatgctttcagtagctgtttcttcatctactgtacccttgctaaaagcatcaattgcatcttgatctccaccaatcagtttgctatcattaattgtcagggtagttgttggaactacacatgaattaatcagtcccattttgattcttcttttgagccatcgtttgtccttagaagtagtttcacgaccaaacgtggctctgaaagtttcttgtaattctttaattgaaagattagccaagcttatctcgcctggtactctagaaaaatcaggttttgaggcagcagttgacaatgcaggttctttaggactagctgtagcatttaagacatccgtagattgattaatactgcatccatttgatgaaaaaagaattggttcctgcagcaaaactttggatgggactagctccacattcccagacagctcagtagaaatctgaaatttggtatccggaagaacaaaaagcatctgagatccattcatcaattcctctttagactgcaaaagtttcaaaggtggagtaaaattgatggctataacagccaactgacccatgatagttatacaggaataacaatattagaaagttctgtttctagattttgaagcaagaaaacaaacctcatgtcgagagttcaaattttctgtatacggtcctgcagtttccgactgaaagaagcctggattgaatagctgagttagaatagaaaatatatcgctaagattcacaaatgattgtatactaaaaaataactgactgtcctagacatcagataggaaaagctacagacacgaacacatatttacacataaaacactgctcagacctccgacattgcaagtaacccaataaatacccttgtcgtgcagtcctaaggaaattctatccgtctttgcgtgtatacaataagtctttcctctaacaatacatgcagattacacaaattaaaccgacaaaggctcaaacaggagtgattcaacatgtataatatgcttagagtgattaggaccaaaccttcaaaattttctagctgcagaaactgagaaggtgaaccttcatcgggaatgtattcctcagtttgtataggatctggtaaaacaggcatatcttgctcgtttttctcaagcaaattcttgacctccaacatctcttcatcagttgcaggaactagactcccgtcgcctgcaacctaatacattcacataaccaatctcaaataagatactgaaaggctacaacttgtaaccgcactagtcagaattcttaaatctaggaacagcaaaaacattatgttctataaatcagagatacacatttatgaacatacccgcacaagcttgtacgtaacagggtttccaatttgatttgttgaggaaagtgatccgtttcttgtctgaaaaatactgtcttgaaacgtctctccatagtctttcacatttccaaacattgttaccctattttaacctaccaaatgcaacttcaagcatacaaaaaggcataagcaaatatacctatatgcttaataaatttttcagtcatgcaaaaaactcttacacaatacaatcactgatactcaaaaatcctagctttaccctttcatagagagaaaaatattggggatagagtataatcttattaggattattactatatatcttgtgatagagtttaggtcctatatatctctaatccctcaaatataggacctaaactctatcacaagatatatagtaataatcctaataagattatactctatccccaataaaaaacaccactgcatcttcagaataataaaaaagctttcaactttaagctaccatttatcaaatttcaatggaatttgcgtgttgcagttctcacatcaagtttttggtagattccactcagtttaactcgcatcaaacaaacccactacttaattttcaggatagaaatatgaaaagtcacgaggaaagcagttaaccgagcaacaagtacacaagagagttaccagagaaagtagaacgggaacggagaagaaaaaaatcagactttccagtgagctcgtagtttcatcggcgagaaatctcggaggagaggcttcttgactaagctaaaaaccttggatatttgcaaacttttttgttctgctttatttttttttgttttggctcgctttcggctttttttttccctaatacagtgccatacaggtccggattccaaagctttttattcactcgatttcagaatgccaattgggatccgtatagttatgcgggaagctcctagaggttgccacgtcagcgaatagcgaaatatctgccgaaaaagagccaactacgttccgtcccgactctcgtgcaccacaactgcgtgccgtcttacacttcaggattcgaatacgtgtcgtcttagtctagagttcaaaatactgcactcatgtaaaactcgcacaggctatacaacaacaaacaaacatgcaatgataacactggagaccaaaggtaagaaaaacagaagaatccttaaaccgaaatgtgtaaactttacaacaagtttcttgtaaagactcttaatcatttcaatagagatattacatttgtaaaactctcctttctcctttctcctcaatcaattagctctgaatctgaatatgaatctatgataatcaactttgatggtcttggacctcttggttacaatactaaccggatctaaatctcttctggttagctttcccatcagatttcaaagttccactagattcaccttctgatgaagcatccactgatcttgcaaaagaatgagagagatcaccataaaggctagctactcttctgatattgttgttgagctctttgatcaaccccacgtttcgacccaagttatctggttgtttcgattcatggttctgattgatctcgttgatcaataatcggttttggtccaaaatgtcttgaacatccacaaagctcttctggaaactctgcaacaatttcccatccatattgtgtctgtctccaaatcctgacaacacatctccttccattatcggctattctaacaagatcaaactcttgattgatcctttactcctgtttcaatacaatcatgtcaaaaacatggaaacaaagccaagaaagggattcaatttaacagaaaacgttgactagaaaagtagttacaataacacaatttattctctatgcgttgacctgaccctatcttgattttagagctctaatccttaaagctcacataagattccattagtacagacatttccagtaataatccaatcttaaaacactcaaattcagacaagaacccaacacgattcagctgaatagtcatgaatcgtacaaagtagggaagaggattttgttcttatgaacccaagagggaaagagatctataaagggacaagtaaaagctgttccacaaatagctttaaaacatcacaatagtagtagacacagattcagataagattcgcaatccttaacaatgcaataagacccagaaaccctaagcaaatacacagtacagaattcaaaagagttccgatccagtttccttaccttcggaagtagaaagctccgatgacagataggagatggaaatcgaggatattttctcgggaaacaaacaaagaatccttctttttcaccgattatttatatgattacaaattattggatactgtaaaaaaaaggaatctacttgtcttttgagacagagatatttgagcgaagctaatatgttctaaaaaatgccatttataaaaacgatatatttttctgtatttactctgaatcacgctttttgcagagagagatacggaggttagagaagccagacatctggatcgaacaaacccgacccgcaaaagattcgtgttgtttgtgcctaattcgcataaacagcatgtcgtttcgattggaagtaaaaacggcccgtagtttagaagcgtgaggaatcaatgttttaacttgctgacgtatggccattctcgtcacttactttgtctcaccccctaattaaattacctcgtaattatttcgcagttccttgagatcgatcccgtcaccaagaactcgaatatctctttctcttcgatcgtttcctcttctgatcccgccatcttcgcctaactcccaaatctatataaattattccgacacctctccggcgagaatttccggttaatcggctgactaactaatttatcggcggaagattttccgttgacctaaacctaaccgagtaccttttggatgatgagaaatggattcgattgtatgcacagcactggaggaaatctgttgtcaaggaaatacagggatcccactcgtttctctctggtcaaggctctctcctcctcctctttctccttccgtcaaggctcatgtctggagaaatcttctcgccgtccctcagctccagttcaaggcgaaaaacactgtgtacgaaccatctgatgcttcgattcaacagctggaagaggcactaagactcgatttgaggatcttcgcgaatgagaagctccgaggtaacttcgttggcttgtacgatgctcagtccaataacacgactatttccgctattcagcgtcgcgttctcgagcggcttgctgttgctcggtaagtgcaaattctgtattctcttctagctactcttaagagttcgagctcgtataatattatgttgtatgtgtttgatgcagagccaatggagttgcacaaaatctgcttgctaaagagtttggtatcgaaggtagaaacttcttctatattgtgaagcaccttgagtctcgaggtttagttgttaaacaaccagcgatagtgagaacaaaggaagttgatggtgaaggggattccaaaaccacctcatgcattagcaccaatatgatatatttaagtcgttacgccaagcctttgggttcccagcagagatttgagatttgcaaagaggactctttattggagcaagaggctactcccgccggagatagtttacaatcagaaagtacaaaagaggatacgctcattaaagattttctaccagcaatgcaggcaatttgtgataagcttgaagaaactaatgagaaggttagtaagtgcaaatcatttctttctttttttatcaagctggagcattctttctctatactcatttgttgtagtgcaggttctagtcgtctcggacattaagcaagacctcggttatctgggatcacattcaaggcatagagcttggagaagtgtaagtatatatttcttttttctcttatagagcaagaggaaagagactttcaacactttgccaatttctttttggtagatatatctttgaaaaattaatacgtgtgcattttggattacatcaggtttgtcgccggttgacagattctcatgtagtagaggagtttgatgctgtggtgaacaataaggtgaactataatctgcatcacattccatcatgcgaatacatttcaccacatatggtggccaattgcctttatttagcatttctgatctgttttatttggctataaaatatttggattgtcttttctgcaggttgaacgatgcctccgtttgttaaaaagattttcagcaaaagattttaactactctgggaaaaagcaactcctaaaattcggaaggagtattcaaaaaacagaacaaactttggagcttccaatagataatcaaatttatgatatggttgatgctgaaggatctaaaggcttggctgtgatggaggtattcatttgatgggtttgccttacagtttttggtattaccttatgtatttggctgaatttttttgaaaaggcattaaatattatttccaccaggtatgtgaaagacttggaattgacaagaagaagagctactctcggctttatagtatttgtttaaaagtcgggatgcatttacaggcagaaagtcacaagaagactagagtatttcgagtttggacttctggtaatgctgggtccgaatgttctgatcggtttcctgagaaagctgaaaatcgtagctgggaaaacaatgtaccgattaatgattttggcacacctcatgatactggtggattgactcagacctccatcgaacacagtattgcaatttctgatgctgactttgctacacctgcaaggttaactgattctgaaaacaattcaggagttctccactttgctacacctggaaggctaactgattctgaaagcaattcaggagttccggattgttccccatctgatgccaaaagaagacatgtccttacacgccgtaacttacaagaatcattccatgagatctgtgataaggttgttgatactgcaatggggtcccctgatttggctttgtcagaaatgaaccatctcgctccaccgaagccagctaaaccaaaggtgcaccaacctcagccgattactgttgaaaactctcgaagagagcggagaatacttgagcgcttaaatgtacttactgttctcttttctcgacattgaatgccataatttatttctccttttcccttccaactgaataattgtttcttctttctgggctggccataggaggagaagtttgttgtaagagccgagctacataaatggcttctcagtcttgagaaggacaggagctccaaagtggataggaaaaccattgacagaattctaaataggcttcaagaagaaggactctgcaattgcatgaacattagtgtcccaaatgttactaattgtggtcgcaatcgtagctctgtggtagtttttcatccatctgttcaaagtttgactcgagacatagttggtgaaattcatgataggattaggtcttttgaactgggactccgtggccagaacttatcaaagaggaaaagcaacgagctaattccaatattgaatgacattcagagaggtcaaacgaatgtggatttggatgcgcgtgctagcaaatcaggagccatgcgagccaatgggtttgtgcttgcaaagatggttcgtgtgaagctcttacattgtttcctttgggactattttagttctttgtctagctgggacaatgccttttcgtctatacatgatcagaaatctgacaatttgtttgcacttgaagatgcttttaaagccatgccactcgaactgtttttacaagttgttggatctactcagaaagctgatgatatgatgaagaaatgtaaacaggttatgcgtctttctgagcttcctggtgaagagtataagcttctaatggacactcttgcaactgggagattatcgatgcttattgatattttacgtcgcttgaaggtattatcatccatataattaaagatcacctcacgtaccttatttcgatacatattacagagaagtgtgtgcagttcaaaaaatgaaatgtgcctatttttgtagttaattcagatggtaagtagtagactcagacgcgatgaaattgaggagaagtatgctaatctaacacatgcaatggagcttaagccttatatagaggaacctgtgtttgttgctgctacatccaatgttatgtctcttgattttcgtccacgtattcggcatgactttattctatcaaatagagatgctgttgatgaatattggctaactttagaatattgctatgctgctgccgatcacagagctgctaagctagcatttccgggatctgttgttcaagaggtataagcttgatccttttgttttatggcttattataaagataacagttgaactaaaatattataacctagtcaaactatttatatgtgttacgcttatatctctgtcaaaaactgttttgtccctgtgacaataatttcatctgcctattatgttaggtattcagaaaactgtttctaacagtcagttcttctaggtttttcgtttccgctcttgggcctcagatcgtgtcatgacaacggaacagcgtgctaagctcttaaagcgcattgcaatcgatgagaaggaaaagctctcattcaaagagtgtgagaagattgctaaggatctgaacctgaccttagagcaggtaaagatatgttttttatgtgctgtatatattgtctaagtcacctgcctaattaattaggggaaaaaatatttgagaccaggtgttactttgccaaataattttctttttgtccttgatcttagagataatgccaactctttatttctttgatgtttcagcttgatttcggttttaaagctttctcatatctggtccacaaacagagactgacctgaatgttctcttttttcctcttgttttactggggtgacgtagctaatagtttttggttgcgtactccaggttatgcatgtctatcatgcgaagcatggaagacgcgtgaaatccaaatcaaaagataaacatttagctatagataatagctcttcttcatcttctgggaaaagaaaaagaggaactctcgtaaagactacaggagaaggtgtcagatccataatagtagacggagaaaaggttctgaattccgatgccattgatgcctcaaatagtgagaagtttctaaattcattagaagagcatcaggagcataatctacaagaaaattcagagataagggatcttactgaagatgaaggccagtgctcttctattatcaaccagtacgcaagttcaaagaccacatcaactccttcacaaagattttcgtggacagatgaggcagacaggtacttgacacatccaatgaaagttcagttgtatatctatatgtttatatgaatgcttttcatatatcaaataggttctcgctgtaaacgtccaatataatgttggttttaggagtctttcttcaggggattcattcctcagaggaggccaatacctcgggagttcctttactgagtcaatttcaatgaattcatgcttttttactgtcaactaatttccatatgattgagtgttcagtcgttcattctttaaactttctcctgtcttaaataatttatgacatctgattaatttgcaccactgacacaagtattttctggtcaggaaactgttgagtcaatatgttagacatcgtgcagctcttggggcgaaatttcatggagtgatgtgggcttcagttccagaactgcctgcccctcctttggcttgcaagcgacgggttcaaatattgatgaagaatgataaatttcggaaggcgatcatgagtctttgcaatctgctcagtgagcgttatgcaagacatctggagacgaaacagaagtgtttacccgagagcaacaagtcacatgttcttgttagatatttatccccggcaattggcggaacggattctggttctgttgagcaaggtaaagatatatgttttgatgaagaaaaatgggatgacttcaatgaaaagagtataagtcaagcctttaatgatgttcttgagctcaagaagatggctaaactggtggcccctaaacggacaaaaagttctcgggaatggtcaaacagagatataattgatgaggtgctccttattgcttacttttctttcgtttgacatcattcccacaatttcttcacttctctgtgatgtttcacttttattgctacaaccattcatacataattttactggaaacattcaccctgatctggaagatcttaatttcagtggttcttttgcttttggcaatttatgataaactaaaaaatgaactcgcaggggagtgaaatggttccacctgcgatccactcagaggacattcaaaatgtgtctgtggatcaagttaaagatacatctcgacgatctggtcattatcgtcttcatcaaactgtcaggcctttagatgaaaaggacaacgatagtatacaagtacggaaatctctggcagtttctactgctgcagaactgttaaagcttgtctttctgagcatgcctactgcacctggtatgccaaatttgctggaagataccttacgacgttattcagagcgagacctcttcacagcctatagctacctccgagacaaaaaattcctggtaaagtttcttattactttcctgttactgggttaaaacttctggctacttccttttgttatatgcttatttgcttatcagttgtatgaagaggcataagagtgtccatgtgaaaatagcatagcatagcatgtttaactttaaaggatcatcttttcttcctttttttggttcgatgttgctgtcaaaaccacataatgtgcaggcttgatgtttggatgagatggtgaataagaaacagttttctacatttcttcacgtcactttattattttattttcaatcaagtttatttgcttgtatagataaacttaatgattgtatttgtcaaagaaaactgaaaagtcattgaattatgggaacgttccaggttggtggaagtggtggacagccatttgtgctttctcaaaacttcttgcacagtatttcaaagtctccattcccagttaatactgggacaagagcagccaagttctccagttggcttttcgaacatgaaagagaccttatggctgggggtgtcactcttacttcggatttgcaatgtggtgatattttaaatttcttttcattggtttcttctggtgaactctctatatctgtatccttgcctgaagaaggtgttggagagcctggagatcgaagaggtttgaaacgtagagctgatgacatagaagaatctgaagctgagagttctaagaaattgaagctactaggcgaaggtgaaatcaacttccgaaaggaaaagggtttccctggtatagcagtatctgttcgtcgtgcaactataccaacagctaatgcaatagagttgtttaaggatgatgactctcgcactggtgaatttcatttgaagtggggagaagcgaatagtggctgtgattctgatgacatgaaagaacttttcaactctacagattctactgtcataccaagcagtctaggtgattctccctggcaagcgatggccagttttactagtagcattatgtccgaatcaacagatgaggaagttagtttattcagtcccagggtttttgaaaccgtttccaatgcccttcagaaggctggtgaccaaggtctgagcattgaagaagtccacagtcttattgatatcccaagtaagcatcaggcaaacctttttaacaggcttttatttttgcatgtgctggcgacttccttcagtgtttttatttaacctttgtgtattcatcaggccaagaaacttgtgactgcattgtagatgtacttcaaacatttggggtagctttgaaggtttgtctgattatctcttattttacaaaccctgttgcctttattaagatgaaagttgcagtgcttggtttactagttttacttacctggattgtgaactcagttcatgttacatcgttttacaagcaacttgttaaccatacaatatcttattcaggtaaatggctataataatttccgtgttgtccattccttctaccgatcaaagtacttcttgacattggaggaagatggaacttcccaaaaaagtcaacagtctctaccagtgaactacctagagagagctgttggggaacataggtccaaagatatcattgctagcagctacagtacttcacaggacatgcgagagcatgtcgctgggaatagcgttcacaaggttacaattcttaaccttcctgaaacggctcaaacgagcggtttgcatgaagcatctatcaaagctccatctgttacttttggaacgggtattgaaggtgaaacaaaggaatcaacttctgaaaagtcacctgtgcctatatatccatgggtaaacgcagatgggtcaataaataaaattgtctttgatggactagttcgccgtgttcttggtaccgtgatgcaaaatcccggtataccagaggtaaatacttctccattttccacccaataagtttttgccatcatggtttcgaactctatgaaaatactaatcgaaacattcatttgtggcaggacgagataataaacctaatggacatactaaatcctcaggtaataacaatcataaaccctaaaaacctcttctcctatggtttcatttactgaaactgatcaaaacttcttaaagctctttgtctgttgtctctatatacggtggttgctctctgataacattctgtaaaaaaatttcaatatcagagctgtagaaagcttctggagttgatgacactcgacggctatatgaaagtgagggaaatggtgcaaaccaaattcaccggtcctccgtctctgttagccggtctcgtctcaacaggtcctagaaaaccggaacttattcgccgcaaacacttgtttgcaaactccaagggactctttgccttgtaatgtctgtaaaatctctctcagtctctctagttcagtccaaaactcgatgcaataaattattaatgtttatgtgggaaattattatagttttgtgatttaaagtccacaagatcttgtatttgtatagctgtaggtgtgatgattaattctctttatagattcatagtgttggattcatatccctattataggtgagttttggaaggttttattcagttaaaaagagagcttattttttattcaactaaaaggtctcctacaagttacaagttataactaaataaagatttctatttaatttgtagacggaaaaatctccaaataagaatgaattaaatgatcaacaggatgttgtttccatctagttagtgtagtttacttagttaatcaataaaggtttgaatcatacagaatcaagaggcagaaaaaacattgtgctgaataaatttaaaaacataattctgaaacaccaaaaacgtgaaaatagtgcacactagtttcatcacctgagtaacgaaacagtttgactttttgttgacgtatttgatgtaataaatggtgaagagaaaaaaatgtaaaatattgattgcattggtctatgagataatcctacaaaaagtgttagagcagttgtgcgagagtctggaataatgaaacacagttcagtacaagtatcttttcgatcatcttccgctaaatctactgacgtgtacggctcagattcttttttccccagaactgattcaacaaacaaaacaaaaaaaatagaagaccatattttatcggtcaataaacttctgggaaaaaaataaaacacgatttcatgagagaaaatcgacaaaacccctctcaaccaaataatacaccttcttcttcttcttcttcttcttcttcttcacagctgggtttcttctaatggcggaaccgattccctcatcgtctctgtcaccgaaatctctacaatctcctaatcctatggaaccttctcctgcatcttctactcctttaccttcatcatcatctcaacaacaacaactcatgacagctccgatttccaattctgttaattccgctgcgtctccggcgatgactgtaactaccaccgaaggtattgtaattcagaacaattcgcaacctaacatctcctctcccaaccctacttcttctaacccaccaatcggagctcagatcccgtcgccttctcctctctctcacccttcttcatctttagatcagcaaacacagactcagcaactcgttcaacaaactcagcaattgcctcaacaacaacaacagattatgcagcaaatctcttcatctccgattccacaattatcgccgcaacagcaacagattctgcagcaacaacacatgacttcacagcaaatcccaatgtcgagttaccaaattgctcaatctcttcagcgatccccttctctttctcgcctgagccaaattcagcaacaacagcagcagcagcatcaaggtcaatacggcaacgtgttgagacagcaagctggtttgtacggaaccatgaactttggtggctcaggttcagttcaacagagccagcagaatcagcagatggttaaccctaatatgtccagagcaggtttagttggccaaagcggtcacttgcctatgcttaacggtgctgctggagctgctcagatgaatattcaaccccaattattggctgcttcggtaccccattctttacttttactctctttccctttgttgattcatatctttctttttgtggatggagtctcaacttgtagtattgctttagatggagatagtgttgcaattgtttttgttgatatgaatatagtaaactctgcagtttcttctattattgtgtgaacaacaaatcattttctttattctgagacaaatgagcttttccgttgtagccgaggcagaaatctggcatggttcaaggttcgcagtttcatccgggaagttctggacaacagttacaagggatgcaagctatgggaatgatgggatcactgaatttgacctcgcaaatgagaggtaaccctgctctctatgcgcagcagagaatcaacccggggcagatgagacagcaattgtcacagcaaaacgctcttacttcacctcaggtatgagttttaaaaagtcgtatcttacgaacttctttctctcacattgtgaacttttttattgactacttgttatatcttatggctcatagatacaaatgaattctcgtgttggatcctttcacttcttttgacttattgttgcacagtcttaattaaactgatccatgaggttttggtactttaatcaatcacttaatattgacttgcagagtttttccaatatctgtaattggcaactaaaatacctgaatgacgcgggaatgatccttaaatttgacagatttaccgtgtaattgtaaaatctggcctatgtatctatagagtactaatacatttatgttgtgcaatatgcaaattcctgatcattttgtgagcatgtgtttctttcgtttcaagttaaaaaatagagttgcgtcgaatctcatgtatcctgtatcctcttcacttggtaactttttgtaatcccctgtgtaggtccagaacctccagagaacatcttctctcgcatttatgaatcctcagctatcgggtttggcccagaatggacaagctggcatgatgcaaaactctttgtcacagcagcaatggctgaagcaaatgtcgggaataacgagccccaattcattccgactccaaccgagtcaaagacaggctcttctcttacagcagcagcagcagcaacaacaacaactgtcctctcctcagttacatcaatcttctatgtccttgaatcagcagcagatatcacagataatacaacagcagcagcaacaatcacaattaggccagtcgcagatgaaccaatcccattcccaacaacaactacaacagatgcagcagcaactacagcagcaaccacaacagcagatgcagcagcagcagcaacaacaacagcaaatgcagattaatcaacaacagccatctccaaggatgttgagtcatgcaggacaaaaatctgtcagtttaacgggttcacaaccagaggctacacaatcgggtacaacaacaccaggtggtagctcaagccagggaacagaagcaacaaaccaactccttggtaaaaggaagatacaggatctggtttcgcaggtgattttccctcttcaactctatagcttgtttctatcttcttcttcctttagaaatatgtttcattctattgtatcatgatgttcaggtggatgtacatgcgaaactggatcctgatgttgaagacctccttttggaggtggcagatgacttcattgattcggttagaagctaatatcaattatttagtattaacttcagcttttttatttacagatttgtgaaaacctatctctatcttacctaaacttcattgcaggtcacatcttttgcatgtagcttggctaagcatcgtaaatcatctgtattggagcccaaggatatattactccacctaggtctgtacttaatttggtgatgagctctgttcaatgtgaattctaagtagttgctattgttactcattttactgtttgctgagttataattttttgcagagaaaaacttgcacttgacaattcctggattctcaagtgaggataaacgtcaaacaaaaactgtaagtgattttctttttaaaactctttaaaagcacaaaaagtatatgtgaatgtgcatcaccacctgaatgtccaataaaagaaaaagagaaagaacatgagtttgctagatattgatcccaagttaacaacttgcaggtaccaactgatctccacaagaagcgacttgcaatggtaagctgaatgatattccaaacatctctttgtgtacagtcgtgcttatggacctctctctgaagtttcttttttgtgttgtgtcgccaggtgcgtgcattactagaatcctcaaaaccagagacgaatgcaagcaattccaaggaaactatgagacaagcgatggtgaacccaaatggtccgaatcatctcttaagaccctcccaaagttcagaacaattggtttcgcagacatccggtcctcacatattacaacacatgacacgatactaaaggacttgaatatagaagcctgagccagctctcactgctatgttcatcttcttggtaaacacttttatcatacacaaacaccacttacataaataagaaaacctcgggtatttatggctggctatatatagtcctcaacttttcctattataggttgcaggagtttacacatctatggagagttgaaggcacaagtagtgaaactgtatgtattatatataaaattcatgagtcttataggcaatcaaataatacagttatttttttcgtagttgtgggactttctaactatttcgtcttcttttttagtgggtttttgttttttccttttgtaattttagttgtcctctccattttaagcttgaaagttttagctctttgatgactcagcagttgatgatatgttaaatgatgtcaactatatatacacttaaatcaaatgcatatagatatttatatgaagaagaagtatatacaaaaatagaaatcaagcacttaagacaaacgaagtaataaaattattaagagtagttggtgcttcaatgttaacagcgtgtcctgtttcctttattatctctaatcttgaactctgtaaatgcctgcaaaagtatataatttttattagtttcgacatattggattcacgatcaataatcacatgcgttcacgttcgatgtttcatctcttttgacctagtagaaatattaaatattttatacggatgtagttattatgacaacacttgttatgggacttattaccataaaatatcaatgtagtatttacctttgcagccgataagcatgctccaagggaaacaccttgtccttgtctccccaaacgattaacgttttctgcatcatatatatcaaattaatcagagtcatattttattcgtagattcgaataaagcatctcaatccatagcatccctctagaaataatataaaagtgaaagcaaacaaacgagaatagtgtttccactatccaaaagatgaatacttaaaacccataaaaacaatccaaaacatcaattagttctctatcagcgacacattaatcatcacgccaacttattaatatatatcttgatgcttagagttaaaccattagtgatcaggaattaaaaaaaggttaactcaacgaaattttatactacctgggatattacaggcaattctggttcctcctctcgttccaacaaattcttagctagctcaagaagctcctgccgatttttctcatacattacctataagaagaggatgaattttgcaaattccaaacctttaggatcatgactaacgaacaaacaatttacgggaccagattcggaaataaacagataaaacagaaacagaacaaacttacagcgatgaattgggaaaggaaaaagtctggaacccaatcgacgaacgttaaaccagtattcatagatatcttaatcagcaaccgtagatccatcggagttttcggaactaaaatcttcgaacaatctccgccgtgttttttcaattctgccgtcttctgctgctgtgtaaatcccactccactactcacaatcaccaatttctcaaccatcgccggccaaatctccgccattttatacgccacaaatccaccgtaactaatcgaataaatcgatattcctcctcctccttcaacgcatcccagtttcttcaatcctccgacgacgctcctcgcctgaatctcaacgctccgatctctattcttcgaatacgattttccgaagaagaccaaatcggggatgaagagattaaacgatttcgagagatccgagacttgatgaacgaattgccatttggagtttcctccgtatccatggagcatgacgagattctgccgagagattctacggtggccggagatccagaaatggactgtggtttctccgtcgtctagatcgacggttacgggtcggagatcgcagaaaactaagaaatacagagataagaacgaatctgcgattttgatcagtatcggaaaatcgaagaaacatgaaattaagcgttgaaagagagtgaaaacgattgagagataacgacggaaaagatgaacgtgtttcatggacgccatttttaagaaaagtggaaatcttttgtttttgcagagaaggtgtgggtgtggcgatagagagagtgtgcttttaaatttcaaacacagtttctaccggtccggttaattccggttaaatcttgtttaagcgatgttattgatttgagttttgttcaaacgtggcaaagtgcatgttaagtgtttcgacatctaattctataaaaagtttatttaacattttaacaaacaaatctatatatgaaaatctaagtaattgagcttattattacagctgtttaaagaatgtcctcgcacgagagcgactgatccacacatcacacatgtactcatggtataaactatatcgtctctttgtcgtctctctacgtcaactaataagccacactcgattaagtcgctggctcttgttggtgaatctgcatcgttggatcagaatctaccaaacaaagacaaaagttttacccgttggattggatctctcttgccaactttaagttcctagatttctaccaatgaaatgatggcttcaggtccaagttaggttaaaatccaagaagaaacctttgtcttcactctcaagtgaatggctgagggtctctaccttgagttcccaggagaataaaggtactcttctatctctcattttttttttctcatagcaccttataatttcaaggtttatactttatccgtgtgatcagaaggtagtttgagacccaagttaggtcagaacccaagaagccatctcaaatttcaggctagacttaggtcaataccgaagaagatagtttacattaacctttctagtcattttgattttggcataactttacgaaaattatctttatatattatatatcatggtttacaagaaattatttatgtgttttctacatttacttcttataaataatttccttcttaattatatagatacactattaggtacacctctacacgtaacaccaggctcagaactcggaaccaacaactcataaggcaaaacaccagccccacacctatttctacggtcaggatcagcgttccttttctcaatctctttctctatccgtccgatctctgccgcaaatccataaaacgcttcaacaatctccgcatctcctgtccaaatcgacggctgttgtctctctccaatatactcctcatccggcgaatgcgtcgacaaagtatcaaccacggccataaacttcgaagtctgcgccaaacttggcatcgacgagaagtaatacttctccggatgggagatgaaactcgcgtactctggatccgactcgtcggggattaaccgccgcatcaacggtggtcggtttgggacgtagccaccgtaagggtattgtccaaagtttagagcggcgtgttgagcagaggcgagccagattagagtggttagaatcgacacgaggtcgtcgacggttgataactccggccaccaatcagcgtcgcggaggtcagcgtggccgacgttgattgattctgagtaccaagattggagctcagagtctgttttgataaggttcgggtttggatagtagcgttcaacataggttcggacccaggtttggattgctgaccagagtaaaagaccgtcgttggcgtacggatagtcttcgattaggagtttaagaccatgtggttgtgttgcatcaggaattgccattcctctgaaaataaacacaatttaaaataaatttaggtattatatacaataaaaaaaatacatttttagcagctaaaaatcttcaactaaaacaaaaaaaggtttagctaaatacctgcgaattagatcggcagggaggccttccatgtcgaaccgccagctgcttttgtatgcggcggcactcatttccatgccgtatgcaccagcagtgaagcctccttcgatcacaccatctgcactgatcaacgattgtctagccaaagcattgatttccaacgtgtatctcatgtgtggatccagtagcttgaatatgggatgcatagcgctcaattgcctgtgtgcagctaatataaatggctccaagcatgcatgtgtccgtaacctttacaaacaaatataacaaaacatgtcaatatataactctatattcactacttgttacataaatgtgtattaacatgtataagtactaaccagtgattgacaagctgatggacaccagcatcgttagaactaacgtgggctttagcgagctgccacatccaattagaggttgcatcgactggaggtgtaagcacacgcttggaccgatgttttggaccatggggagggaggcttagctcaatggctaccggcttaagtgtgcctagacgagtcaagaagaagatagttcgagtagcataggctttgcgtccgtctagcgcattaatccggtctaggaacggtaagaatatgtcatggtaatccaacatatacaatctattctcttccaacgcctgaaaaaaaatagaaaagactatttaatttaatcattttttgattagtttagttaatccattgtaaggggaattatatagataaacgtacttgttgtacggagaatccgtcgaggtgaccaatgatatggtcgtcagtaagagcggagtgttgtggaccgtagatcttggggtcaagattgctgaccggtggaaaagtcttgactctctcaatgttcactggattgattccagctatggcttgacgtgcgaattcgtcatctcttaaccatgcgtttttatcctctgcattatttatagtcgtcagaaatcaattgactaattaatatttccaaagattaataactaaaaagcaagttacggctatgaatgagttaagtaaaagcaaacgcgcttttgttatccgcaaaacgaattaagagaatcacgtggaacatatgttgttgttttagtactctagtaatgcgtttcgtctgctttttgaaactaatgggtcccaataaccaacgatacacaaatcgccaaaaaagaccaataaaataatgtaaaattcttggaaattactcaattaggggatgcttgctttagttggtgtggggatatgaaatggcattagttcaatttttgtttactaaataattgatgttattaatttagggttcttactcgataatattttgggagtgtcgtatttgaggagtcctttagtagattcttggagggtatcaactacgaccttagggagaggaaacttcttaaagatgtcatcttgaaaccctaacttgagtaacaagccttctttataaagacgatcgatctcgccgaagtctgcaaagtcctcagctacaatactggctttgagcgacggaattaggtggtgtaagactgcttttagcctccctgcagcaaaagtgtcctgcttcgactcttcaaattgctcgtctcgtggcacatacataggtaatggcttctctactcggctctccgcgtctttatctgtcaacagtacagatcaatatgagaaacgtttcataaaaccaaaacagaaagtgttgttttttttgttgaatgcaaatcgtactaaaaatgtttcatagagatattgagctacaaaatataccagaaactgttgattggcgaccagtacgacaacgtctagggtaaggaacctctttgccaccgagtttggggcgagagagctcggatgatttgtcgggatttccaaggtcgttgtaaacatcaaagtcgtaaattctgtctgataattttctcactccacttccatctcctcgtagattcttcaactctttctccctcaatactcttaatccgcttggtgtctcattcggcaaatacggctgcgaataatattcaatttacatgacgttattttcatacttaatagctggggagttgggtattattaatggacccaccatgacataaatgttaaagaagattttgaaactgactaagatatgtaatcaattcgtgagggaacgaaaatgacgtgttttaaagattttggaaaccatgattaactacttagtttaatgagttacctgattagtgaagaaaattcgtttatcagggtgatctttttgagactgaacccaagaattgcatggaaagtgaacaggaccaagtgcgaagccttcaatggttatgctctccaagaaaaactctttttggtgtttattcatgacggtgattgctcccggcgagccaaacgctgcatccaccgtgaactccgccgtatagtgaactctctccgccttagttttcgatttctttgaccaatcctttaaaactgctgcattgcttttcttcggcaacttcgtttctgtttgaatcaaaaagttttgttttttcttagtattttggaaacccattttagattacacgatcttcagaaaatatgtgaatgctctgcttttcaagagaaggacttacttggatcaagttgggtgctgataagctccaagacaatgtttcgaccaattttatcagcaaaagcatccaaatgcttaacaagagtctctttcaaatcctccttgttcttgttcctcacagtaaccacagctctcaccttgaacttcaccgccgctttctcctcctcttcgctctttctgtctccggtcgttgtggaaaaacgcagcgttttgaccaaatcctcgctgatggctgcaacgacgccggatttggtttttcttggtctccggtcaaaagggttgatcgagaactgtgttgactgtgtcctcttcttgaaatgcgacgccgacgagacaagtgatgacctttctgtgatgagaggataacccattaactctttagctaaggccatcacgataatctaataaattacaattttgaggttttgtggtatactattagtgaagaagaaggagttgaggatttgttggtagatgaacgttctggttaattactagtaaaaatcggcgagtgagagatataaatagagagagctagaaggaacccttgccgtccacacgttttgttgattggactatggattgtctacgcaaaagtcatgttttattttttttccttttatataatgtgaattctcaacacatgtttcaagtaaagatatttttctttctgttttagtcaactagctagttttcaaactgattactcttattctgattatgataccttttcatgataaatgactttcttttaaattttagaaaacacgtatgttatggcaataacacactatttttattttatacgtgaagagaagaaggatacgtcgtatatatacgtggcgtattatagtattattacttagcttgtccaatccaaaccatgttaattaagattttaaaagctgattggataaaataaagttagttgtccaaaaaaaaaaaagagaggataaataaagtgttaaaagggtatgactttagaatgatagttgaagattaagtatatgtaaaaagagttttatatttaaatgcatattaaatcaaacttaccaatttatcaaggcaactatacatttcctaaatatatgcatatttactgttaaaactttttagtacatgaaaacgggaatgatttttcaattttcttttttttcttttgctaaatatgtgaattttcaatatatgaaaaggcttgtaggagctacaaagttcttaatacaacagatttcacttttctctgtttgtgtttttttttttttttgtcaacggagaatatacttcgttaaccagagttattagattcatctttgtattaagtttcgtgagttgcataatgaacatagtttggctatgttaactagccaaaaacaatgaaaacaatgaaaaaggaaatgatggaatgaaaaatgtggggtaattgagtcaaacggagttacgagtctgacacgacgcgtagtataggggcgaggaatcaaaggagaaactccggtcggaattctttaaatgactattttaccctctcatttgcccaaaataagattttgcattatgggggttaaccggagaatgttgaccatcgcctttttctaattataaagtaacaaaggccccgagaaagtaaataaataattcgacaacaagaccgttgaagatctgttggtagttcttttgagaaaaaaataagaaaatggggtttggtagttatgaatagttttacagacgaaattaataaaattaaactaaccggaaatagatgtgacataaatgtacttgatgcttaaaatagtattatggtatacaaataaaccctttattatttatgaaaatgctacaacttcttaattaatcttaccaaaagattctgaccattttgaaccacaatctcttctaaccgcataacaaaacaggtcactatagactatcgtcacttcctaacatcaagactcaagctcataccgaggttcattccttattatatcgatttggttatttacaatggaattgcacatgcatatatatatatatatatatatatatagtaacatagggtcaaaatataagtgtggacaccaaatgtgattagtttaacaggttagcgaaaaatatatatgaattcaaatataatgattaaggtctccaatccaaaagctcgatgtatagctgtcaaaatggacgggcggcccgtgggctgcccgtgtccaacgcttaatggaccgggcatggacaagcccattatgaagtggacattaatggatatgggcgttaacggacatggacattagcggactggacgtaatggacatgggcggcccaatggtcaaaaatattaggtttaagtcgatttgggcaaaaatagatttgggcaaaaaacatttcttggttttgtcgggaaacatttctccggcgcttattcggcgatttcttctctccggcgatttctccggcgagttccttcaacaactcatctccatcacatcatggatcctcctgagaatcctaatctattcaagtaagcaaattctcatcctttttactcaattcgatttgggtttctgtttttgattactcaataatgggtttctgtcactgttgtacttaggtgataatatcgagttccttaatgaagacaaagatggcgagggagaagaggaagaagtttaaatttgctgttaatttgtttttggatttgatactttgttgaatacttgaattgtgtttaaatttgcttttggatttgatatttaaatcaactaatactttgttatttaaatttgcttctcgatttgataatttgattggaatataaagcaaatactattgtgttaaaatttggttctgttatgcccattggacaacccatttggacatgggcattaatgggcatggacattaatggacatgggctttaatggacatgaacactatttgtcaaatatcgaaatggacattattggactgggctaatggacatggacaacccgctttgacagctctagctcgatggttttagagtagtatagtttgaaagcccaagacactctcatctgcaaacgattaaatgaataattggtttaagttggtaactcgaaatttagtgctttaactggttcccagcttcttttccaattaacagcacgttaaactggtccatgaaattaaactaaaagtagaatgaacaaagtcaaacagatattcaacataatttaaatgtataattaactagtactaagacttttgattcgtgttttcacaaataattgatcacttggtccactttcaacgtgggcttgtaagattatcgcgtatcaaggttttgtcaaaacaaccgcggggcattgatatctacacacatcatgtgtcattaatcatctaaatttaaaatttatgacgtacatagtacattcgatggaacacggtattcttaaaagtataacaattgtttacacgtaaatttaatttgcacaaacatttgaattctttgtttattatgttttttgtttatggtaagtttaacaatatgtaatagtagacaaaagaacgcttttctctaaattatacaattttttagtttttatttttgattatgtcattaattttcagtttttttagctataacacaattcatttgttggtaattttgtataattaattaacgatttctgatataagtgtaatttcacatattatcactaaatgtgtttacttttttaaaataccaaaatgaaaacgttaatttaggagaaaggacgtgtagcatgcataatcataatgatatagtgggaacgatgagaaaacatatctatggacggttcaggtctattttgatgggcagagaatggaaaacgtagttcttttatatatgtcgagataaaaattatgaccatagcttcctttctaccttgcaccgtccatgaagattgcggctcaagaccttactaaatgagtacatgtaaaaatgcaaaccagaaaaacatctactaaataaccaattagttagtggctgaaaacgattcatataatgcgaggatcaaatttcctattcttctactttgatttcaagcatggattcatggctgttagtcaaatgaatatctattttttttgtctaaaactatccttttatctttcaaatgaatatcttaaattgcaaaaatactcaaaatttctgcatatttagaagttagactaatttcagtccgaaatatatgaatacctaaaaaaacatcaaccacccattcttggtttcgataaatttcataaagacacattttcaggacggtatattattataagtcgaaaaaaaaaaattattattataagtcgatttcattctcaacttatctaattactgacaatgattttgaaggattcgtgaacaaaaaaaatcctcaaaattagttacttgcccaataaaatcccagaatataattcataagctatgcattctaataccaaactgttttactatccatttcaatgattgtacaaaaaacctgattttttttaataccgagtatgttcgcaccgtccagctacaacatccatgtgattttggtatcagaacaagaatttcaagaagtcaagatttttcattgttgtcaacgaagccaagtaaatcagtacatgtcaatatcaatttaatggtataatatatttaaaaaaaaaatcaatgagattttgatagatctttaattcgaatgcaacacgacgaataggacgtctttggaaattccggctcatgaatccttccactctaacgttcatgtcctctctcttccaccgtccatttttccttttctttttggtacttttcataattagttttgttaatacgctgaagttttgaaagtatatagcttcatctaattacacttgttactctacttcataatcaacattcgtctttaattggagtaattttttcaatacgtataggtgaagaagtaaagacagtaaattaaagaaatggaaacaggggtaagtggtgacactataaatcgattgagacctagcaaattaataaacctcaaaaatttgtgaaccatgtgttttcgaacacaaacaaatgctaaagacaaatgtgagacttaatgagttttgccacattttgaaagatcctttcggcctctttgcttcattatcccttcctctttctcaatcatcatttgcttcatatgccatgataataattcttttggattaagcttaagtagatctcttaaagcttcacttgtcaataggcaaaaatcttctgtatttagtcaatggaagacccatgagagttttaaccacacgtatagaaaatagagaatatgataacttctcactataggtatgcatgtaaaaccatgacgtcaatgatataactatgacatacttcacatcccacaatgagaaaactaatctgccacaaatatattatggtttttggttaacaacagcaattatacgagcttgaatgttttctatttgtattgttgtattctttgttacagttggtaattgtatcaatcgatatacatgaagtcactttttgtttttatttaagtgtttttttcttcacattttgcttatgttttgcttatattttgcttattttattttataattaaagagtttatgtatatgaacgccaaatatattactccgcctaattccagcagtgggattgagaatgctaatatcaaaccccctaaaaatatgttaaagatggtctcaattatcgtggacgcatcgtccatgtcactcagcgacaagagaagggacctctctcgtttgtacacaacatataaaaatccatcagagtatctaaatagcttgtggagaactctaacgatgattccaactacaactgcactaacaagtctgtcacctattaccattagtagaaacacctcggacttcaacaaagacattcccaaaactagcttactgcgcaaggaacaaattgaaatggttatgattatcacagcagtgactgcaaccataagaaaccattcaataaacttccaataaacaaagaattttttttcttctccatcgttgaatatgttttcatccaacggttctcttgaaatccaagaaaacaatctcattctttctattcggtacaaatggaagttttcccgataaacgggaacgattcctcaatgttaaaaagctaaattgtccttcagtttgatttccagttgtagcattctcaatatccatcactgttgtccaatactattccaattcaactattcgaagaagaagttttctaacctaagtggagggaggggtttgatgttccaagaagtaaagtgtgtaccttaatttttctcttatcttgcactgagcctgagattgctttgcaccaagcaatctgttttccaattttctttcttctttgctttgttttcttttcttttctttgttgtaaacgtttcgtactgtgcattccaagttctttttttttttgtaggcttccaagttcttttttgtaggcaaccaagttttatttgattgcttagctactatttctttttctggtaactgtgagtaactacttctcttaaatgcaaattttcaaatgttcgcttatgagataccattttcatagcgcttactatttaaagaaattttcaccttagtgatgaattttctcttcaccagttggcaaagtcaagttagactctcaccaattagccattaatatattttaggacaaaatacccttatcagtgaactaagtgtacaacagacgtgtaccgactagtttaataatcaagtttgggaagatgtatgcaagagggattcaagtgtgtttgcttcaaggcaagatcaaaatcaaggatagataaaatatatttatgattcggtttaagaaaagtttacattcatatgtataagtttttttttctttcttaaccaggcatcgtggtctggtggtaaaggaacctcgactgaggcgcccgccacccgggttcgattcctggccaccagggaattaacatgcggacttgctcaggcgccttagaccaccagtttcagggggcccttaagtagaggctcaaaaatccctgatcgcgggtttcggcccaatggactagtcagatcactgtgtggtctggacactgagttataaaaaaaaaaaaaaaaaaatttctttcaatataatttgttagattcaaaaaacgagttttgcagcatttaaacttgagtaatgtcttaatctcaaatagaaaataatatttattatagcgtaactaactaataaatgaaatgtcttgttatgtttatgtcttagataggcactttgaatatgaagttgaatttgttcaaaactagatccattttgatagaatgtgaaaaataaatcaaatcaaaactcgatccatttctttaaatgggtaatttacggccagaccttaagatcatgttttatctttaccatttggcaaaatcatccacatttccatgttttagccataaaagcattttctaactaaaaatatctttgccagcgtaatcgatgtacaatatctgtgtacgaaatcagtgagacgttttagttaagtacaatatctagttggttaattaaaaattaataataataaccaaactgtatctttatatgattttttttttctttttatttgctgaaattatttactacagtatttctttatttatgaatttaaatttttttgaaaactttcttattaacaaatttattttgcccctatattaccaaacatatttattttttagcataatttatatttttaaaaaaaaatatataataaaaataagagtgtttgtctctacagcctaacagttattatcaatcgggccctaatattttttttaaaaatgttgataggcccaaacttaaatatatatatatatatttttttttttgtcaaaaatggctttgattatataagattataagattcgggttttagcccttttaagtcgacgttaaacgcgcgtttcagagttttccggcaggaggagcaaactcgacgacattagcttctccgaacacaattttcctccggctttcataaatttcggggttacatcgtcctaattcgtctgataggttgccgaatttgtgttctccggtcaagtcaatgtcaggaatcacatatcaaatattgttcctcctccttctcgcctctgtctccttgtcgccggtcaggtgagcgagaaattctaggggttctattgttttccttagtatgaataatccgaccttatcggtttgtctgtgaactcaattgcaatggatctgagagttgagtttcaatccaattgataacttctctctcgctctgaatctaaattaatacttcccggatgaatcttgtagttgcttgccttccaatttttttcaccgattagggtttattgataaaactgttaggtgtttaggttatggagcaagtagtgaagagagaacattggctatgataaagccagatggagtctctggtaactatactgaagaaatcaaaacgatcgtcgttgaggctggtttcaatatcgtcaaggagatgcttactcagctggacaaggagacagcttctgcgttttacgaggagcactcatcgaggagcttttttcctcatcttgttacatacatgacgaggttggtaagttctgtttagtgtgcttgccataattcttccgcaatctctgctatgtctgcatttgctaatgtgtgtaaactgtatctttgaaacaagtggtccggtgttggtgatggtattggagaagcgaaatgcagtttctgattggcgtgatttaatcggtccaacagatgcggaaaaggctaagatatctcaccctcacaggttcgatttgttgccaaacacaattcttgactttgcaaactcaaatgtgagggctaagatgaatatagtcgtaagctgtattacttgaaatcgttctctgacttgttatgaatcattaggttgttctttgatcctatttacttataatatggccttctcttgtttctgtagcatcagagcattatgtggtaagaactcacagaagaactgtgtgcacggctcggattcaacatcgtcagctgaaagagagataaagtttttcttcaaggatgtagtttcaggtttattttcttcaccccctatattacttcttaaactcttacctctttcctcgattcaagtattatctgttatgacttatgatcactgaccaaccaaaccccattgtaatggcaggtgacattgctacacaacaacatgacgaactataagaaacaccaatacagcttctttatccatggtgtcttgttgtaatcttgtaactgttggttttatcttatctataatcaattaatcagatacattgtttcatatagcttgatagtattgatttggatcgacctttttgtggtttgctactatgttaagactatcatatcacaaaaatttcaatcattgacacatcagaaaatgtactttagatagagccgaagctttatgcattgatttttgtttttctttacttttagttttgcataactcaggcctagcccaagtaagtggggaatatgtgaaaaggcctattagattagtagtttatgggtcatattcctgaatttttttgcaagaactaaaaaataaataaattattgaaaagaaaagaaaaaacgtagaaggaaaactttcccgaagtagaaagctttccgaatataggaatcttattaagtgactgaaacgattcaaagcacaaaaaggcctcgtctcggtcaccaacaatactcacgtgatttcttcttcttcttcttctaccgtctttcttcgtttctagtgaatttgtgatctcgaggttttcctctctttccctcgctctttaataataaactaaaacttttttctgtgattgacgaccagagtgacgagtaggaattggctgatacgttaccggttcggtattcatcattggaagatttagtgtccaaaccagttaagctgataagcgttgagctgaaacagtgtaatttgaaaatcaacccaaaaaccaaactgaagagtttttaaacttactctcactaattctgagacatgttacatgtagatggtgcggtttgttaagtatatggactcggcttttaataaataggaggtcaggaacccttagccagaaacaacaataatttagaccggtttatatcagtactaatgtacaatgaccaaatgaatcaagacactatacgagacatacatacattcaacaaaaaccaacaaatactaatactgtaggtataaatgtataatctacatccaaaccggattagacttccctactaataaagtagtaaatatatttagcttcgagttacgttaatgttaaagttaacacagttagaaataataagaaaactcctatgtatatatgacctcaaaaatatcataaattaataattcctataaatttatacaaatattactatgataaaaaaaaatcattaaatatagtgatgtttccttttttttttttgtaattttgattgcattatacacattttaagttattatgtaaacaattatagacactacaattattttataagtcttttatcggttccaatcataatctaactttatagtcaatgatcacagtttcttttaaactctaaacataagtatcattttcatttggatagtgtaaaaagaggctattaatatctattgtcctgcgataatggagatcactaattaataattattacttcaaactgaaaatgtcatcttcacaagtgtattcatctaaattctttaacattgcatcacgaaaataatgttgtagtatcgaattcagtttgctattgtcgtttcatttgaaacggagaatgcaaaatgatagcatcaactcatggttgtcaaaatagctcaaaattcatggatcaactcaactcaactcaacccataaccctaatgagttgaaaattttgactccaatgagtttatgggtcaaatgagttattaagtcaattggtttaatgagtaaaatgagttgggttataatggttaatggtttacccaattaacccatcaagttttataaattgaattaaaccaactaaaatctttaaaccaatgtcaatctaagtttaaccaacacatctaaaccaatttaataaaatcatttttttccaaatttcttaaatatacaagcgatgaaattgagaaaaagtatactcgtaatttttccaccaaaaaacataaacccgtaattttcccgccaaaaacgtaaacccatgatttttccgccaaaaacgtaaacccgtgatattcccgccaaaaacgtaaacccgtaatttttccgccaaaaacgtaaacccgtaattttcccgcaaaaaacataaacccatgatttttccgccaaaacgtaaatccgtaattttcccaccaaaaaacgtaaacccgtgattttctcgcagaaacgtaaacacgtaattttccggccaaaaaaacgtaaacccgtgattttctcgccaaaaacgtaaatctgtaattttcccgccaaaaacgtaaacccgtgattttcccgccaaaaacataaacccatgattttcccgccaaaacgtaaacctgtaattttcccgccaaaaaagtaaacccgtgatttttctgcagaaacgtaaacccgtaatttttccgcaaaaaaacgtaaacccgtgattttcccgccaaaacataaacctgtaattttcccgccaaaaacgtaaacccgtgattttcccgccaaaaacgtaagcccggtaattttcccgccaaaaacgtaaacccgtgatttttctgcagaaacgtaaacccgtaatttttccgcaaaaaaacgtaaacccgtgattttcccgccaaaacgtaaacctgtaattttcccgccaaaaacgtaaacccgtgattttcccgccaaaacgtaaacctgtaattttcccgccaaaaacgtaaacccgtgattttcccgccaaaaacgtaagcccggtaattttcccgccaaaaacgtaaacccgtgattttcccgccaaaaacataaacctgtaattttcccgtcaaaaacgtaaacccgtgattttcccgccaaaaacgtaaacccataattttcccgccgaaaacataaacctataaaaattagaatccgtaaatattctaagtttgatgataatgaattaataattattaataattataattatttattattgttttataataattattaattaaattattacgtaaattggttaaaccgtttaacaactcaacccatcaaattaaatgagttatgggttgacgcaactcattttattaaatgggttgggtcaacctataactcatttaatcataaactcatttgattatgagttaagttgagttgggctacctattttgacacccctatattaactaataggtttagatttcaaactcgtattcttttaaaagatttaagtaacgatttaaaaagaacctcgccatcaactaaataggttttacagtaatacgctggttcggtttaacaacatggtttctgtttaattcgaaggatcttaatctattatttattacgtgtgggcacttaactaattaagatataagtcaattctgacgaattgcgtgacgattgagcacctattaacaacataataaattttattttatatatatttccagccacctaaaagaaatacatatgcttctaaaatggagtaaaattaaagaatttagatgcttaacacgtgtactgtttgaaaatcacaaagacaacttaagaactccctagattttgtgttaaatgacaattcacaagagtttaggcaacgtcttaagtctatgaaccacatattaatcactgtttaaagtggtccctaatcctaattcttgtcccaatgtccccacttattcttaattaactacacttttaatcaattctgtgtgcgtgtcagtgttttgtcgctagaaacattcggatttatgtgtaactttacatttagttagtctcgatcttgttaaagatacttgtaagtaattatcaaatggtttaagatagtgatcagaaagaaaaaagaggagaaggtgggagagcaagttggagtaaatgacaaagtttcatggagaccaagaaaatgtttgctatccaatgatgtcacttcattcggtaacatgaaattctattggtaagtgatgatcattttatattttattttacttacacatcttgtacttgtaagcaagttgaccgatccatagaggtgggatgaattttttactatggatattgcgaagatgtattatctattaattgattacaaaaatgaaacactaaaattaatatctggaatcagaatccactagatccgaatatatatatatatatgttcgcagaaaactgaaagtatttcgatgctaaactaaatgagagttttcaaatacataaaattttatgttaacgaaaaatgatctactgtatatcgttcatgagtataatgagacaactacgtttatatataagattatttcacgagacaactccgtttaaacatatcgtcatgtattcaatcaatatatcaatttaaacacacatttttgcttactacaaataataatatcttttcttaaaaatacattttgaatgcgatttcgctactaaacaaccccttttgaaaccataagaaaatgtgcttcttaaccattgactatcaaaatgtaaaatccggaactccttaaaactaagagaatctgaatctcttggatttgttacgttatttgatagtgatacttgtctaataaattttaacaaaaaaaaagatacttgtctactaaatagatactagatatatatcatatacactaattttttttaaaaaatgttttttaaacttttatactcgcatctaaaatatggtaatggcctttaaaagtcaacccgacctatttggaccgacagaagattgccaaaatagcctctgttctcagacacgtgtacatattattcctctgccatttacgtgtgtatgacatggcgatctttggttggatattgtacgtgatttggagtggtgtaggttggcccacaacgttttcttcataaacgaaaaagcgttcagtggtttagtttttttactcttatttataaaatttcactttccatctgtctactgtctacttctcaactcttttttcagtacgtaaaaatgtatactttaatacgtttaaatatacacttagatctcatagtctagataatcgagagtagaaaaagaactcaagaattcgagagttttaaaaaaactcaatagcttttgtttttacgttgggttttcaaacttcatgcaagtttgagtggcgattagctaagcaatggatattagtcaatagtttgtattttttttttgatgtaagttacaagattgaaaaactatttgccctaatatataagggttaaagacttaaggggacatcgacacgagatcttttcgtggattttccttatttttttcgttctttctttctgactcttttcctttggattttctattcattctttgaaaagaacatagcttctatattaattttccaattttaataatttttcccatattctataagactatagtggatacataattggcgagcaataatacattgcatagtcgatcttcctaaacttggatttaaccggcttgtctatactctactatctttgacgtttagtttgtatcattgtatgttatgagttatgacactgaattgacataaatgttatccgtctaggttaaatgcattctccaaaaccaatattacacaatgttacagaataattattctccaactttctcgattacagattaagaagagactaaagccttataaatataagaattttggattagaatcagataacacaatttcatttattcaatcgacaataaattgagttactaattaatatctgaccgaacaaaataaaagtgaaaaaaagaaagagaagagcaaacgaaaaaaggaatgtgaatactagtcccaacaagttcatattatatatgtaattaacaaaattcatgagaaccctctccgtgtccgtgtgtcaccatagtaaccattgaatgtaatgaatttctagggattcaactagtaaaaacagatcaaactttagtctatatatcgttgagttggctccactgtgtatgagccgagatcaaagccgtgacgttctctccgatacatgggttaacaattaattaactaagttttttggggcttaaacttttaatggtaatacaattaatttatgggccatagaagaatgttggtggactcgtttgcttacgtggggatgtgtgcattaatgtgggtttgtgagttgtataaagaagcaactgtgagataacatctgaacacaaacttacaagaacagtttaaaagtttttttcttacttaaaattctctcttttaagtagtcaaagtttggaacttgaacaccataaaattcatcaattttactccaacttgtctaaaaatctaatcttttttgatcactataataaccaatcttgattcatcaataactcgagttgagaaatatatacattgatctctctgttacagtcaattgtcagaaaaaaagaaacatgaaggttagttttctaatccattgtgtttagttcgatcattgacttttttctcagatgatttctcaagtgttttcttctggcttttgttttcagttcttcgggtggatgcagaacaagcttaatggggatcataacagaacaagcacttcctctgcttcttctcgtaagtttttttcttactttcataaaaacttaacttcaagattatattgtctactagggatatgtgtaaacaatgccccgagattcttgtctcgtagaatttgcttgtattatatctcgttgtaccttattttgacaagattcttgtctttgatctgaaattattttgctgtcttgcatcttgtcttttagatcatgtgaagcaagaaccaagagaggagtttagcgactggcctcacgcgctgcttgctattggaacattcggtacaacaagcaatagtgtgagcgaaaacgagagcaagaatgttcatgaagagattgaagcggagaagaagtgtacggcacaatccgagcaagaagaagagccttcttcctctgtcaatcttgaggatttcactcctgaagaggttggaaagttgcagaaagagttgatgaagctcttgtcaagaactaagaaaaggaagtctgatgtgaatagagagctcatgaaaaatcttcctttagatagattcttgaactgtccatcgagtttagaggtggataggcgaatcagcaatgcgcttagcgctgttgtggattcgtcagaggagaataaggaggaagatatggagcgaacgattaacgttattctaggtagatgcaaagagatatcaatagagagtaagaataacaagaagaagagagacataagcaagaactctgtctcatatcttttcaagaagatttttgtctgcgcagatgggatttctacagccccaagccctagcttgagagacacgcttcaagaatcaagaatggagaaggtaaactaggaacgaatttcaaattcgtagtgtaaatatcttttttaatatctacctctgatcaaatcaaattacagttgttgaagatgatgctccataagaagattaatgctcaagcctcctcgaaaccaacatcattgacaacaaagagatacttgcaagacaagaaacagctctcactgaagagtgaggaagaagaaactagcgaaagaagaagtagtagcgatggatataaatgggtcaaaacagattctgattgtgagttttcatcagatcctcattatttttttagtaaaactcaaaaacaaacgactgattctattttcttttgattacagtcatagttctcgagatatgatccaaccttcatcattcaagctcttgcaaaatcttcttccaagtataggtaattaagacacaacgataaaatctcttaagttacaatgtttttctttcatgaactcatgcaagatactctttcatttaatgcagattcaaaatcttctcgagaaaatttaaagaagtaatgaatgagtctcccatttcagaggaatttttttggtgcatctgcaaattaagccctggacgtttcagaatgtttttaacttctttttttgcatgatttgatctgtgggcatttgtgtccatagaaccaaacatgttcttgaaattgcgtacatgtgtagatatgtatatgagatgtcagagtgatatacatacatacctgtgtgcgtgtgatttgtgtaattttaaggtggataacctcagcttataaagattcaatcattcttctttgttacattatttgtgcctttggttcactttttatgtaggagtcaagtcaactcttgagatactcctctctcgtttctccttgatgtattatcatatctataaagacattggaatatagcttttcctagctttgttcaaaatttgaaaaaattgaacgtttaactttagtaaaaagtgtatttaaaatagagtttataaattcggtattacactatcaattaatatataaattttaagaagatagattattctttttcgtcaattggaaaaaaattattcgaaaacatagaatatgatataaatctacgtctataagattgaaatttaaggttagtgcctaacgaatgtcgaacatttcaaaggaatattattgtttcttgattcttcattagctttttgaaatacgaaagttttgctttcaaaataatatggatcttctcattcaaaggacgaaaactgccttgatgatgatctctaagaccgtaacttaaaatatgggttggtgttggcccaaaatcaatgttaagttcccaccaagcccatgccatattctccaatagagtatttaactattaatgatataaatattctaacagtaacaacataagacacaattacaagtttagtgatatatagtgttggaatataattataaattcgaaagaagtggattatgtaatgagaggttgaaacgggtcaaatattagcgtagagcatctgtggcgtttcggttcaatgtaaagaaaatatcatttttgtttttattattaaaaccaagacaagagttatatagtactatatcacttcatgatgatgtgagtctatggtcgaaaattttgagaagcaagtaccgtgtcggtgatattcataacagagcgtggatggtgtctaaaggtacatggtcttctacatggcgagagtggggaggagacaattctacacattttacgggactgtccggcgatggcgggaatttggacccgcttgttaccagtacggagactctcttctttcttttcgaaatcgctgttagaatggatctatgcgaatttaggagaggagatagagattaatggttgtccatgggcggtcactttttcgcaggccatatggtgggggtggaaatggcgttacggtaacatctttggcgagaacaagaagtgtcgggatcgggttcgttttattaaggatcgtgcgttggatgtttggaaggcgcatgtgcacaaaatgggagtgacgacgcggacagctagggaggagagattgattgcgtggtctccgccaagggtgggttggtttaagctcaatactgatggtgcttcgcgtggtaacccgagactagctacagcaggtggagtagttcgagacggggatggaaattggtgttatgggttttcgttgaatattggaatttgttcggctccgcttgcggaactatggggagcatattacggtttaaatatcgcttgggagcgcggtgtcacacagttggagatggagattgattcggagatggtagtgggttttcttcggacagggattgatgattcgcatccgctgtccttcctggtgcggttgtgccatggcttactttcaaaggactggtcagtccggatttcgcatgtgtatagagaagctaatcgtctcgcggatgggttagctaactatgctttttttttaccgttaggttttcatttgtttaattctactccggatattgttatgtcgattgttcacgatgatgtagcggggtctgcgtacccccggaacgttcaagtgtaatttttttagttttttcagttttaataaaaatgggggttcgcccccctcttctacaaaaaaaaatatcactttcaaaaggacccattcgctacccaatttttctaaaccccagaacgttttttttttttccaaaacacaacagccacttggtctttgcaacaatgcaagtagtgtagtggcgtagctaggggtaacgagttaccaaaccggtttgacaatctggttcgatcaattggccgatcactcggtttgctctaatcttgcttcatttagtcccatcaacaacacttattaaactaagtcacatctaaactttttatatctttggtatcattttccccgaacacgtttttttgaacgagtcgtagttttgaagcaaccaacgaacgtattgattattatgggcatccgtgaaaggggcagttcggtcaattgatccatcaattttatttttgaccaaactgattaggtgatcttaagatttttccttttttctttctataggaaagtgggaaaaacgcgattcacacgatactgttgctagtgcgtcgtacagattgcgatacgtgtcacaatcttgacggtctgttctatttaaaccacgtgttttaatcaaaaaacttctgtcggatcgtatcggagactttgaatttttatggcacatgaaacttcgtaggggtttgatggtaggatcccacattggtccacttactattcaattcgcaccgccgttaagtttgttaactaacgtgaggaacgtcgcggtgatgtaaaaaaaggccatgaaagttgtttctattacgatgatgccatcactggagttggtaatgtgctcttgtggaagggcaaattttgtaaatacgatcaaatttcgagtcttttacgaatttgtgacatacgccgtttaataacgtttgccgtcggttctgaaatctttattctttttctcttttatcgttacgcgtaaggaaaacgtgcggtaaattctaaccgaaaatatatataaaaaagtagtccaattttgaaatctggccgttgatggtagacaactaaactgtgccaaacaagaaacaagaggtgaacatatttttatgataagacagggcaataaatttgttgtaccaactcataaaacaatagataaattacttgcacaatgatggattattaacattaattttcttactattaatcatggatgaaaattcctttcttcacactagatatagttctttaactagttaaaaatgcatgcgatggaatattactaaatatgatataatctcatggctttatgtaagatttgttttttggtttttttggttgttgttaataaatttattattgagaagtttaattctattttggtcacaatatattgaaatatttttaagaaactaaaaagttcctatttatttttgttttcattaatttatgagaggctattaaagtcacagaaacttattgggtgaatgagtttataaacacatgagctattgagctagtagcctcttgtactcttccattttacgcgcaatccacgcaccaacaaaaagaaaagaaaagaagagataaagaatatctttaaaaagtaagtgtggagaattctttcttctcaataaacaacaacatgtcgtcgagcaatgaaaatgctaaggcacaagcgccggagaaatctgactttacccggagatgtagtttgctcagccgttacttgaaggagaagggtagtttcggaaacattgatcttggcttataccgaaaacccgattccagtctcgcgttgcccggaaaattcgatccaccaggtacttttattatctctttcttctttcatggccgccacttggtaatagtactttaaaaactcagttctgttactacttgcttttgccagatttactacttttgtattgtttcttcatttgtaagtcagttccttacttcagaaataatttctccttgtaattatgaagacaagtaacaaaaataacgaataagttgatatagaaattgattgagatgtggttaataaaattccaaagatataagatgctatatcatttttctaaagttattatagttcacgaaagtttttattctctttatgcagggaaacaaaatgcgatgcataaggcagggcattccaaaggcgaaccctctacctcatcaggaggcaaagtcaaagatgttgctgacctcaggtctctccttttgttccttgggaatacttgttgtttttggttattggagattagagaaaaggataatcggttaatccggttaaaattggttttgttctgaaatctgtttttggtttgcagtgaatcacagccaggaagttcgcagctgaccatattcttcggagggaaagttttagtatataatgagttccccgtagacaaagctaaagagattatggaagtagcaaaacaagccaagcctgtgactgagattaacattcagacaccaatcaatgacgaaaacaacaacaacaagagcagcatggttcttcctgatctcaatgagcctactgataataatcacctaacaaaggaacaacaacagcaacaagaacaaaatcagatcgtggaacgtatagcacgtagagcttccctccatcgattctttgctaaacggaaagacaggtatttaaccttatcatactttttgaaacttgttttaatgttccaaatttccaatcactctagttagttcaaaactcaaaagtttaaggatcctccctctgatataagttctcctaaattatcctcaacaagcctcgtaatttacgttattaatttttctgttgcagagctgtggctagggctccgtaccaagttaaccaaaacgcaggtcatcatcgttatcctcccaagccagagattgtaaccggtcaaccactagaggcaggacagtcgtcacaaagaccgccggataacgccattggtcaaaccatggcccatatcaaatcagacggtgataaagatgatattatgaagattgaagaaggccaaagttcgaaagatctcgatctaaggctatagtaatatttgctaaatttcttgtaggaactgagtttttagattaacgtttcgatttttctgacttatctaagtgattttattttgctttgtactacagtatgtaatcttattctaacttgaatattcattcataaacacaatagacgatagtaaagttatattataattagttaactacgtacaacacttgggagttaaattacataacgttaagcgagaaatagcaaattagacaagaggaagaatatttaggagttgtgaattgatctgactgcaataacatgaagaggaatctgactgcaatcgtaatgcgggtaaagatggttgaaagtgatcagagctcctttctaatttatttagggtgtaatttatgaaaatgattattattggagtgtatatcaagttttcactaaactcaggggtgtttattgtaattagttgtcaggttcaagttcattgaaggcgtgtctgatttggacagtgattgggcctgagccataagtttaacgtgggacgagttcattggctgttgctttttaaattttcttacagcctgtgactttagctaatcgatgtgtaaaaataataaatccaataaaattcgtaagagccactcgattgcttccttcgctttctatcaagagacttccttttttttttcctgttcttcattttttttttgttattaatattttgtcatttttcttacatttttctcgaacaccgaaaacactttcgaaccctaaaagacagaacactgtgtcaattttcattacctgggaacgaaaagcaaaatcaaagacaataattttttccccgagagagaaaatgcagaggttgaagcagcagcagcagcagcaacaagttatgatgcagcaagctcttatgcagcaacagtctctctaccatcctggtctccttgccccgccacaggtttgctctattcttcttccatttccatgctcgatttgggtttctaggctctttttcccaagctcgatttcactggtttttctctcttttttgttgtataaggtccaagattaggaactcgagatttttggtttcattttctatgattgaagatgcttgtttctcttgttttttgtttcatttttgattggtcaaacgagaaaaagttttgaaatttatggggattaccactaatagacttgcttcttgtgtattcgttacatttcttttaaagtgtttgtcttattatctgatatttggttcaacaactccatgaaaatctttgaggtgagactgattcgttatcgtagcttagttgctgagactttaggaagtaaagttttttcctttatttctttctttttcattttctttggcttcctatttttttcctttttgcagatagaaccaatcccaagtggaaatctcccccctggttttgatccaagtacttgccgcagtgtgtgagtgttaggtttcgttttttcttttggtatttttgttcactttttatgtatgttttggtgttttggctttaaaagtttcagtagtgaactcaagttttcagtttgtcactctcaaagctagtccagggaaacacttctgcattgtagttatgtactatattatatagttcatacttgtacagttgaatttgacaacgtttctctaaagacttgtttctattttctagaaaaggtgattctttgttatgatgccctcataggtgattcttcttgatgttgagggacttgtagccctgctaatttttatgtttttgtttcattgttctgtttcttgtttagatttttagtctgcctgcctttgagaaattgcaggtacgttggaaacatccatattcaggtgacggaacctctgcttcaagaggtttttgctggcactggtcctgtagaaagctgtaaactaattaggaaagaaaaggtgtgttatgttacacttttataacattctagtagtaatcttcaggatgtttaatcttttatgttgaaacttttgcttttggtattggctatgattgacacatttatctgatgcagtcttcttatgggtttgtgcactactttgatcgaagatcggctggtcttgcaatcctttctctcaatggaaggcatttgtaagttaatggacatgattattagcctttgggcattttagcatgaacaagatactctgttttccaagttttggattacattgtttactctaatgtgcaggtttgggcaacctatcaaggttaactgggcttatgcgagtggccagagggaggatacatcaagttggttcacaatcttatgcttgatttcttgctaaaacagtattttgggtgttctattgatacaataacgcacttctgtgatcttcatgtgcaggtcacttcaatatatttgttggggatttgagtccggaggttactgatgcaatgctgtttacttgcttctctgtctacccgacttgctcgtaagttttttataccatcctcagcattcttgtattggaaatggaagtttaagatttgcagaaactcttccgacaattgctattgtatgtagggatgcaagagttatgtgggatcagaaaactgggcgttcaagaggatttggatttgtttccttccgtaaccaacaggtacttgactgtctaactctcagtccttgtgtatagattggcttttactttaaacactgatcgattgctgcaaatcttatttccttatgcaggatgcccagactgcaatagatgagataactggtgagtgttgcaatttgttttcccccttgatagttgatgttaatattttgttattttagctttgtgtttttgagcttattgtaattggtgggagattctcttctgcttttcagggaaatggcttggttccaggcagatacgttgcaactgggcgacaaagggagccacttctggtgaggacaaacagagctctgattccaaaagcgtcgtggaacttaccagtggtgtctcgggtatgtttaactattacctatcatgaaatagaaaatcaaatggaaatagagaaaagcctcaaataaacttaattcttaaccctttgatgtttatacattggcttatttgttcctgcagaggatggtaaagatactactaatggtgaagctcctgagaacaatgctcagtacacaactgtttacgtcggtaatcttgctccagaggtaaaatagaaaaactgttataggtattctgtgacttaactcaaccatcatccataccttttttgaatcaaagatattttcgttatccaggtgtcccaggttgatcttcaccgccacttccattcccttggtgctggggtcatagaggaagtccgtgttcaaagagacaaaggtttcggatttgtgagatactctactcatgtagaggcagccctcgctattcagatgggaaacacacattcctaccttagtggcaggcaaatgaaggtaaaactaactaacttaaactgttcttttgtgggactcaccattctttttggtttgggaatgctaaaattgttgtgttcgttgttcctacagtgttcttggggaagcaagccaactccagcaggaacagcttcaaacccgcttcctccaccagctcctgcaccaatcccgggattctcagcgagtgatctcttggcttacgagaggcaactagcgatgagcaagatggcaggaatgaatccgatgatgcatcacccgcagggacaacatgcttttaaacaagctgcaatgggagccactggttcaaaccaggcaatatatgacggtggttaccagaacgcgcagcagctcatgtactaccagtaagatcttcctcggagccgttacttgagcgaagagttctttcttttcttcttttttgttatgtaacgtctttattgtatctttttcttttcttctaacttatgttcttgttataatgttatcatgtagctgtgggtttgtggtttgtgttccacgttttttcttttgttaactactacggtttacgtttttgcacatcttcaacttctttctctttctctttctctaacttaatcttatttattgggtcgtaagttcgtatatcttatgtagaaccattataatttgaagtttttacctctcaaaattatgtttatctcatttcatattataaactcaacaatactgtgtttaaatggaatcaagtacttctcattcaatactacacactttgtacttgtgttgttgtaaatgtaaacatagagacttgagttctgtttctctgttatcttggcttcgagtcgtttcctttgctgcggaatgtagaaagtgagaagaatgatcgcttaaaatcaccatctttcactttaaagctcgcttgatgatgatgtggttgaatcatattgtttgaagctgcgaaacacaaaagacaaaactatggtcaagaggagttttcatgacatcgttctaagaccctaatgaagctgaaatgtaaaaagatttaataccttgttcatcctcagaaagctgactctgagaagatgccattcttgatttccttaactcatccgatgatcgataggcacaatcatcgtctccttcagatgttgttacagagacccaatccattagactatctgcagcacgagttttcttcccaaacttaagaaaacgtttgatccctttcgttaaatccttcctagagttgggaacaataacaggactctgagctgttgttccccatttctttctcattcttgaactccaagaagctggacttcccatgggagaatcatccactgaagcatcaacatccgagtgctcatgcggataagagaacgcgtgttgcaagtttgagctccatgaaagaggactctcactaggtgaatcaaataacgaggcaacattatgctgcaatgttgaagaaggtagagtattcgcctgtaagtctacatgagaaactgatctcaaagaagtgtagttttcattctctgatgagttctcaactatttcagtaagtgaaggcgtttcatcaccaatatcctcctcaactactagagtttccatttctctagcttcttcttctcctttgacagggttctccaaaacttctttttcttcttcttcagcctcagattcagtgtcatcaaaggcttcatttttcaaattctctgatacatcatcaatgtctgtgttctgcttctgattcctctctttgttcatcatatcatcagaatatagagttgtcaactctgtgaattctatatttgcagagaagcttttccttagtgatcgtggtcttcgaggcataacaggagacggtatatcttcctttgtagtcttcttattaccatttctcgcctgtgttcgcatcatggtagtagtatttctaccagctaaagaagatggttttgtgttttcctttttaagatcagagaatttgggaagagaagattgtgtaaccagttttatctctgatgtttttcgtcctctcccagaagtattagtgtttgtgtttgaaactttacctgacggttttgagactcgtgagctcccgtttggggatggaacctttctaacttgggagctcttagaagcaccttttccaatggattgtccactgactagcttatctttttcgttttcctcttcactctgtaatgagcttataggatgctgtaaaaagattaagaagaatcactaaatcaaattacaaaacagtcagacaaagttttgttgtcatcatcaacaaagacactaaatgatttgattacctgatactttttcgaacttgtccgagagttaaaagatctgaacttctctgcacgttggcgggtacttgatatcgaatcctgcctcttcatggaagcagcagaaaacttagccttcatctcggttctactttggtcaagagcttcttgcattgacttcaacttactttcttttgaactccattcttctcttagttttgcatccctcttcttcatatactcttcatacaactttcctttagaatcatctgaaaatcttaactcagataagttcctccgcattacaacattcccgttgtctttatcgttaccagctgattgatctcctggaagaatccgtagttgatgctcggcgaaaatcttttcaagatcttgtgcttttattttcaactcatcgttaaaccctggagggctttctctaggcattcttgtcctctgtgtttgatccacagatgttgcacgaactctattcttgtcaaattttccagctgcatctgcatttacaaggtcatcctctacaccaaatgatttttgtctctgttcagaccctgcagaatcattaagatgtacagttaaaagctatcagtttaagtattcaaaacactgaatttgatatgatttataagatcttgtaaatttataaactctcttgggtaactttctctatatattctgttaactcttctgctaaaactaacctgcagaaaccggttttggagggcttgtcaaggcttgtttcttgtctgatggaaacagctctttcttcctgccttttgattgacgttcatcacttttgatatcaataccacctgctatatgagctgaccgagagcgcgaatggcgataaggaaacatgactgatgattgtgccacattgtgggatttggaagcatagctctcgtcttctctcggcatggaattgccatcagtcatgaagtttcctggcttatcaatctggttttgagaatcatcagatatagtagaatagacatcatcatcgtcctttttgctgttctcttcagactccttggggaatgtggcatcaggaatggacgaaggtgtacttaagggaccttcttcgttgctaccactatcagatttcttattttccattgtaaaatcaaagctcatgtcactaacaatactccatcttctcaaaacagacttctcagggaatgcagggacagttgatgaggtatcagaggaaggtctcttcaattctgtggatttcgcaacaaccaccggtttgtttcctgcagagttggagttttccttttgtttgctctcaaagaggttaatcctatcttgtacgctaagtctccttgtatgatgaatgggcttaaccgttgaagactcatccaaactctcatctttgttctcctctttatcattcttagtacttagctgttgactgatgtttgtctcatccactgatgttcgtgtattggtattcacgttcttggtgatgaggtctggtcttctttgcgatagtgaaatatatttgctgcatgcttcactgatgaaagaaatatattctgatcagattccaaacatagttgcaagaaaatgaataaccaataaaaaaaattgcttacttcaaatgatgtgcaccgaatctatcagcaaaacgttggagatcggaaacagtttgagggtcaaaaccattagctgacgcgtgagcaatagccgtggttaagtcctttttgattgcctcgagtcttaaatctatagctcttactagctccttcctgtacatatacaaagaaaaacaatcaacaaaacagttttaagaacacaatttgattcaacgtaaaaacagagacatttacttactgtgttgcatctgctacgcctccatcatctagaacataaaaggagaaaaaaaaagttatcaagtttggtcacttgtaacttgtatgcttagaatttgatcaagcaaataagaaactaaacacaccttgagaatataatgtccgagctgcttccaactgtgacatctccaaatcaaatgtattgactctttccaacacttctggactattaacatattgaacaaatctggaaaacaaaaattacacaggttaaaagatagctaaggtaaccaacattttcgtgtaaaagggaaatgcaaaacgttctttgagacctctcgagagttcttcttgtgaaccaagattcgccattctcgctttgttctacttccagtctaacagaggattgatctctctttgaagcttgtgattcaataactctcaaatgattcacaaatggttctatcagtcctgaagccagtttctctctttcttcattactcgatacaaacagctcgcatctgtaacacaaatatacaactgagaccaaacatacaagcatgatcaattgctacagaacatacactaacagaatttactaaccgtgaatatttcggtgaaagctcaaacacagcatagtctagaacagtatcagccttcatatttatgacacaagtcaaagcctctttcttagaccaaaatgtgaatcattcataagaacctgaggaaaccacaaaagagtaaaattgagtggttaatcaacaaacctggtcaatctcataagactagtacgcaaattaaatgtaaaaataaaacctttacccaaaattacgaaacagaaatcaattcaacaactacagatgaaaatgcagctccattaactataagaatcaaaaccgatgcttcccagatctgaccccaaaactaaaaacccaaaaagacaaattccaaaaaatcccaacttgacacatccccagaaaacagaaaccccaaaaattctgatactaaaaattaggcaaaatccatctctagaacacgctgattatgctaaattgcagaatccgatgataaaaaacaatcaaaagcaagaaacttgagctgctaaagaatcaaagtcgacgaacttacgacataaccgatccagcattgaacagaattcgatttcttccgatcactctccaaaatttagtaaacttgagttctgatcagatatatggatgttgaacagaaaaatctaagaaacccaaacagtgtctgaatacttgttgtcgttactacagagtctacaatggtttttgctgaaaaatgaaatattctcccaaatggaagaagaagcttgctttatctcttctctgctctttctctctatcaacacacagtctctttatgtaagatactgtagatttataatgtgtggagaaagaagagaaagcttgcttgggacacctttcacctttttatcttgccttcgcgtaacagtctgtaatgggaaaaatacgaaatgacgcagagtcgtagaagtcaagacgaagataccatccttttttactttaccaaattaccctccgagtaaaccgggtttaccaatacaatgacaaccggtttggaccattttgtctccaattatgataaattaattcgattttatatagttcaaaagtaagcaatacataaaaacaatgctagagattcgattgtatttgtagtctggttaatgattttggtataagatgtggtttattagcaacgggggcaatcttgtaatagccaaacttagttggagagatgtggtcaaggctctacactatgtggaccaaacatggaaacatccaatgatcgaattcttaacggtaatactttttttttgggaaacaaataaatttgagaaagacaacgaatcgaaagtcgcatttatatttatttttgtttaattttgtcaacctcatatcttttttttttgtttcttctgatcaaattgaaaatatattttctctattttgtgtggcaacccttaaatgagtccaaaattttcttagtttttatccacttctttgccatatttctttttcaatgtatggaaaattttccgaaaaaatccattctctcaacaacatgaaaacatgtaaaatcttcaagatttatcaaacgatcgtatctgtaagaatataaagtcttctttttaccataagaaaatgaattctaataacatatatttttctagaaatcgtacagtataatgtgcatatgattttctaatatctgatatgaatcttcatggaataattattaacgacaacacgtgatgtgaacgcgtaatactattcttcactttaacaaaagaaaaaaaaaaagctattgaattcgtcacattatcaaagatatatctaaatatcgttttcatttcccaaattggtgtctatgttttcaaataaatatgctacatcaacattgaatcaaatgtgacaaaagtctaaaagtcataaatggccaaaccctacattaaaccccttattcatgaagtagtttgaagcaactaattaagaaagacaaaaacaactttgaaaaataaaatctatttatttcctacaacaaaagagacctaaaagtgaagaagaagctgcttctagattgtcggtatgacgtaagcttaagcacatgcgacatgttcttctcattctctttcacatcttccttttgtcccatgtgtcttttcctcaattattaatctctctttattaatcttcctccatactaacattaatagtatattgatattttatataactttgacgaatgattgattgatcacaatcaaaatcaattgattaactaaatattatacatgtataaaaatggcaaaccggttagtgtataaaccaaacactactaatccacatgcgagaacaggatggttctcaaatgcatgaaatcttttcccttgaggaaccggaagaggaaattagattggtttagatgtaccaaacaaagcaaaagtatgcagcttttcttttcttcaccatggaacccacaaaccaaagcaggggtggtttagttgggtccagctatccactgaaacaaccgcatcatcaagcgactctgtacagaacaaaaaggcaaaaataaaaccccaatgagtagatccaacggtgcagattggaacagtaagaaaaaaacagttgtcccaccatctgacgagtcggtgaatacacgtgtgtgtctctcgtttggttggactccaaagagatcaaagagaagagaacaccaagagaatattatagggccatttgggttcaagtataggtacctaaccaatgtacgacataaaattctttatactataatgtaaaaacagagcatgatttttacaaattatagtcgaaacctgcaaaatattgacttttctttgattacattttgatattttaagttattatttcaataaataagctgaaagctaataagtaattgatccttattcagtttgcattttattttgcaagttcataatggaaacacgttatacaattttattaatgtattcgttccaccaatttagtactactaccgtactctcccttattcaatcacgaccattacattattaactacttataataaacttgttgaccaataaggataggctaaaaacaaaagattaataataccttttgattttttattttatgacatggtaaaaacgtgcctcaaagtgaaaagacaatgcaacgattttttagccatcaagtatcatcaactcctcaggccttgttttttacaagctaaaaccaagaacaacaaaaacaatcatacattgctatattgttcaacatttacggcaatctcaaggctttgatccagtcaatttctactcggaaatcacctgctcctgatttagctccaactgcaccaccttctgcgtttacggacagtgacatacctagaacacgacctggattcatctccatttccacatctataacatttcctctccatgttggcaagtatcgagctagaggaatctgatatattcaacatcaggttattaataggccttagacgacaagtgaaatattcaagttgattcataatggagatctgtctttttggttatgttttcatctaaagccgaaggttttgtctaaagagagttaaaaaacaaaaaaggatgtgtataatgctctaagctttttgttggtaacatctatagaagtagtaggacttgccttagcagtataccaactgtcctttggagcaaaaacaaaagcttgccacgagttatcttctgactgtcccggtgagttcacccagttttcggtgtagatctgaatcaaaatcaaggtttagtatttgctcctacaacatttgttttttcaactggagttagggaaaagtgcgtatcaacataaaacttacagtagagatataacatcttccatctcctctgatcctcagggctattgcatcatacccatcgagatcaatgaagccatcaaactagaaaagcagaggatgctagaattagttgcaatagtaagctgactcaaaaagtctctcgtttacaaaaccaggactaagatatagtaacccattttccttcttttcttcaaacaaagactgacatgcagaaaatatgttttgaataagaatggttagtaagataaatgaaagctctgtgttgttcaccttttttgagcgcattccacagaaaccacttcgactgatgttccattttgatccttcgctaaggtctacagataggttccccgaaaaaactcctataaaagatatttggatgaaaaaacatcactaagtggagcagtgtagaagcacaacgagtcaacgagaaattaagaaatgatgacatagaagaaatctcatattgttttattgatgaacttcatgacaacaagacatgctggagggccgatgatagatcacagaagaaattacaaagttgctaaccagtgcaatctgatccatctcctttatctgggatctccaaggaagccgaagataatcctgtcaaataagtatcaaacttcaaacaggttgccacaagataaatattaaaatgcatagcatattgtttacatatcaatgtaaatctgtgcaatgccgatcttcagaaatcttattttgtctatagttgttcatatggatcaccgaggcatggaaatgaaagggataatgacaacagaaacaatatcagatactctttacggagcagatgcttaaacctgtcagcataagtacctccatattcagagtcggaatagagatgccatttctttaagtcttctttagagtggaacttaaatatatgcttctctgcaggtggcacccattcttcaacgttccatgtaagagctaacagtttacagggtgaagataagtcagaaactagcaaatctttgctgcattcaaaagcataaaggctagtatagaaatatatatgtgatcccaaaagtttgtaagcattggaacatagaagcaacgttattgtttcctcaaacatcacttgcaatcagtcactgtctaataagtataagcacaagcacaaaataaaacgaaacatcaacacacaaaccaaaaaaaaaatcaaaagatcaaagaatcaagtacgacacatgataattgacggaaaagtggcaggcgaatacccttctttgtcgcatttactgaggcttgcaacaacgatcgaaaccttgacatgtctctgtagctgctttcccagatgaaaacaaagaaagcttgtctaagatatataaaaatgactgttaggaattaaagctccaatttttcaatggtaaacactaaatgacacacacacaaaacctcaatgatcagaaccagactccagaaaacgtataaaaagtaatgtctttgcaaggttagctatatcagaagttgacgcatcctaaacagaaaccatacgctagtgactaaagactattattaccctttgaagcttttcaacaaacaccttgtcagccaaaaatcgatcaaggtaatcacaaatgcagctggtgaaaaaacaaattgtccccaaatccttcagaaaaacccgacatatatcacagacgctaataaaaaggttgccatatgaattcatattctgctccgaaatgcacaggaaagaaaaatctcagaacaagaagatctgataattagaacaagccaaatgctaaagactaactaaaactattctaaagttttagagtttccactaaacgaagcaaagatgataggaactcactcactggatttgccgtcaccgtcgcacaatcagcctctgtttaccgattaacagtcaaacttgaagaccaccaagctgcacgtcactgtttctacgccacgatgccgttttgcgagaccaatcttattaaatgggcctatttggcccaagttctccaatatattccccaatagtaaatccacaaagtgtccatttttttatacagattcaattaatacgaattttttttcaacgttgaaatacataattctttgtttatattcaggcaaagatatcccattatctacatataggctatagcttgacatgagatattaagaactacataaataattatgctggtcgagttaatgagcatcctatattttattattttattaaaaaccaccattatgattacgagccatacatactcacatcgtagtcatgtttaattaattactccaagaagtttatacctaatttcacttcacattacaacttggatacacttatagacgtagttagtaatttatacttaaatatttgtttccgtgacagcttgatgccactagaaaggcaagtaggacaaccgtccgtgcaattgggtagccctgcgcatcatcatgtggcggccacttttattctttcgaaaatctcataactacgtactactgtagagtacatgtatatcaaatggagctaatcataaaaaacaattttagcatatgttacaatttatcatcatttggggcaagatactactaccctctttcgaccgacataattataatattagttaaagattactagttaactctaaaaatttgctcgggagaaaaacaaaagcaaagaaaatggtctgtgcatgaccgcattattggatcatgtcgaatcaaattccaaaattaacgaaataaaagtatatatggatatgtatcgcgccgtcaataagtatagaactcagccaactcctcgacggatcctctttcgcgatcatcctcatcgccgtgatcagaggaactgtttttgagcatccataacaagtgctcgaacaatacgacttcgcaagctactaagacggtctcttggtcgtgacgttcttcgataaatctagacgaccggtcaagtagttcttggaaaagcggatgagcgatgacgtgggaactaagcatgtaaggtcttcgtgactttccgacgtaaaccacatggagatcctcgcactttgagacctcagatacggcggtagaggcggtacacatggttgaatggtggttcttggtcaaggaaggccatttctttatggcagacttgagctttgtcagtttaccgaatatagccattagcgaaagtctctgatttttagcaatagtagtagtttcttgaaattaagattattgttttgtgtatgttttatcaggaattgagaaactaactttcttggtacgtaagaaggaagtattgggttctttgtatttatattgagggacagggagagaaagagaacagctaagaaagataaaggaggctacaaaatctgtaaaactggtgtccccttgctctaaattttatttaataatctatattatatattatgtgtaagtgtgtgtggatgcatgttgatatgtgcatacgtgtgtatgtgggctggacaatctactcttgtgtcttgttgtgcaatgaatcggaccaagcaagggtgatcgatgatttttagataaagattacatcatgattgagataagatctccatgataattatatttagtgtcgcgcttaaagttacggttttggccgaaagaatagggtgtatagtaatttagctttttaattattacacacaaaatcttgtagtttagttattatatatatgtttttttgaacacaagcggtccatatattttaatatgtacgtatttaaatttatactttcttgaataaaaactaattcgacaattgaagtcataaaacaaaagcatctgtctttgatcgaactgcacattgtgggagataagctaattggtaaaagaagtatagaaaacctttataaagtgatccaaacttgtttttatcaatagtttagcctaagagaaatcaaacaacaaaatagtcgtcgatcatcattagttaaataccttagtgatagtgattaatgttgattaattagtagtagtaatctgtgtgatgatttatatatatatatgtataaaaagaatccagatataaacctgtttatcgcacgtaaacaataccctgcttatgtgcatttgactctgtgatcggttcaatgtactacactaaaatatttcttcgaaaatataatacgttttaaaaatactaatatataaatgttgacattgtgatgctacaattttgtaatcaagaactcgtttggtatattctgaactgtagacagaacccctggttctcgtagacaatgtagtgtataacatactaactcagttgattgaacttttattgttaatctaacctcatcgaattgaattctgaaacattgaagaaaagagctgtatatttttttttattaatctcagaaatatccgacagcttttggttttggtgggcgaacaattgccagccaacagccaacaaaatcaaattatttaatgagaagaattaaataaaaatattctgaacaaataagttagttgcaagagcaaattagccagttgggatgttcttgttcttcaagagtgcgttacaccttttccttggtttaaccagccaattaaaaagattttgtttaatgaaaagagtttgaaacatgaagcatctaaaaaaatcctaatcttgttacactttttcttttgtccacatttttaagtactctatataggaaggtgtgttgctgaagtcagcccattacacgacgtgtcaagaaagccttaggtggtatactacagaggctcctgtcgtctaacataaagtgttttcgggtgcaaaaagataaatatttttggggccagatttcttagaaattagccggtctcgaaacgcaggcctctctaacctttaaagaaaccttttggcaataattctatcaggatgctatgttttagtttgttggtaacttttcaacacaatggattcaaaggtctaataacacaatttattgccgcgcatgaattggcggttaataaattacgaaaaaaatggaaaaacaaacaaaccaaaccctctatatataccaaaaacagaaaaacagaatcaaactttgtgggtggtggtgaaaaaacaagaatgaaatctattttgctaagaatagaaagaaagaaagaaaaaaaaaagaaaacaagaaacgtggatctttacaaaggtatgagtcggatatttacaagatgtaactgttattctgtgcttttcctgttattacgactctgttcaaccctgccgtacctgccaagtaaccaccgttaccttcctgtgcaaggctcatttctttctccagaccctctttaccatgctcttgcggagaatacccaccgagcgaaagcatttgagaaaccaggtagtaaatcggaaccacccattataggaaactgtaaataatgggaaacaccaaacaagtcagtgtctttgtttgctttggaagaaaaatcgttaacttcaacaagaatgatatgtggatgaaggagatttacctcaaaactggagttcgtattagttaaagaagtgacggattcatcccggtcggtgaacaagttatctgacgaaacagactttgagctgcaggaaacatttagaacattacaaggcttacttagaaggaagtttcatgtctgaatattgtaaatgtatcagaatgctatacggatgagtgtttttacctgccacgttcaaatatgtcttctgccggcgtgaacttagttacgtatgagtgtgaaaaaccaggtatatcattgggcctgtgggaatcagaattagaggaactgccttgaaacatctgccctgaccctgtttctctcataagctcttcattgcgcataaccgagaggaagctgaagatgtgatcaaagaaagaggatgaaaaatcagacaaagtatgttaatgaatgcttgcaacaagttaatgagactctgattcataccttagagaagctggttcagtttcatagaatggaaattctaaattggttcctgagacacccccgtttaacccttcatatgtaggctgagaattttcgcgtaccagctcctccagattcaaatcacagtccataataatgttatcggaaaatgatcttctaattagtggcctgcaattcatatcagtgtattgaaccatatattaattcagttacatgactaatttctggtttagccaatttttcaacaaaagtagtgtacctcatattttcgatatctaagttagaaccagatcttccgatgttgtgctggtcagaatccaactcccatagcgctggcctccccagtcgaggccggaaatgacccaagaacctgtcaacaatcaactttacactaagcaaacacgtagcaaatgtaaagacgaaaaaacaagacaaaaagtttctaaaatggagcttacacattgatggcgttttgcttatcactgtcctgatacgcgttactgtagtaacgacgtacagctgtgaagatatcacgctgcctcatcaccatattccaattacctctcagatcacagaacatctgtataccataaactttctaaagttgatacacatagttcaaagatccatcaacagcctttcgtacgaaaaaaatgtgttggtaatcaatgactcaccttgctgtgtgcttccgagccaccatactgcatcgcaagtgtattacccatcttttggtaagcgtccatcagttctattgccagaggattattaagatcgacgacaggaggtcctgagatacctaatgtacgcagctgatgcccgagagaaaccaatccgtgggcgtactgcgcaaaattagtgcgatctaaacagtctatgcagtttgtcctcaagaccccattttgaagcagaaatatatccgccttcatatcttctttttctggactacttgcctcttcatcttgacttggaatagggttactggagcatggtagcattaatattagcactcagtaagaaacgtgcaatacaatcaaaattatggattagagctgttacacgaagactgcatttgcattagacatagcatacgaaacttacttgaaaaatgaatcataaattacttcttcagctcctacacctgaaggagctttacagtaaaacaggtcagttagttccaatgatttccttgaaaagatacacaagtggttgaatgcaccatcagctcctctgccaaattgaaggaaaaatggttagaaattctcggagatcagacttattacaaaccagtaaggtgcataaatgcagtactttttgtagtgtttgcttagatcaaaatggattgcctttaaacgatgctccctgtccatgcctttgttaataaatcggattgtctttgcaaactctccccttaagatggtttctcggtgctttttctcacctgtcacagtctgacaacacaaaatagcaacgatacactcaatctttcaataatccaagaacgggcataagaatttgacttttcctagaaaatgagagagcctacctttaggaggttgagaattattatccggttcccatacctctgtctcagattctgaaagtggtgttgggtagcctcataatttgcgtccttcttattcactatgaaccaaaaaaagacaaaaacaagagaatcaagatgaggcaagaaaaacctaaggatcccttttgcaaactcatatggtgcttacatataatctcgggctgtgggttgaaaacagatgcctcctgtgaccaaaataggggtatggagcctcgaacctgcacaactgatgttatcgggattttctgacccgcaggaaccactttggaaacaatctgctctgtctcaacatcattggctaccctgcctatatcatttacaccacgccttaaatatctgcacattaacaaataacaaggaggagttaagctcaaaggcatatcaagactagcccttatctacagagggagtatcgaaatatgatatttccaatattacaattatgttagagaccaagtaggccgtgagacaaaaaaaattcaaaaagaagaataaagatttcaaactgaagaagtaccttgtaccagcataatgccgtgaacgccgagcaatgatagtgaatacaaatttttcaccagatactgaacatttagtctagacaaagcagaggatcaatagactttagattaccaaacattttgaaaaatctgcagtctaaaccagtcacataggcatgcatttgattattacctgttgaaagaatccgtatatcaatgcaactgtccatatggaattctgcaggatctttctgatctcgcgtgttaagaaggagttccacacgaacattgtgttgtcatgagggtttcctctctcagtgttgcctatgttcttctgaagggaatacatgaggtgatatgtgtagctgaagtagaagtttttgctaagatccaccacgcttaagagcttcttgtacctataatagaaaggggaatacatgtcggatatgtgttctactaaagtttacacaagaaagttttcatctcgagccgtttaaaagaattatcgataaaatacctcagctcggcttcagacttagccacttttgattgaattgaaggatgtggaatcgcgatcatttgactctctgctataccataaactgtatggccacagatctcacccactttctttcgttttgttatcagcagcatataataaggctccaagaatctcacaaaccctgcaccagaataatcaacattgctccatgagttcacaacttttaccaaaacaatgagaaaggacaacaagcagttgtagtaaaagagactttaccaatgattccatagcaagttgtgattgctttaaagccaccagactcctcgttccctacaatcatccgtcttttaagttcgcgcatttcgtcttttgtataccttgtaggatcttcaaataaatttaactcattttggtcccttctatcaatcttaagaatcctcctaaagcttttgttctcatctcttccaatcaaataaaaattctgcacaacaaccaataaattcaccaacttcaaaagtcaaaatgtagtgatttcacatcagaaaatcaagaattcatgaagcaacaggctaaaataatagaaaacttagaaccaaagactctacattatgtcaagctaaaggcttaaggctctctcattcatggcttacactacaaccatatgaaaccgccaagcaaagagactcatcgaataataaaccaaaccaaaccatcttaatcttaaggagaattcgaatccaaaaccggagattaatgaattattatgcaatcatgtgaaccaaaatcaaaatccataaaccataacagtgtcaacgcaattatcggtaaatcagttgccgaaaaaaaagatccgcattgatgcaaataaatgttaatttaaaaagagacaaagaacatcaataagattcacataatcacagatcataaaccggagttaaatcaaaagaggaggagattaccgagggagtagcgtagagcttgaatttctgaagaacaggcaagtcaatcagttccggcctcggctcgaaccgaggctctgatcccatcagaccagataaaatctgtaaattccgaacctggagatagctcagacccggtttgaccccggatttcgaatcagccaatacagagaaacagccgagcagacgagtaaattagagcgtgaagaaatagaaatcaaaatcgatattcccagaaatttcggaattctggaggtggaggtaacgacgacaaagacgatttcggagaagaagatagagaagaagagtggagccgtcgaaggatgtgaccaagtcggagacccgtttgttattgttatgttaatatatggtaaatttattttgttttagcttctcgcttttattttgttaaccttttgggcgctaatttgccttttatttatagcctttctgatacgcggtcgtttctggagtacctcgttcgttactcgttaagaaaggctcttaccttttgcgtcttttgattttttctttaagattaatatataacatcaaactatgtaaagttttacttttcaccttttctaattgtcaaatgattttaaattctgtaaaaggcaatttcctctttttcctttctgtcggaaactttgagaattaattttctaaattctacatatgtttctttaaatgaagactatagtattagtttttaaccggataaaaactgtatctatagtaaaattactagtaaatcgactagtgcctcttttttttccttacgatggaatgtcgtagtctcgtagagatgcacgttaaacacatggagggagatattgggtccacattaaacccatataatataattcacgatgatgattttttcttaggagcagtataaataattcacgatatgatcgaatcgaatatatattagttattcttggtccggctccggcttccataaaaaacgactaattctaaaatcaataggaatgtcgacatttattatttattcgtaactcgtaagtatgtagattgctgattaatcttacgtatggaaatgtcaaaattactattaaacctcatgggcaatttctactgtgccaacatatctcactttccgttctaaggtatgttaggccatgcagaaatgaccacataacgcatgcacacgcatctcagtgagaatgagatgatctcacgcttaaaggcactccgactccgaccttacatcaaaagttatcatgatgtcttcttccctccgacaaaaattaaccgtatggtagttctgaaactcccttgtttacgtaggtaattgtatatttaaatttaaacgttttaattttgataactctaattttcttaattaaaacacaaatcgaacacgtaatggccgacctaatcgatgaattgaatgacgaaagtgtctaactcaatggatgttggacatgtgttatgttgaatggtaatagattatgtattctatacgcgattaattagtcttttttaatactacaaaccaaacgacttggctaaacatgaacagtccactcgattattatatatttttattaaattcaacaaaatttccttgtgtacgaagcaaactctttccaaatattaattggttttcaaacaaaagtacaaaaatagaagaagggaataattgtatgtaaaaaaaggagtgtcgtattataattatcgtaaaggatttattttctatttataatctaaacaagtaaacaactatgtcttttaattagtaaaattgtattcgaatactcccaacgtaagttttttttttggtaaaactcccaacgtaagttcttcacatgaaactgtttttttttttatatacccaccaagaacctgattttgtattttgtgtatgttgttgcaaaaccagacttaaattgtaaaagaagaatcttaactgccaacacataagatgaagattacccaacgaacgaaaactattatctaggtatcaaaagacaaacaaatgtcactaatactaaattttcgtcattatacgtttttaaatcacgtcagtttggtataagaatatacatattctgatattcaaaccaggtaaatgttatattatggccgaccgaagatagcctcgcaatgacttgatccactaaaacatccagaagacatcttatcatcttccactaataaaatttaaagaagacttaaaaacgaaaatagcaagtcaatatttaaaccagttgacaaacaaaaagccactggactttataaaaccctttacgaaaaagacaacaactgactttggcgtaaaaaaaaaaattatgaaaagaaaacgattggctctatcgtgtaatccttgcttgatttcttccacaatcattggcattgacaaaataatagagttttctttttttaaaaacaaagcaattttaacatttataaatgtatagttattacgagctatttaaatagagttgccttaaacaaaaaataaaaagagagagagagttgccactctgtttaaaacctaaaccacatattggtttggtaggtactgcttactcaataaaatccggttgaacaaatcctctgcttttctgcttcatttatcatttttaacttttcaagttgacccatcccactcttcatagaactccttaagatactcttccatgaacttgtgccttttctctgccctccttttacccgcctgatatgttttcaatccacattaaatctcaaatcgaaacaaatttttcgcgtcaaaatagagttgcggttaaacttacctcagttttcatcagcttctttagcttgaggagtttctcatgaaagtgattaatagtagtttgctcctctctcttaatgtactgctctttggttagctctgtccggggcttgatctcaggatcatgaagcactctgttcctgcttccaccaaatgtaaagcaacgagcaattcctataacagaaagagatcaacaacaactaatagcacaaattccataacatagagaattttcacatgacatcaaagcagatatttggcaatgacatatcaaaagcaactaaagaaaagagacgtattcttacctatggcgccaattgcatcaaggcgatcagcatcttgaactaccccaaattctggaagagactcacagagtgctactcctgctaattcgtctttaaaacctggaaagaatacacttgttctgttcacaaatttatatacaacagaatgacttaattgtagtgataaatcatgtacattatagttgattggatatgttgagtaaaaagtaggagctggaaactgacccattccattgatgatcgttagtatcttcgtcttcttggtctcttctataccctcatcatctaggaaattctcaacaagtttctcttccgaagggtctctgaattccggttataattatttttgccatgaagcaacatatcagcggaaggaaagcaatcttcagcattcatagttaagtagtttttatgtttatatccacaccaagttccacttagtagagcctagcaatcctaaggtaagcaaatctgacaaggaattc

SEQ ID NO: 8 - DNA, 95327 bp, Arabidopsis thaliana
gaattctggatcttttctatgttttaatgttttgtttgttcttttctttttcgttggtttgttaatggttgctgataaaaatagataagaccacatattttttttttgtttgagttagattggtactgctattgaaatgtgaaaattcataatgattctttttgcctttttggtaaagaaaatcatattgattgtggtgaaacaaaaacatgacattgtcctaagaaacataaagataattagaattgtgactaaatatgtgaagcataagatttaaaataaaattaaatgccaatggttacgactagtgaaatgtgataaattcatgataattgttgagaaacagaacatgacattgtccaaagaaaacaaaagataattaacttaaaaaaccaaacaaactaagaaaacagaaaaacacaagaaactgaaattgagttgttgatcagacagaatcacttttcctagccgtccgattgttacgacgagcacagcaaccgcaggaatagacggttatgaggagaatgaggagacaaatgttgaaaacaagaagattcctccacttctctcttatgttcgctaacacacccgctttgcatgcgttgcagttgaaacataactctgtttgcacgttgctccacgtaccacagtccccgttttccgcaactgccgtttcgtttttgctcggcggtatccagaacgtcgcgtttctgaactcgaagttgcaatccgatggtggcttacaacaacctgactgctcatacacaatcaatacttgagttacacaacccattatgaacaataaatttaacggcttaacatataagtgttatcttagttcggctaaaaattgtcttgcttttgttactatatgcaaaaacttaacaatgaaatttaatcatactaagaacgatgaaatgaacctagactattttttattgatttgtctttacatatatatatactaaagaaagcaaaagctttgattggtcttccctttactatatttatacaaaaatatcaacaaagaaatatgttcatacagaaaatcgatccaaaacaatacctggatgggagacaagttcttgtgataaaacgcatcagcgatctgactaacacgaccatcactcaaatcatcacaaacgttagcctcagccaaacaagaccttatcccaacccatctcttcccaccaacgaacccattaagccacgtcgagaaatccaccgtccggtactctttataccctcgaccggacaccacacgaccggctcctttgttggtcacaaagaagagaaatatggagaaaatcatcaatgcaacaatgcccccaaacaatatgatcaagtaggaaaccattgccaaattctccttgaaacaagatccaatcactccgagcaaagacaccaagaagaggatgagtccggtcgtgagaagtggtatccgaatggcagattcacaatcagtgacgccttggtgaacgaacatgtaaatcgaataaccaatggccgaagcgcccactaacatcaccaatgtgtttgctagaccaaccatgaaattgctaactcgaaacatttttggaaatttgctttctccaaatgataaactcgattaacctgatcggattttaaatagatacggagagggagagagtgtttttttgttgttgtttgaatttgataattatgtttcgtaacgtttttagtgtgtgtgtgtgtttttaagtgtgtggagtcgtggttattggggaaagagggaaacggttgcttttttggtagtgggttgatgatattagtggagattattagccattggttttagagatcgtgtgggggttaagaagatcctttagtttagaggaagtcgtttaattagattttgactaggtcttactgccacgtaactaagactaataattaaactgtcactcgactttttaaacattgaatttaataagaatttattgagtacgagattgttgggaaaattacatataggtttatgttaattttatttttaaataaaaatgcatattaattcatatttttgttacttggaaaaggaaaaaacaaactaaataagtaaatatatgaataataatatgttgtgaaaaaacgtttttcaaggataaaactcaaattcgtggggggtttataatattcgttaagaattgatggaagaaaatccaaaaatttattattgcatgggtaaataacacaaccattttataccctggtgacatctaggagattttcttcttattttgatcttaacttacaagattgatgaaattagtggaattccaaaacgcatctcacgtgacaaaataactacttctggtgatagctctggtttagtcagaatagattatagataccaaacatttggtgtatccgagtatttactttaaaagactcttcctccatcgttaagattagaaaaaagaaagaaaaaggtgttagttaatattgaagaaaactaatgagaaactagaattaaatatatatcatgtacatttgatatggaaaaatgaaatcaagaataatagcccctataatcatcaggttcatcgaaagtatccataatggacctggaaatggcgaggctgagacaaacgagaaagagggcaggataagagaacatggagagatatttccattgatgaacaatggcttttaagatgctcatctggcaacctctgcaactgagacagtattcgtaagaacattcttccggaacatggttctctacgtgttgatgtttccaactccattctcctggttgcccgaacattgtcgtcactccacatcctcttggttgcgcgcagcaatacctctatatatatcatcattgttagagaattgatcttttattacgaatgaatcaggatgaggtgacataattaagtacttacccaaacattgctgttttggctggcattgaagttacagtcatggttatgaatgatgcactccgtgacttttgcaagtttactttcagggactagcctgcctaccaattgcttggcggttcgcttttcctcagccgggttcttggcgattccaaaggttgtgttgtagatgaaacactttaaagagtagccaccaaggacaatgcttacgaatatcattgcatagatgtagattgtgaacatacgttttgagtgacaacagattgcgtaaagagcaaactgaggaatcaccagcaagagcaaaccaatgacgacgaaactgccatccgtttctcggatacatttcgagactgtttttctgtaatataaacctgttcccgtcattgttaagcctatgcatataaggattatggtcgccattgttaagaaccctgttcgtatctctgacattttttgcaaatcaggaaatctaaaatgactcgtagagtatatgatgttttgacttgtgtgatatatgaagaggttgtaacaaagagacaaggaatcaagaacagagaggtatcagttttgtttttgagttttaagaccttagtttagtctaaagacagctttttgaaataggttaaaactgtttaacggttggtttttattccttattctaaaaccattatttctaaaaatagagattcaagttaaatcaagatatatatagtacaccaaactcttttgacatgcaacttcgataaacaacaagcaaactccgaaactccagttattaccaaactatgtacttgaaaataaaagaacctaacttctgtctgactttttggtatttgccggaaagatttttaattcaggcagcgactctgtttttttgggaagggatttttgtggcggagttttctttgaagtccatcattttgttcaaagctccaacataagctttgacgcttgacaccacaatatccattcctgctccagttccactgccaaacacaagacaaccggtttggtgttataatacaagcaagaatcaacaagaaacaataaacttcgcagataaatcgatccggtttgaatgagatatggggcaaaagaggattttacctaaaggttctttgaacctcttcaccagttattgcgtttgtagatgagtatttgttgcttccacggataagaactcttgtggttgcgatggcatcaatgccttctgttactgcattcattgagtactcaagcagagtagccggttcctaaagggggaaaaaggttttcaataagcgatgacccactggtgagttatttgtagatgagagcctcagcggtataaacagtacctttacgataagatctactgccttgtaagctgaatccacaggcccagttccaatagaacaagcgacatgttctttgccatcagcgtcagcaagttttacagttgctgttgaaagcccgagagttccacaagttatctgcattccacttttaagtaccatgagaattggataaagacaatgaacaagaaaaaagagtaagaaagcacattatgatcccaatttcacctgaatgtccaggagtttccacacggcttctggctggaaaacttcatcagatactaaagctattatgtccgcatcagtaactctctggatcagcaagggaacatatacgatcagaagacattacattaacaaatcaagagcactagaaaatagaaagagtaatcctctacacatcctaagtttatgcagccagaactaaggaaacaaagtacattccaaattagccacggagactcaagtcttataggtctaacaaagctttcaaaatggctgcgaagcttttatttggaattgaaaacgcaagttaggtttccgaggaaatacacaataaccaaaagcaactacctttttctgctcagccacggttttgaagcgccagaaaatggtacttagctgttcatcatctaattgataaccaagctggaaatgtacaaaagataagagaacattagtgtctcccacaaagatggcaatacaagtatttgtatgtgtaagattgctgtgcacctcagtcaaacggtctttcagcgcatgacgcccactgcataatatatatccaagcaaaagtagagaccaacagttagacttctggtttcaaacacatatgtagtgtacactagcttataaattggaaaaaaaaaatgacgcctaataacgtctcgaaattatcagcatatccaccaattacagtctagttgcattgtctgaacaagaaaaggacaaattacaggcaaaacagactaaacaagaataactttcatacctaagcttccccaagacaatgccagcatcatttgatcgttcaagtccaatttcttcgggacatataatttcatatgtacccttgtgtttcagcattccatcctaaaaatgtaaaagagtcatttaagttcaacaagaacaataatcatgaagaaaagaggaccgttaggcactagactgaaagagtgaacatgcaaatattaacctggtgaattccactttcatgcgcaaaggcattcgctcctacaatagccttatgaggttgtgtctgcatcccagtgtactcctctacctgagaaaacaagccactagttatgagacagcttatgtggaaatctacaaactttttcctcttaagaaaaagtaatatttgttttcacaatgtaaagaataaagttcaaaagaggtaccatcttgcttgtcataacaatgtgccgagtatcaattccggtaaatagacctcctaatacatgatctccacggcattttatggccatcacaacctacacttacacgaaaatcatcatgtaaggattatatatcccattgcagcgtaagcagaaaataaactgaaagtctaaaacgcctaccctgagacaatctcacccacatgttcttcttcaggtaattatagccaagggccaaggctatactaagactcattacttagacatttggccttttaaaatcttactagagaatattattccagatatctcactgctactgataatgaaaaggtactactcggttctacagaattgtcttgctcagtaagatcaagccccaaaaaagatttcaatgcaggaaaggttcacatgtcttgacaaattaataaaactctgacctcttccagtgaagcgtttccagctctttcaccaattccattgatcgtcacttccatctgcctcgcacctgcatgtgccccctgaattcaaaaaggtaatcacacacacattagcatcacatatattcactggtttgaatcagcttagttgttccgagtataaaaaaaaaaaagacatacagataaagtgttggccgtagagagtccaagatcattctgacaatgtgttgagatgacaacattttcaatccccggagtattggcctttaaatcagtaatcagttgaccaaactcactaggcaaagttataccaacagtatcaggtatgttgagagttgttgctcctgcttttatcacttcaccaagaatctcgtataagtactctctctccgatctacagaacaaaaaaaaaaaacatttttcaatcatcaccataaaaataaaagtacgaatctttaccaaggaatcttaataaaaatcgaaccttcctgcatcttctggactgaactcaacatcttcgcaccccaagctcctcgcgaatctaaccatactcctagcgatttcgatgacctctgctttggttttctttagtttatactccaaatgtatatcactagtagctataaaagtatgaatcctaggccgtttagcgtatttcacagcatcccaagctctctcaatatccttcttattgcatctagagagtccacagataacaggaacataaccattctcatcaacagtgtttccaactgtttcagctatagtcttaaccgcttcaaaatcatccttggaagcagcaggaaacccagcctcgatgatgtcaacaccaagtttagctagctgacgagcgatgtcaagtttttccttggaagtaagtgtagctcctggagattgttcaccgtcacggagagtagtatcgaagacgcggacgtagtttggatcggaaatgcggttggggatgtattcaggacggggacggcgaggagtgtgaggtggtagtggagaaggatctgagattgagcatgagagacggagggtttgacttcggagggagattgaacggtggtgagatggttggaaacggaaagaggaggagataggtgtgggtttagaggagaaggtgggaagaaaagaagtggtggtgattgttgttgatgagtagagattagggtttctcagaagcgaagacgccattgaaggagaggtctcagagagatagagagatgaaggtttcaacgtgacggtggcggcggctaagtttgattcagtagtgctaatcttctcgtcactactctcttctctttatgtaaaaaattgttttttgtttgacccacgtggaaaaataccaaattgggattaaaaatgatttgacgacgaccattgggtaatttggttcctaattttaacggtatatcgtcgttacccacgaggaagaagaagcagagtcaaactgaaaaaactggaatttaattttcaaattcggagaagaagacagtcttattgattcagctgcatcactgttacactcttgcggaagattttatagcgggcacattagaattcgttttttttttcccgctggataatcgtaacgatcttttcctctacttctcttccgattaagttgtgaaacaaagagacactcttaacaaagttgtgaaagctgttatcagtgatgtaagcacagattcgaaatgaaatcttaacatttctcattgccgatctatttgtagttttccgcagtttcatttgcttgaatgcgtgtgagaactgagaagtggacatggactaaacaaagagttcatctttaatctgaaatcgtattgatatcttctccagaaacttatcttggaatgttacaagagttgctctactttgctacaaaacaaaccacaaatatctagactctgatagttggaccagtatatgatccgggacgcatgtgaagatcatcgggcgtgtcaatctgtacaagccatgcgtattcgtcttcctttccttcatccaccttcttcattccgttctccaatgctattattatcaatccaaagagaaaaaacggtaaacgaaaacagagtaacataatgttcttctaaaggcaaaagagagaaagtttgcataccgaaagtggaaaacggatagtccatgtagtaactgcaactcctgccaacactttctttgtaaggaggtgagagaatgtcgagcacagcacatggagtcaacgcagtgaagcaatggagattgcctccagtctttgggtacaacgccggtatctcagactgaggcgttataactttgtcactcaccaatttcgccaaccttgctgttatacaagtagttgcaagaagtcttaattatcaatgacacaaagtgaaacccaagatgagaaactaacaataacctggaagagaaccggggacgcctttatcttgtgtgataatacatggaggttcgacccaatcgtaagctttaacatgaagtgatccatagaggattttactaaacacagccatctctggatgatcatgcaatgggatcactgaagacgttgggaagcagaaaatacacatctgaagaaaggacaaacaaacacttgtgttttgagatttgttgattgatcagcagaaagaattcagtatcaatcaaagacttactgtaaaagtatcacattcatgaatgtctaagaatgttatcggttgtgcccatcgtcctactctattgaaacggctaaccccagaaactccatagcctcgatcatcgtcttgagatacctcttcaagcccaacatctgcaggactaactgagtctgcacacaagaatgaccaaaaaacaaatcacacttctgcttataaaacaaacattccccaaattctaacttcaactctcaccacaatgaaccataaaatcactgatcctagtagtccctctatgaagaatagattgatatattaatatatgatatttcttctctaaaaatcctaaatttgcatcatgtatacatcaaagttacaagatttgcacttctcagagactctgacgatttcaaattgtgaatctgcaattggccagatttggtggatcaaatgagtttccacatttattcaaatccaacaaaacaacgttaaaccctttaactaggtcactgattcgatcaaaactagctgcaattgcaataaccctatcgcagtaggagaaaatcaaacagagacaaaagaagaaagaaaaatacccaacacagagcatagcttttggatagccatggaagcaggagaaggagctttgccagtgaaagtctctttgcagaggtcgtaaagctcttgcactttgggagatttctcctgattcctcgacgccatgtaaatgtctttcttgctaacgagattcgacaaaaccttttcacctgccttgaacaatctcgacaacattttttgtttttctcttcaaactttttgtgtgtcggtaattgttcgaatgttcttatccgagagtgattaacctatgagtttagtggggtgggtctcaataacatgagtaatggattcggtagcaaaaaggagaataaatctctgattttttacacattcttatgatatatttttatggaattgctattcataaatttctgaagttaattttgcataaaaactgttatttgtaagtttttgacttttgagcataatttctttactaattgtgtcgttttaatttgcataatctttttgactttcggatgaaaaccttagctaattgttaatagactaatatcactaaagacaattatactctttcaatgaaaagcacaagataaactagacacgagcttcgaacctcccaaccatttcttcacaacatactctttcactttcttctcgtcatttccaaacacattacacatcgccttcacatagtgagatgggaattttccggttatcctcacagagaacatgacggcacgagccatgtctctgcacaacttgtccacaagaaagtcgaactttgatgtcttgggttcgagtgaagagcttggaggttgtgaccggttgatgtttctttgtatgcaagtttcctcagggttcaaggaagaagcagagatggtgaagatggtcacaaacaagaagacaatgatgctcattgaactcttcattgcgtcttgcttctcttcctgttttttgagaagttagagaatgtggatagacgttatatatagtgaggagcactgaccaatgagagatttaaaacttgtttcgcattgaaaaaagttcagtttcacttggtatatatcagtttggtttataatctatgtaattgcgttacaacaaacacacaacaaatagcttattataacatattaacattgatgtttgtctcgcctgaacataaatacacacaatactgaatttactaagagctactattactaatgcatctgttttcaccaattttattacagtcctacttaccagtaatctccacaagaacaaaccccattcttgaaatgatgaaaccttttgttgtccctcacaactatttccctttccatgaccttggagatcaactttgctgcattgtgacagtccacacagatccttaggttcttgtaaactctaatagttgttccttctgaagttttaatcaacccgtaggtaagggcaagcttctcgctgtgtccccttaactgttcaatcttctcctcttcacttagatcatgttgtactgacattgtgtctggtctgtatcccatcttcgatatcttcatctccaatatactccaaagacttttgatttcctcaaaaccatctaagaatctttcaccgacaacaaagctaaataccttcctgtttagttcgatccaagagcatccagcatcctttcgtaaactcatctcgttcattctctgtctcacttttctcacgtcttcccatttccccaatcctgcatataagttggaaagcagaacataattctcaggcttttctggttctaattcgaataacttagcagcaactttctctcccatttccagattttgatggattctgcatgagctgagcagagacttccaaattccaacgtcagcttcctcagacatctcttctgcaacaacccttagagccttgtctagttgcccagctcggcctaacatgtcaatgacacaagcataatgctttaaatttggctttagcccaaaagaagacttcatttgatccagatatctcagcccttcatggatcagaccactatggttgcaagccgttagaacacctaagaaagttaggtcatcagggttatgacctgttctttgcatctcttcaaagagttttatagcctcttttgctaggccatgtattccatatcccattatcatggcattccaagatgccgtgcttttctccttcaagccattgaaaaccttagatgattgtgttatagaaccattcttggcatacatatcaattaaagaacatgcaataaacgcatcgtcctccaggaggtgcttcaaagcataagcatgcgcttctctccccagtcgaagagaaggtagcagcgaacacgcaccaaacacaggcatcatagaaatcccacaaagctggattccatacaaaaccatttgtctaaagacgcccaaagctctatcaggaaatccattctgaaggtaaccggtgattacagtattccaagatactaagcttttatcttccattgcatcaaataatgcttgtacagtgcatagctccccacaatgaatgtataatgagagtactgataaataaacaaacaaatctctttctaaccaatttcggattataaacccatgcacttcctttcccaaccgcagggattttagtttagaacaagctgaaagaagactacagacagtaaaactatcaggtagcaatccagaaattttcatctgcaaatgagcatccaaggacaatctcggatcattgctctgagcatggccgccaatcaaagcattccaagagttcactgttttactccttataccatgaaacacacgctgggcataactcagtgagccacactttgcataagaagccacaaaggcattggctactaactcattgtatacaaactcttgttttaaggagtaacaatgaagttcctttaaactcggtaagaatgattcatggaaacaaacaggcactgcatttagaatggttacctcgtccgctttgacatcttcgcctcctgccagcatctgtctcagaacatcaaacgtcccatgtgtatcaccctctgctgaaaaacctcctaccattgtgttccaagaaaccacattcttgttattgttcatcttaaagatcatttgtgcattagtaatgcaaccgcatttggagtacatgtccattaaggcattgttaaggactagttccttgtccaacctcaatttcaccgcccacccatgaacaccttttcccaaccctatttctctttctcttgcacaaaccggcaacacagtaacaagtgtagcaacatccggcataaacgcaccatcaccattttcctccatcatttctccaagaagcaagaagctttcttctgagaaaccattatccgagaacactcgaatcatggagttccaggaaaccaaatttctctcaggcattatatcgaacagttgcaaggcatcagtaacaaaaccatgagttccatagaaagacaccaatgcattacccacaaaaacatcttccaccaatccggtcttcaccaccaacccatgaaccgcaagcccgatcccaacatcagacatcccagcacaagccttaatcacacatggataagtgaaatgatccggtaaaagatcagtcgttgagatcatctcgataaacgtctctaatacttcatcgtaaagctcgtttcttgagtaagagctgataacagcattccactggaagagattcttactccgcaaggcatcaaacacaaaccgagaatcatcaggagagccacacatagcgtacatggtgataatacgagtacagagaacgtcatcattccttaaccgggtcgacccagaaaccagctggtggatctttcttcccatttcaatgtcttttctcttcccagaagcttgtaagagaagcccaagagcttctcggacaagaagaaacgcatcggacgagctctcgtcatcgccaacgaattcttggacagttcgaaaggacttgtcgaggtctccggtttcacagaagttagaaatccggcgaaggaaatgattggcattggttgaattagaagaaatggaattggaattgtagacggcgcggggaaagcttgactctttacggctcctgcgataatcaaacaaaacaaatacttgtggcaatggaagcaaaacagaagccataagataagcttccttatccaaacacggagaagctagttgtcatagaaattcaaaatctgtttggtttctctctgagatttttttctatgagagtgatttgattacattgcctcacgccattaagtttgattcagtatggagttgaataagcagatcaaacatctagagaccttgaacaattatattgaataagaaataatgttccatattgctacaaacattatctatcgttttaatgataaaaactacaatttatgcgccaagaagatgtttatggttggtcatgctaagaatccgccaatgctagacttgcaaaaggcatcaatcatctaaacagagagtatcaacgaaaagtcttcaagctttgacttcaacttgcttaggaactggtaccagtaacccgagacccgttttactatcaggagctacatgagaatacagattctccttatacaatggattcgatgtcactatccgtacaccggagtccctgcggatctccaaaacctcaggcaatccatcagcacatcccttggacatgccaacatcaatcctaatggctttatcattacaaacaccgttgataccagcatcctggattgtatgtcccatgatcatcctcttaaccccgggaatagtggaaagagcatgctcaagagctgcacaatcacatttgtgagccatttcttccgagaacttcctcaaccaaactacagagttccctcctctacaataagcaggcgcatatcttcctcctttaaacccgttaatccaaccccgaacctcctcgttaatcctctccagtccatactctatatgctcagctaaaagaccaccgtgaacaaaaaccgaatcaccaacaacagcaactgtttgattcttagtcaagaatctctttgcaatcggaccatcaggtctcaatgcagcaatcctagctctaattccttcaaaacagtcggctctcatacgagggaagctcatcggaatcccttcgtaaggatccttaggtttatcaagaccactgcataaagtcttcatcttgttccctaaacaataccaatcagcccaaatctgaaattcctctaaacctttcttagtcacatatctaaagtcaccttctatattcatgatctcatggttcccattcatagtcagaatcttacctccagctctctcagcctctcgtttcaatttctctaagaaataaagtatcttcaactcctctccacctcgatctagtacgtcgcccacctgaacaaccatcgttgatccaccagtccatctgtccgacgaatcaatcagaccagcgatcttgaatgcttctctagacttctcgagatcgccatggagatcaccgattgcaacgagtcgctccggcttctcgaacctcgtttgcagaatctcattttgtgagctaggatcttggggcaggaagatgccggagacggagtaatcaacgaaagtgtcgacgaaggaagagatgagcttgggaatgcttttgcagattccgctagggttttctctgcttgacattttccgtgataaatggcggccaagaacaatgcgcctttataagtttccttattaagcagtttattaaattaattcattgactagccaataaacgaagccaattagtgagtgactctttttgtctgtgtatcttctagatattgttcaagttgggctttggatctcctacaaggccacgcccattgttttgttgctcatgaattaagtaggcccattaacccagatagttggaaatgagttgaaccagagtattggactctgagcagcagagcagcccagagttgagaccagacgagatcttccaagcttagttgtataaaccaacgatgagtgaccggtattgaagtccctttactacaatttgcgagctgtcttatgtctattttatatacaagagttacagtacacaaatagttttttactaaaagacaagaaataagaaaacaagattcattctccttatgacaacaaaaaaaagaaagaaaacaagattcattcatacaaaaaggaggaagttgtgtcagaattgcaaccaatttaaatacatttagaaccgtcaacgcctctattgtttgttgtgactcttccaagtatgaaggttattgtattaatttatcctcaagttttttataacattgatatgataatggttttaaacgctttatgcgttattgtaaaatttatttaccccacaatagaaaaagaaaaatgcaattgtttagttttcataagtcacaatcgtagaaatattttaatataaattgaggtgtttgttgtatgtttatttgttctctttggataagtcacgacttgccaagaagaaggagcgtgagagatcgtgttaatgtggggtctttcttcttcaattaattacgatctaaattgctgagtttttttttttaataatgatttgactttcttttcctactattatactaaaatgatattttatcccaaatgtagtaaatttaatagcgatatctaatataagtttcagctaaatttaattcaatactcttttttttttttttttgaaaaacagtaacactgttatttgaaaaaattcaaaagcatttaaatatagtggaaacaaaactttatcctttgaacttttttataaagaaaaagtttagattcttctactgtttaaaaagaaaagaaccattaagtacgttaatgcggttaccgaacatgacattaagctttcgtttccttaattatccgagtggtccaattctttaattacgaaattatgaaagcgaattaataattagttaacgaaagtgacattgagaacgcgtttgcgtttcagttatggcgtgcaaacaaagctaaacaaaaaattcagagagattaaaaaaaaacaaaaggaatccaaaggaaataaatgattttgtttgcttttgcttgcaaataaaaatcattaaaaaaaaacgaggcgtaacaggaaggagaagaagcaggggtccatcatcaaatacaacattgtagcaattgcgttttcgactttatagagatattttcatagagatggtctcgaagctaacaagttgacaaatttcttcgttataagagagatagatgagttgcaggagagtgctgaagtcgatacaagccttggcggctcatagtttactcttctgtttcacgcttttattggtgcttaaactcgatcacaccgtctcttcctcatggtggttagtctcttttctctctttcaattctcttttctctgaaattgactgcatgattcaaattctttgcttctgatttgttcaatttcgattttcgtttttggtgtggaggagaatcatttccctgatttcataatttggggattttgaatttgaggaccttgtctttttgccccccgttgaatttcgaagctaaagattgtctctttttgtttaggcaaagtatcagtttttgtttttgagagaattgaaaaagcagatcctttaacaatttcccgattcattgtttctatttgccgttaatagcaacaaaagcaatcacgtcaatagtttttactgtataaagtttttgcaaattttggtaagtcatgtatgcattttgtatcctagtgtgttaaaaagttacatcctttagaggtatgcatttaccaatgactttcacgaaaccaaaaggattcagctttttacttgggtctgataaaaaatatttctgtatttggggttatgcaggatggtgtttttcccgctgtgggcttttcatgcagttgttgcaaggggcagattctctcttcctgctcctgttgctccacgtaaccgtcatgtatgtcccttttcactttcttacctcttttagcaaaatatcactcaatgtcgttcctatgatttgtactgatgtgtttatgatcccgtttggtttacagtgggctccttgccatgctgttgtcgcgacaccgttacttgtagcatttgaattactcctctgtatatacctcgagagttcttatggtaaatatcctgtaacctacagattttgcacttcataggttttttgggtgatagttttttactatttggcatgcgaacacactgatttcttcaatactaaatataaacattggctatgattctcaaagtttcttcttgctactgtttgtatttcggataatacggatggttaagttggaggacatctaaaagtagttcttgtgttacaattttcttgattctgtatgaaggtttttctttttgcactttctcccatttcatctgattgtggactgttctatcttaaatgcagctcgttggccaccagctgtcagtttgaagattgctttcttaccattgttggcttttgaattaacaatactggtagacaatttgaggtattgatctatgtgtctcgtgaacacacaccaaatgtaaatcatataaatctaaagatcctaatgactgcaagctttatcttcagaatgtgtcgagcattgatgccaggagacgacgacagcataactgatgatgcaatatgggaggcacttcctgtaagtccactattgttgcataaaatatttgaaggcttgagcttgaggcttggttcagctgctttaggcttgttgctctttgattttgcaattttttaaaagtatttaggcaagatcaatctgttaaacatgaatgaaaatctgtctctaattttccaattacacaactcaggactgagaagggagaaaactttgaccaatgtctctaatactttagtttccacaaacacaggcttgggattttctaatcttttgttgatgggtggggaagctggtcagtactcaaaaataaccatttagatgctttttccttgttgcctgcagcatttctgggttgcaatttccatggtgttcacgttggctgctacgttctttaccctcctaaagctttctggtaatttttgtctcttgaatgctctgcttaaatagttgtcttacctctttgactattgaaatcatatcttccaaaggtaatttcgttgatgtggttattgtgtacttattctcccttcttgttttatttgaaatacacaggcgacgtagttgctcttggatggtgggatctattcataaattttgggtatgttttgttttggtctttctttgtttaagtctttgagaagtacttgccatttttatggttgctggtaaagaatatgaaagtaatatatatgaaatgttctgcttgcagaattgccgagtgctttgcttttcttgtttgcacaaaatggtccaatccagtaatccatagaagctcacgtgcccgagaaaccgggtcatcttctaccagtatcagatatcttgactggaacagcggccttgtggttgctccagaagaggatagacaccaagatagatggtgcggtttgcaagatattggtggtcatatgttaaaaattcccgttattttatttcaagttgtcctttgcatgtatttagaggtatacaccacatgactctctaacttaccatattgtctttggacaatactgaaaaagctaatggtttggactttcaggggactcctgaaagagctaaggatatatcgatcccagtactgttttctccactattcctattgcaaggcctcggtgttctctttgctgcttctaaactcctagagaagatcgtcctcttactccgcggggaagctggtccgggattgtattttagattttcatcaagtgcccatgattgcttgggattcttgcaccatggttccaggtgacaaacacgtctgtctattttcccaaaagttttaatttacaaaatgtagtactaacaaaaaatcaatcaatcaattcacttgttcaggctattaggttggtggtcaattgacgaaggaagccgggaggaacaagctcgactgtactttgatcaagaatctgggttagttagtatattccaaccttctatatggtcaaacaaagatgttatgggatctgctgaagatttcattataatataattgtgcagttacaatacattcagtggtcatccgcctgagatagtcaagaaaatgccaaaggaagatcttgcagaagaggtaactttacctctctggcatttttttgtttcccaattcagtgctgatattaactttaggttctctttgttgttgaatcttgtttcttctagtttcagcattgcttaagtgttgtttgcattcaatctaatttgatatctctaggtgtggagacttcaagcagcacttggtgaacaaacagaaatcacaaaattcagccagcaggaatatgaaagactgcaaaatgtatattcatttattagccatgatgtttttgtaactttcttgtttcgattttactttttccctttgcttaatcctgtgtcaatgtgtcttctactccaggagaaagtgctgtgtagggtttgctttgaaaaagatatcagtttggtactgcttccatgtagacaccgtgttctctgcaggtaaagatacttgatcatgttacacttaaaattttatgcatttgcgctcaattcgtctagaaatactgtacaaagaaactaggaatctatgaggactgaggtcatatcaatatactcattggactcagtgtcatacctgacttaatgtcattgttcacaattttttgtttctgtgccatttttgttgcagaacctgtgcagacaagtgtacaacatgtccaatatgtcgtatagacattgaaaaacgactatctgtatacgacgtatgactgtgttaactttggcccatgatcaagagtaggatttgtggttgatgctccagacaaacattccagtttaccaaccatactgtttcccaaacttctgatgtttttgctgaatctttttgtttgtctgaatcagcagctagtataaaaaaaagtataggtgtatacgtgtatgtatttttctgtaggaaacctcattcaaactttagctgtaacatacaaagtttgtataatatccatctcttttttgtataaatcacaaactaagttatgctttaatgtccacgacttaaattgttatggaaagtgacactgacataaatagagataccaaaaaccatattcatatatacataaattgtttaaagccgactttcgtgaacaaaaaacattacaaagacgacaaacataaactctataaaagcctcttctagtagttcacagatgaggtttgcctgtttccattttcttcttcagcttcatccccttcttatgaaccgtctgagtctgcgttggctccacgagaagtaaccgcgacatcacatacgccaaaagctcttcacggtgagagaaggtaaaatccaaatgagcatactcaaactcattgtaagaaacatctactcctgaatctctcatcaccctgtaatgtttcctaaccattgaaggtctaatcactttgtctttctttccagctactaaatccacaggcacatcgatcaacccataaaactccccaagatcgagcggctcaggggacccgtaaacatccatattagctgaactgctaccgtaatcaaacatcttgaacttaccgctatgtttaatctgtgcaagatgctgagccacacggaaggatatacctggcatatcgttcatgttatagtgaggcaatcccatgactccaacccagtttgagctatctccgccaactacataactcatcaatgtttggactaatccaccaacagcaggatagttatggaaatctcgagctaacttgttgagaagcatccggaagaatttagtggggatgtagaaagcaggaacaatccgagatagtacaggacccaagaaaaggaacgtgtactccatcaacgtgaaacacatgttggagtcatagtgaaacccagcaggcgaaagaaggatcagtctcgagagtctgtgcggtttctcttcgattttacgggtgattacatacatcagaaccgcggcaccgcctaaactgtgagatacaacacaaagcttatacggttgatcctcgtttactacctcttccatagtaggctgataaagtttcagttctgaagttttgatttcgtgaatcttctctatcattgctgggatatcttccgttgcatgttcattgatggagtaacgccagaaactgcatgttttgaggattcatcaataagaactatacaaatatcaaatccataaagaagccgtttattctatactactcactcttttgaggatatgttttttttcacatgatctcttgaaactaaaccacgaaagttccctaggaaaacatcgtagcctggcaagaaaagcagagtaaaacatcggtaaatcttaacttcatatttatcatacagtaacttgggaaactaggaatattttggcacggaccttgatcataagctgcaaaagctggtgatccaacaacaccatttgatacccatctgaagataaaggtccagatgagaaaccaaggcaaaacatttcctgacaagtcatcaacgaaaaagacaatgaaactcaccccattgaagaatccattacaccatgctgcaaataaacagctttcctcgcatctcgtctggaaagacatgatgattacattttaaaggaacttacagaaacataacagactatagagaaacttactcaaccataatagattctataccttggtatcctttccaagagaagaccatatccatcagatgtaacaacacgaatagcttcatatggatacctatcaagattataagagaagttaaatcgaaagggcaaatagttgagtaacagcagaagtaaaaaacaactatgcacgaaatatcttctacacattccccccttacccaagctctgttataacatcttgacaggtccgggtatctgtattgtataagctcgttgtggttcttctttctgtaagagatgaatcgttatctcctagaatggcagtctgaatgatctcatcatccgaaacgtcaccatagtttcctttagagctgtgactggaggaagagaaccatgataaaactattccaaaagtttctgatggagaaagaagaagatgtgccgccttgtgaaagaaatcaaatattgtttctataaagatctcgataccaagctgaagatcctgccaaagtagaacacataattgcgtaagaaaactcaaaaacaagaaatgtgatttaagtatgcccatcaacactaacctcaatgactccgcgtcttttatcagtagttcggttgggcacgtcatgctctttccctgagatagctttgctaaaacaaggtctagacgaatgttggtaccttcctgggctcagaggctgcattcttgaatttcttctagctaaaagacgtaaaagatataatggtacccatagaaggatccgggcaggtagtaaagcccaccagacaatgaaggttatccagtctgtccaatggctttcgtaattggcaggaagactagcccaagagcggagtgagctttgagacaagggtgatggaggcgtggacatgccatcactatcatcatcaccagaggaatagtccaagctagaagtatcagaatccacagagagttcgtgaatgaagtggttgaaagaagagactccactgcaaaaccacagaaatcaaaagagagtcgaataagctgctataaggtaaccacaaagaagtattagagagttgaagagagttttacttatgcatccagcgtggtaaacgaggtccacgcaatgtaggcctaagctcccatccatgaagaccttcaagaacattggactttccgggcaaaagtgtcaagagaagcgcagaaaatccattaatgcatcttgcaatgttgttcaaagactcataagtcagagttttcactgacctgcactaaaaaccaaaatcattagttagcttaaaactattttagactaacacaaacaatcctaataccaatcaaaaacccacaacgaacaccaaaaacccaaacagacaagcattaaacaaagaaaactatccgcagatacaacgagaatcgctgtaattattacaggacaaagagtcaatatgtatactttcttcaaagagacaacaaaccttcaacaactaactaaaaatggtaaatcagaaatgtatccccaaattagtaaaactatataccactaaatctcaagattaatgtaaatcagaagatataagatatagacttagctcctagctccactataaaaccactggctcaaaatttggcaacttccatatctaaagcaaatcgaattactatttgagaaaatctaatcgaattaaaatccaaattaaggaaacaaaacagttgaaatcacatatcaaattactaaaaccactaaacatgcaactaaaaaaacaaatcagaaatcacaaaatcaataagcgtgcacagactaatggtgaaatcgaaaagagagagggactcactcttttgtgatagcaagagcattatcgacgatcctctgcatgattttgtttcccaatatagaaatacaacaaaataaaataaaaaatctgaaaaatgaaagaagatagaatccaaaaaccaaaagcccagaaaaactgagaagagtcccacaaaatcaaaagccgtaatcgggaatcgaagagaaaagaaacgtttttttttaaattgtgagtgtgtctttggattgaaatccgatatattaggggacgccggcgattcttaccgtccacaagagaaggtcggtaaacgttatttagagagacgagacagaggttgacacgtgggcgtatataattggatgatttagaatgtgtcatctattggattttgcatgcggatatggagacatgacacgtaagtctgtagtggcggagaagttacgtccattttgtctttattattattcagaccattttatgattaataaaagtattattacttaccaatatcaattacattatttatattattaataatcttgtggttcaaaacattttgctattctataaaatatgttcgaagaccggaattttggaacttcgaagtcattagctttttgagaggcacgataaagctgattttttcttcttttttaaaaaagaaaaagaaaacttatgaagctgctttttgtagtttcggatttgttattttcttgttaattttgtggattatcttggttcgtagtaacaaaacgtggacggtcttgattgtgcgaaaatctaataaagcaacgaaacttcttccacatgtttttatgtttttaaaatagcactataatgcttgttaatgacactcattctaaaaggttcaggcggaatactaataatcttcaaggaacaacgatgcacaatgaaaataacacattagtttccaagtttcgtcttgtcagactccacataatctgaaactgcctgctttaagggcattttctctgaatgtaggaagctccatgttcctcatacctgccatttacaccaagaccccaaatccgagtgtcaggagagaaaacaaactatagtttctttgcgagtctgattaatggaaaatcagaacagagacttactcagacttggagaaccacatctgttgaaatgagcctagtgatgccaatatactccctcctatccatacactgcacatacataacatgtttgttggttgatccaagcaaaaaaatttgggtctcattatagaggaagaagtgaacactaaatccagacctgaatcttctttctgttgtgttaccgcttgccaacactttaactctagctgagtgaggagactcctgaaacaaagatagagggaccaatgaatgattttcgccatcataaaaactgggatagctttaaagacagaggaaaagagtttaggacacaatacttcgatcaagtccttttcgagacgttctttcagctgttgcattgacgatgtgccaccagcaagctggcataatgcgagaagaaaggaaatgttaatcatccacatccaacgaaactaaaagtaggggtatttaagagttggcattgattgctattttaccagtatgctactatacaactctctccggatgtctacatcacatttgttgatgctctccatgacctgtacaagtcagtaaaatggagagtaaagttagaaaaagttaagagatggaagctttgcaatgactaaataccatgcatataccatgtgtggtaacccacgaacggaaggaatcatctcagcatacttctccattccaggaatcgtctgcaaattgcaataaaaacggagaagaaacctttgataaataattcgaggctcaaaacgctcaagataagaaacaaaatgtcttcagaatcttctgttgaatttatcgtgctcaaatggtgtacctggactatggacgggttgaacatcacatcaggaactttgaacctatcagcaccaatctcgagcgtccttcaacagacatggttaataagatattgagaaagactacaaaaattacaggtgcagcttcctgtcttcaatgaagctagcactttttcttttaacttaattctcattatgaacattaggttccatgcaggtttccaaagcaatgtctgactcttctaaacttttatgcccaatggctttaatgactcagatccaactaagcacttatctcagcttaaacaaggttcagagcagtggtacatttggctagaaactaagctcaaaccttatacgtagaaaacaaaagcaacagtagcatgtacatttgaggcacaaataaaccgaaatagacatataaactgagcttactggccatcaggaagctcgtacgacgtagtagggatgtttgaatatgatttatctgcagataaatgcatcacatcagaaaaactaaggctatgcgatcaaatgacattgaaagataaaaagtatctaacgttcaactctcaagcaactttaaactttgaaataaaacaaatttatgaaaccagagacagacagaataacataaggtaccgtcatagggagtatcaggaactcgacaaatggaatccttgatatcacccactatcatcctctgttgaaacaaatcaccaaattatcacaactgaaattttcaaacgaagtttcataatcaattacagacctggcagaagagtttgtagctttccgtggtgtcaggaatatccacatcttcaacctgcaaggattcaaagggaggaaattagagactattcactgctagtagtttcattcactgatccacatatgcacctggaattcccctgctcgtacttccttcctcttgaaagagtatctaggtcttatctgcagaaaaaataaccagtatcactcagataatttggcttaaaagaaaagaacagtgaagaatttttttaacctactttaattcctttactctccaagcttttcagtaggcagtcagtgagaaattcccctccaagtggagacgatacaacagcctgcgaataaaagtatggtcaacaatcggagaatcacaatctacatcaatgctgtaggtcataattcacatggatgagaatttatagcagctacagatgactatggaaacgagagatgggaaactttctcctgcagtacaaaatccaaacccaaagaaacagcatcacaaagctgaattcttactaaatcgtgtaatacaagtaccttctgaagaacataaccatcatgcaccggtgaaatggttgtggatcctccaccgctagaaatacaataaagtgtcatcagtgcttctcaaattatacaccatacagaacaaggtagactttcacagcatatagagcagaagtggaacattagtagcttctacatactagagaaacttttaatacttaaagtcttaccagtcaacaaccaaagaagtagcacgcccagtagcaaaagacgtgagaacctagcaccaaaaacaccaaattcatgtagatagttagacatctgattacacaagagctgactggatatcaacattacagtgaacgtcatataataatctatcaaaaagaatgatgacccaagggagagggaatatacagggttcttagccataaacagtgccggaactttgtacttttcaaacattagctctgccgccctgtcaagcatatgatttgagaaaatcagtaacacaccaagataaagcaacagtggtaataaaggatatttcaaagcagataaatcatacttctctctctgctgttgagtgtttaaaggaggctcagctagcagcattggatgctccgtaggatcaatcatcagacaactccttaaaagacaaagtttttttagagatgaaatgcaaacaacaattaagagaaaatataatgctttacacatttacttgaaagcatgttcccatatattgtccaccaaatcccagtcagaaacgatgccatcttttataggtgacaaaacctggtgagagaaaatgcaatctgtaatttcaccaacaaagttataaactttaacattaatcaaggagaaaaactaacctccatatgatctctgcggtagctcatggcttgagatcctacatagagcttgcgtttgctcttttccttttcagactcggtcttcgaatcctcagagttcgaattagtctttgtagaatcaacatccacatccattgcctctacaccatctactgccccaataaccttatgaacacatcaaaaaaaaaactaagagtctgaagatacaagggacttgagcaaatctacaataacaccattaagcttatagtgacataaaatgctggtaattaagacttacggaagggaaaacggccttgggagcatcttcaccggcgtaaccagccttgcaagtgtgcgaacccaagtcaaccacaatagctgacacttcatctgtgaaaacccaccacggaaaaaaacagctcaggaatgtctcaaaagataaacgacaaagcaattcaagggtttaaagagaaacccacctccgccgtacatggctgcagcgaacgacaagggtggagcggttctctatctgagctttgtcgccggagggtttaaacacgggacggggttctctgtaatctcggatccagctgaatcgggtcgacttggttttactgagttcgagttgtggggaccacaaaacctctcatttaatccgtcgggtttaaattattcaagaaactaaccgaaccgaacacaatttttctaaaccgaaccaacttttgtgaccaccctttttgcagtaaacgaagctgatttattgccaaataaaatgtctatgcttaatgaaagtgtataatttaaattacagccgaacaaatactgaaatccatattttcgagttacataatagaaattatgataaacaaataatctggttatcttttgatgtacaatttgctcaaaaaggattcaagtatggaaccaaaaaaaaattattaatgaatcagcaagaacactttgtagtttgttatatgaatatatgtaatgtaacaatgtcacttctaactgagttgctccatagattttcgagtgttgacaaatgttgcacttttgttgaacccctcaagcaaaagaatccttattgcctctaacccggtttggaatgtgtgatccaactgcaaaaccaaaaacaatcaggttatgtctttctgaaattttttgagataattatgggataaatctgcttctacctcttcctgttcctgtctattgaactggcggagaacaaaattggctgtatccatcttccctggaggacgtccgatccctgaaatgaaacattcgacaatttgcaaaaccagagaagaaaatgggaagatatgtcggagtggagaaaaatgagaactgtacctattcttagtcgaggaaaatcacggctacctttgaggcggtctataatacttctcatcctgcaagtaaaagaacaacccatcatgttttcttgtagagtttctctatgatttgatagtgaaaccgcaaactattatccatccacattgcttcttaagtaaaaagtaagacaatacttaaaagttaaaacacaaatgaaaacatcaacaggccagatagagagtgaaaagcattgtacccattgtggcctccgtgaccaccttttggcaataaacgtagtttaccaaagggcaaatctaaatcatcgtaaacctgaaaaagacaaaaaaaattaagacggcatatgcactctagagccagaatttggagagtaagcgagagagaaggttaagtataccacaagtacttgctttaacgggatcttgtaaaatgaaacgatttgtccaaccttcaaagaattccagcaatcataaacagaaagaatcaaaataacaagtgataaaagttaaagagattggttaactaaataaaccaaagtttgtttccgatgagctcacttacagactcaccacttaggttcatgaaagtttgtggtttagccagcataatcggtatatttccaataacgcctatgataaaggaaaacaatacccaaagttagaaacaaaccagagacagaaaatgatatttatttcaatattcattctccggaaacagttagccattgtttctatcaccctcatcaaacatttgagacgtatgaaatttgaaagtttcaaactttgagataagaaaaccatttcaaaatgaaaattcacaatggagaagataagagaatgaaaaagagaacctttcccaaacaaggccttgaagttaacagtgttcatggagatgccttctgcatcagccaaagcgtccaccatctcaaaaccaacctgcaattcatgatcacgttaccgagctgaaaaggaaaatgcaaagtgagaaagcaagagagagacatacgttgtggcgcgtgccctggtacttcttgccgggattacccaaaccaacaatgagccatggcagctgcagtggcggagattttggcttcgaagaaggtaaagcttgaagtaactctgattccggttgagaggagaatgaattcgatgaaaatgacaatgattgtgacgatgatgataaacactgagacatcaagccttcgagacctcttattcctttcgtcagcttccgacaaggcaatgccggcgataaaaacgtcgccggtgatcggaagaatagtgagcaacagttagaagggaagctaagatttgcgattttagcgggaaaagctacagctttcatcttttcttctggggaattagggtttatagtttatccccaaatggattttgttctgtcggtgtcgaccaaaaaaggtaaaaaggagaaagaaaactgaagggactagatttaaaagaccacaaaattgaggtacgaaaccgaaaataacaaaaaaaaatcgccgttgccggggatcgaacccgggtcacccgcgtgacaggcgggaatacttaccactatactacaacgaccttgttgatacacaattcaatataataattatttaattcgacaaatacaaagcatacacttgtcgtcctctttttcactcagagacagcttctttgaaattagctttgacactgagctcatcgtacgcattcacgagattctcaagcctcgcgacgaattcgatcagtagcgaagcgaacgtagctagagaaagattactcgcgctctcgtacatttttcccggctctcccagtggtggctgtaacatacttcccggcgtaatagagatccggctaggccacgacggctgtttatgtatcatcgtccttgattgcaggtaaggaagcatcgtcgccgaactcaagttagctgcagttgtaacatcatcccaattcttcggtggacgaagagtggcttcactctgagatttatgagccaagatccgacttagatcagagtcgagattcgagattttttgttcatcagtcaaatccctaaccctaggccggttcccgatttcccaattcttggcgttcacgagaaggtatgatttcttgtcgattttgctctgtagttcttctgctgcttggtgaatctcgtagagtatgtcttctatagggtttagcttctccatcttcttcaggctttccccaatgtatcttagtacttttgctccttcgattcccactctttgaagctcattacgaaattctcgtcttctatcctctgcagcctgcaattactttgcatactcttgtctcaaatctctcttaagatctgaagattatagaatgtttctgacttaaagattggaaagtacctggatctctgagagaatgcagccatgtaacgccatgaccatgatagcacaatgcctcaatgcaccacctactttcacatacagtgcccatgggtatctaaaggatttgtacggtccgtgtggtggctcccatgatgcaaaactcatcttcacaatcacaccaacaacaagaaaaagatgtgaggatctcaagtaagctggtcttttgataatgttgttgctgttcttatgtgttaaaagaatcttaccagggtgtcttcttggcttgtagattgaacggctgatctgtaaccactgtacactggatcttccgcgacagcttcatagaccagaatcctagatgggattgtatcatatgctacgcactcaagatatccgttcacacaacctgcacaaaggaacattttccatggattggaaacagactaagaagcttttcaaccagaaactcaaattcagggagagagttaataataaaccttccagagaagtcgctacgttcacaaagttcttggcgaccaagttatggagatcttccccagcccatatgggataaatgcaagtattcactatgaggccaacactggcaccaagagctatcagaaggaaccttgaaacagctgtttccatgaattcccctgttttgtatcctgacactattacgtagcaataggtcagcaagaacacccggaatccgtactcgtaaggcttcatcgttggatatagctttgcataagtcgcaaaaaaggctgatacaagagcaggcatgcgatattgtcagaaatcagaatgagattgtggaagctttagtttagaccacacatcatgatttcgtatatatacctactacaaagatgctagcagcattaaaaacatctgcccaatttccagtcatctccgatatccaagacatgccaagcgccagtcctcctgcggacaatgttcctagtccccggttacatcctttgctaaaggtggctcctatacaaaaaacaagagaagatcacatgtcaggtattaaagtttttagaatgctcaaatttgatgtgtaaagtctgttgcatatacctatactgaactcgaagataacaactactgtaagaattgcccagagatagtggccgctgagctctaatcctgggatcttaaagaagatgaggatagaggtaagtgtcagagccaaacccatcttcgccgagaatatcatcttcctcgggtcagctgttcccatctcccatgccgtaaccaaaacatcctttaatttcttcacaacccccgtgatcttgtcagagaagtagctgcaaacaacaccaatagcatttcaagacttaaccatttgagattacttgacattggactccaagaggcatcatattaagataaaatggcttcaaaaaggtttggtcaatagaaggttctggaaagaaggagagattgtatgtaatgtataacctgtaggagcagcaacggacggaagttttgtcatcgtcgttgacattggaatagcctctgctctgtaggataagcctatctctcatgctttgtcgaaacgaaccatcgaacatactacctcgcctgaaagatccgtcgaacatgctaccccgcctgaaagattccagctttggtgccgccatttctggttcttgattccgatgattgcagaagattgatagaggtgtaaacagagacggaaagactcgggagagattctattatttattgtgcatttgtggtttatgatttctatcaaagacacgatggtgtcatgactgatgaatcatgaactgaaaaaacccagattcccaaatttggaactgttttcgaattttgcaaagaaatggtatgcaaatctggtatgattgctatgcacgtcttagagcacgttttcgtgtctaattacagattgtttttcaacccataatctcaataaaatttattttcattaataaaccaaaaataccggtcaaaattatgaagtgtttaatgaagtgttgtttttttctgaaaaagggattacattaagcgtatccattatggcagaagtttattaagatattttgttcaattttttggagtgtttgtggctacctgctatcaatatattttctttcccattgggtagaagtgggacttttcttcatttgtttatgatgattatgtgaaattgcaaacttcagtcaaattagttttacaacaccatattggtcttgttttcctggtttgatgtctctctctgctgtgatatcttgattttaaaaatcatactaggtctctggtccaaggccattcgatgtgattgccaaagaatattattcggcaagatcagatgctataaaagcaaaggagaagcgtgataaaagaggacaggagcaagcaggcctagccattcgcaagctcaagcaagagatatctcatcttggttaaatttaatcttgagtaatgaatcagtcaataatttatgtcatgagatatttgagtttgttttgcagggttatcagaagcaatgttggaatctgaatttcagcgtgaacatgcttttgaaagtgctacagaacaagaattaacctgtcccatttccgataaccttcatgagtcagttgaggctgacgatgactctgttcagatgttagataatttgaccttgaataccaatcctgctgagagctgtgagtctgaggaaattcaaactaaagctcttccctcaagttcctcgggacaagatttagttgcatcagatgaagattcagaggacgtggaacttggcgatacattctatagttgctctgagcttttacagaggaattgctgtgtactaccatacaaagcacagaagaagaccaaagaaaatccattcgattttgatgtactaccataatgagaaatccatttgattttcatatattacttattaaccaaaaaaaaaagaaagtataaattcgaaacaaagttaggtactacatctgcaataaacaaaaaacactacgaacaatacataatacacaaaaattacaggggctaaaagtgaaaactccaaaattaaaacccggcctggtcgtacccgacccgacccgtataaacgactggagaagcagagatactcgcgcttcttcctacattcgcgctacagagacgaagaaaaaaaagaaggaaaatttggtatcaattaaaaaaaaaaagtctgaaaaagtctgattgacgtgacaaatccacgtctctgtgttttcttctggcaggttaggacttggtcttctccttgcgattttcccaggtttggagagatgatcttgctttcccctgtggttatttttcatgatcggatattctgaatggtgaattgtactgtgttttttttttttgacttagttgaacccaatgccgttcttctcttgttgcaccaaaagagcaatcttctgttcctctccaggtaggttcgtctcttctgctattttcttcttaattcgcattttgagaatgctactaggtagatccgaatgatccttgcatttcattagcatggttttacttgatcatgttgttgcattccctggtttcaattagtttcctctaggctttatgttttgtagcttctttgtatgtgatttggtttgatgatttatataacaatcgtgttttcaggccttgttgatagagaatgaaggacttgtggctttatcaagtgtttccataagtttgcctttggtgaattgatgatgaattctctcactgatcaatcaggcagctctcatggaggttcaactccccgtagtcccttctctccatcatctccacgtgaaaggcataataaaggtctggcggattccagatttcaacgtcccctgcccaattcttcagctctaggtacatttttatgtatttgtctgcattatgttattagaaaaggtctctttataatatgacgtaatgagttatttctaccacagatccatcatcccctggatcaatgctccatggaggacacaagtcccacgaggctttccaaatgaaacaggggcgatttgatctccaagccgcaaagatttcagaactgatgaaatcaaacaatttagatgtattgctgcttaagcttaagtgtaccttatcaatgaatttttatatgcttttcctaggctctggttctcttctttgtcatactagtttatttttcaaagttgtttataataataccctatatatgcttctgttgaatgcagaatgctcccacacagtcacttctaagtatcgttaatggaattcttgatgaaactattgagagaaagaatggtgaactccctcaggtacttgagtctctaacaatcctgaccatgatttttatggatgctacgtgcttgtaaaagcaaatatgcatgcacacatttttcaaatgctgcttgggacatcttttgatctaatctgtaatgatcagcgtgtagcatgtctgctgagaaaagtcgtgcaggaaatcgagcgacgaatttcaactcaatctgaacatctaagaacggtatttcttgtttcttcggagaaatagtaaattgtgttcaaatgttttatattctgagttctcttttttgcagcaaaacagtgtgtttaaagctcgtgaggagaagtaccagtcaaggatcaaagttcttgaaaccttagcttcaggaactagtgaagaaaatgaggtatcgtaaagaacttaggccctgagatttttttgtttcttgtaattcactaatgtgctatatctcaccagattgctacaagacaacttcgacggataaaggtaacgctttttgcatctttccactttaatcatgtaattactgaaagttttgcggggataaacttgattatagtaagatgtttatttgcttgagatggctatgatagacagaaaagtccaagctggaagaaaagaagaaagacaaagaggaggatatggttgggatagagaaagaaaatggtcattataatcttgaaatttctactctaaggcgagaactggagacaaccaagaaagcatatgaacaacaatgcttacaaatggaaagcaaaacaaaaggcgctacagctggtatcgaggacagggttaaggagcttgaacaaatgagaaaggatgcaagcgttgcaagaaaagcccttgaggaaagggttagggagcttgaaaagatgggaaaagaagcagatgctgttaaaatgaatcttgaggaaaaggtgaaggagcttcaaaaatataaagatgagacgataactgtcactacaagcattgaaggtaaaaatcgagagcttgaacaatttaaacaggagacaatgaccgtcactacaagccttgaagctcaaaaccgagagcttgaacaagctataaaagagacaatgactgttaatacaagccttgaagctaaaaaccgagagcttgaacaatctaaaaaagagacaatgactgttaatacaagccttaaagcgaaaaaccgagagcttgaacaaaatctcgtccactggaagagtaaagccaaagaaatggaagaaaaatcagagttaaagaatcgaagttggagtcagaaagaactttcctatagaagctttatcagtttccagtgccaggcgctacaagtatgtttacatatgccattgagtagaatcagtcatcgtgtttttctatagtcacctaaacctgccaattttccaggagttgaggttctattctaagtctatcaaacaagaaatactaaaagttcaagataagtatacagtagagtttagtcaattaggtaagtcagttcagacatatgcttcttataaatagctcaaagtatgttatatttgtgactttgtaaattttggtggtgtttatcaacaaatactgatcctcagggaggaaattgcttgaacttggagatgctgccgcaaactatcacgaagtcctaactgaaaaccaaaagctcttcaatgaacttcaggagcttaaaggtaagtaatgtgtatcatgcataacatattgatgtttcaacttctatgcaacctataagttctctagttatggcttgcaggaaacattagagtgtattgtcgagtgaggcctttcttgcgtgggcaaggtgcatcaaaaactgtggtagaacacattggtgatcatggggagttggtagttctcaatccaacaaaacctggcaaggatgctcatcgaaaatttaggttcaataaggtctacagtcctgcctctactcaaggtgttcttttgtttgcctgaggaatttttcttcaatatactttttgttggattggtgtgttcttgggactaatcaaaaaaattaatatacttatgtcattgtatcttttaattcttgcagctgaggtattttcagatataaaacctcttattcgatcagttcttgacgggtacaatgtatgtatctttgcatatggtcagacaggatcagggaaaacttacacaatggtactcattcactagtatatcacgattaagtggccagacaaatgatgccactacattcataccattatcattgtttttgtccagactggtccagatggagcaagcgaagaagagtggggagtaaactatcgtgctctcaatgacctcttcagaatctctcaatcccgtaaaagcaacatagcgtatgaagttggggtgcagatggtggagatatacaatgaacaagtgcgcgatttactctctggtgacagttctcaaaagaaatatccttttttgtgctctacttacttttttttcttttgccctttcaaatttagttcctccatatgaattttggctctgttctccaactttctgtttgtgtttccattatgttgttttccttgactttcacacactagggattctctctacaactcaacagaacggtcttgctgtacctgatgcaagcatgtatcctgtgacatccacctcggatgttcttgaattaatgagcattgggctacaaaaccgagttgttagctccactgccttgaacgaaagaagtagccgctctcacaggtgctcatattgatctctgaaacaaacatgtgtttttcttttatcattctctagatagttaggtctcctagggtatttgagaaaagacaaaaataacttggatagatgattcctaatgcagcattgtcactgttcatgttcgtggcaaggacttgaagactggttctgcgctgtatggaaatctacatttggtagatctagcaggtagtgagagagttgatcgctcggaagttacaggagacagacttaaagaagcacaacatataaacaagtcactctcagctctaggagatgtgatattctctcttgcttcaaaaagttctcatgtaccatacaggaacagcaaactaactcagcttctccaaagctctctaggttaactccaaatcttctgctctgttttttcaatcgtgatcgaaattttctaacttatctctgtgtgatttaacatcacaggtggtcgagcaaagacactaatgtttgttcaactgaatcctgatattacttcatattcagagtcaatgagtactttgaaattcgcagagcgtgtctctggagttgagttaggagctgctaagagcagcaaagatggtagagacgttagagaattaatggagcaggtaaaaaaactaaaacacactctcacaatatctcatgaagaagatctaccattaggtcgatattgcactaaaccttaaagaaccgttgcagttagggtcccttaaggacacaatagcgagaaaagacgatgagatagagcggcttcatttgcttaaggacataaattacccacagagactgcagaaaaagagcttaggacaatccgatgactttaactcagaagcgggagattcgcagttgtctatagaagatgactcaagattccaacacgattataccagacagtcacgacactctgtcacggacggggaggccttagcttcttccactgatgcggagtatgatgatgaaacagaaggatccactgatgctccttgtgcagcagaagggagaaaacctttaaagatttcagacaagtagcgttttttccattctcttgcttcaatatgatctagtttacggtttgtttttgtctgaaacatatatattggtgactgaaaatcgcagacctaaaccggtgactccaaggagtaatacgacaacatcacgaccacttgataaactcaagcaagtcactatgaggacgacaaacattgcaaaggctacgtcagccttgttgtcaccgagtaagaaatcaaaatttataaggtttaggttataagtcgaatagattgttatacttgctatttgttactattagttctcataatgatgtatataaatttcttgtttctcaaggttctcaaggcatgaagaagacgggaagtgcttctaattttctaaagtcaccgaaagattcgaaacgttggtcttaaaaatagtatattttccttagcatctaattttttagctttttaaataagaaattattttctccaccctctatgaacccaaatcaaatgatcaatggtttcatttgggacttaattttgtaaaaaaaaatttgtttttctatgtaagcatttgtcaatatacggatcgtaataatcttacgatttttttaataatgtttgttaacttgacagtaatgtttcatcctaaatttataacctttaattgtactcttcttcaaaatatggggaatatttatagcaactctactatgtatgaatagtatgcataagtttatgaaacttaattaatagattagggtaagagtaaggttcctgaaagtgtgaacgaagattataaaatgagaaagggatttaaaaagctaagataacaacttgtatcaacactcaacagttagctccaatccgatccatagtaattccactaataacaaaatattggtgggtagtccccacagtgtaatttgcatacttgaatttagccctgtttttgttctctgtcaccgaatgatgtgatcgccaaatctatttttggaatattttggggccccaatattttcacttgttattgtaaacccccaattctgtcctcttcagcatctaataaaaatatgaatatatatatgatcatcctcaacataatatgctgtttcatgtatgttaagatagcaacagaagcattgactagttcagaaaaattaagattaagtggttgagacttgagaggctacgtttaagcgtcatgggcaactagagattgtaactatttttgtatataataatcattgggaaatattaaaactataataaatatgacaaaacatatccctatagtttaagatgataaacgattataatagttgttagacactctctgacattttgctttcatgcccattgcacatacttatcagtggaggaaaaaaacaaatagatacttggtcttaaagcagacaaagaagatatagttttagtcttttagatcaccaaataggcaaatacaatagaatatataagaagacaaaacaaatggttgtgtagaaaccagtagcttgtacctaaaaaaaacaagaggaataatccatagtatatgtgacccctgatttgtattttgttggattttaggatcataaaattcgatctatatatgatagttattaatatattttgacaacactaaaaacttttatgaattgaaactaccacaaaagtctgtaagatttaatcatgaaaatgagcctttttcaataaacaacgagaaagtaaacatgaaatcccacattgaccatccttcaacgaatggtccatttcaagctgtccttatgaatgccatgagatgcatgcatctttttcgtctttctttctattaattttttggctcttgaagtagttattaacaagtttgcattttagctctcggaatttttttcttttgttaagaagtttaattcctgcatgaacctatgtataaacatatctatcatgtattaatattatattcgaaatatttttgtaaggattttatcataagccatctacaccatactaatctcgggtaaattacgtaatacctgcattacaaagataaaacttaaacctcggctacgacctgccatgcatatggaatgagtactagctagtgtccaaaatgtcataaaaaaaattataataaaaaaaaaaaatcagaaataaagaaacatgtatagagagaataacagaaagacaaaagtgtattattataccctcactttctttatatatacgatcatacaaatatctgaattgttctatcaatcataaagattatgaataggcaacatccgtaagatcctgtgaagtgaaccgtcgctattagaattatttttgaaaaaaatatgaaatatataagagatattcatatatggataataagagagaccacaaaagaggaaggaagtctcaagagattggttgttcgtctgtaaaacacgtccataggcttcgcatcacaatttactattttgtctctgtttttggtttgggagacacacatcattgtctttggaaagctacagaagtgaagggtgtttttgttaatttacaccgacaaagtctctttggttccataactcctcttcgttaccaaaccttgcgcaacttgcctcttccagtttatcgtatatgtaactatgcctttctcgctgaaaaaggaaaatgtttttagtaaccaaaagcaaattacatatgaatggaaatataatcccttaacaagaacatatcgttttatattataaactaatcttcatttttagtaattctatagccgaagccgtttttaacccactttacgtaggaaagtgaagtggaactctagacatcaaaagcacatgcatgtctgtaatcagactaagaactctcgaccctaaaattaataaactaaaatcaatatttaaaccgactggtaacgctcatttctttttgttataaagactaatcacatttcattgaagatttggtaatatatacaatttacaattgatttctctcttcccatcatcgtcaattcactcatcaacactttgacatatgagctaattcatccatgatttataacttcatttgcagaaacaaaataaaaaaattctgttgaattttatttctgatcatttcataacttaagaggacaattacataagaggaaaaggaaaaaggtgccaagcaaacgaaatagcaaagcgaaaagggagaggacaactgagatatttacatgacaattataagtcaccaataaatttatatcgtcgaaattacaagtatacagattacaaatattatcccaagttgggtcgtatatatgacatatcgcatccaaataaatagaagaataatttcgaaaacaataaaaaagaaggaaaagagaaaagagaaaacaaaagtcaaagggaccatgttgataaatggaagacaggactcccatctcttgtttgtctccccatctccactgtctcacgtgcctttgctctctgccaattgtattccattcatattattcaatactaatagaaatactttatcacgttaaaataaagtaattgtcataacaacaactagttagacttaaaccatgcaaatataatgccaaaaaaaaagagactacttaaaccaataaaccatacaagatcaattatgcaaaggctggatttgacctgtcgaacatattttaattgcgggtcatatagtccgcgtgatcatatattatagtctaataagattgaatctaaactacaaacacttgtatttttgaataaatctttgtagaaccgactcgatcaaaacataccggacccattacaacatctctaccagactaccactaattaattatatatatgcttatcttaagaattgaaaaacattattagaatgttctagtacctgcatggaatcaactgcatctgtctctgagttaaagtcataaaacgaacttgctgcagtgagtttcatcgagaggaactgaaatccacaaaaaacatgaaacaaaattgagtaatttataaaattaaagcttgtgttttggaagttttttaaagtgtgtggtaagattttcgttttttttttgtaattttcgaatatctaagatttgccgtgtttcggaaagtactactaaagtaggtatttaccgaacctcccatctcatgaaacctccattttctagttttttttttctttctccaaaatacaagaagacaaagtcttattgatatatgtagtttatgattacaacttaaattatttacctcgacttgattctgtagagactggacataattaattatctcgtcaagcatcgtagccattcccatagcctgcacccaccaaacatacactttcattataagaagtaagcaccactaaatcaatagaaaatcacatcactttttctacaattttttttctgagttctttgtaaacaaaaaaaacaaaaaaaaatccgaagaacaattttcggaaaatattatgagcggtatcaaagaaaaaagctaaaatcacactcatgcatgttaaaaatacttttggatacatatgttcttgtttaactaaaagtatcacttttatcataaaatgcttaaatttgattcaagtataattagtgacaattaatgccgatgatgaccttttcatatgctatttattgtttaatggccattagtttctattttgattacaaatatattaaaaaagaagtaatgaaaagttgaaaatgttaaactattatatttatctttgcattattaccttataacatccgggcaccatatcttgcaagcatcttaatctctcgtttattttccctcgccgaacctgaaattttgatatagagtgtagacatgtatataaatttaaatgaatacaccacgtttataaaaaaaatgaatttatatagacaatttaagcaattttacccgttctgctaagctgtggctatcagtggcttggcctcttctggctctcacatgaacaacttctctctctttctcgtcttcttcttccttcttcttcttcaacctcttacctcttctcaaagaaccctagatattttttagacaataaaagtaattattttaaacgaactttttaatgataagttatgaaaatgataagataattagctagggtttcgagatcaattactgtttcagtggcaataacattcgtattatcggagacgccgctagtctctgatgaagacaaagtaggtaacaaagcttttctcttcttggtctcatcgacgatgttgtgatcactatggaggaaacttgaagttgaagagaaattgttactactgtctggagagtttccgggaaagtgaagtaattgttgttgatgatgatgaaggaagagcgattcgagagaagtagaggaaggatgaaatgtttgaaaatgaaggttactgttgttgttgtttagatctgcagcttgagttatggaagaatatatatccatggctattgtctgaaaatcagaagaaagattctcgaaatttgccataatataatgaattgagatatgatcttcttgacacttttttttttttttttttctgacaacttctttagactggttgatacaaaacttgagacttttatattgttcgattggatttttttattaatttaatttatgattttagaaaaagaaatgtggagaaaattaagaaagaaaaagagagaaataaagggagagccacgtgggcaagtgaacgttctgggatttgtgtgtcggggagatatgtccaaacaaggaaaagtaggaccaatgtttggtcgtgggttccattaggctttctctgtttgcaagggggaagaacatttctagtcagtttggtgtgaggttaagaactagtggtctatctttaaatttattattaatattgggaagaaaatattgaaatggatgtagctagtcaaactaagttgatatcaaaacttgttttaatgaaaacatccattaatgttttgcatggagggttttttatgtaggtgtatagggtaagagatcacatccatttgccaacttaattataacttccaaatggccaatgccaattaatcgacaaaaatactataaatatgtgtatgtataaaaatatagggagataaacgaaagtatatatgaaggttcttttacataagttgacgccaatttatgaatctttagttaaagtttaagttaccaaattatttatattggtgaagacaaattttcactttaatcggcatactagagatttcctttgtttgtccttgtgatgatcaaacacattgagttttaggaaagagtttttttttttttttttttttcttccttttaggaaagagttaggttgcaacaaatgtcaatgtttagttgggccattactatagattatctattatgtatggtggagggatttgattcacatgcaatttcattcattcaagacaacttactctttaacttgttcattaatagaagtagtaaagcatccatgcccaaattggtgtgctttaattaggaaattttggaaacagaagttttttttttttttctctgaaagtgtctttcattaaaacttcatagatgcaggtcttacattgtgattgcagcagtggactttccacttacattggaaacagaagataagctcaatatacatatatatattcttctgacgttaaattggtggatagtcatcgccgtcgctgagctggcgttacttaattaccatcattattttgatgtctcaaatatttttaccttttccgtaaaaaaataaaattaaccactaataaaaaaatagtttcagttggcagcaaatagcaatacaaaattgctgatttagtccggtcaggcccaatcacgaagttttgtatgttacggtccctctctaggtggaatcggaacaagatcatcattatatacattcccaaaaatatcatctaatacagaacacgaacaccattctctaactgttaactgacaattttaaacatacaaataataaacacatacaatgttagtggccgtgcgactaattttacttactgtcccatttcacaatgacactatctggagactgtgcaaccaacggtccactcttgttcacatctacaacatccatttccgaaccaaatccattgttctgtatcctcgtcaacgtatcctgcacgtgcgacatacatggcctaagatctttatccgactgcaagcattggaacgccagctcagcgacagcgatcaccgtctgtctcactcttgtatccgtgtcaaacccaagtgacggatccaccatgtcgcggagctcgtggttctggattttaacgactgccatgttcgagaggttgatctcttggcgcggtcttgtgatgtcgactgctggaagtgaagagataagctccattaacactaccgcaaagctgtacacgtcgcttttgtttgagagttgatagcataagtggtaatccgggtcgacatatcccggagttccttgtggagcggtagatacgtgcgttttatccataggaaacagtctagagagtccaaaatccgcaacctaaaatgtcgaaaacagtaaaaaaaacacagaaagaagttaagattatgatccgataaaatcccaccagattgagtaataaccagtgtgagttactgaccttgacattgaagttttggtcgagaaggatgttgttggatttaacatcacggtggatgatcttggaggcgtggagatacttcaaggcagaggcagtttcaacagcgattttgagccgaatagaccaaggaagtgagctagggtttgcctgtggaccatgtagatgatcagctaacgtgccgtttgcaacatactcatacactagcagtaagtcccggctctgttttgaggagcatccaaagagagccacgaggtttggatggcgtaaacccgttaagatctcaacttcattcctgaattgctctgctcttttgaagttgttatcgtataaccgtttaacggctacgcttcgtccatctttaagcttaccgtaatagacagtaccaaagcctccatcaccgagttctttagatgggtcgaagttattagtggcttcttcaagttcttcgtaagagaaaatatgaactccgactaataattcctctgctttctcgatgtcaaaagactttgcagatggatctgatgagatgtttcttggaagcaatgctgaagaatttctgtaactttttgtttttctacgatggtatacataccaaaatatgctcgcagctattaatcctacgaccgcagcggatgcacctgagatggattttgtaatctgttaaaacttgagcgggatgattaacgaaacaacagagcataacataactttgccaaagtagaattttatatcttttgatggtgcgaagagcatcataaatcaaatcgaatctattaaaatactggttagttattataaccacatatcaaagtctttttcccaaaacagaagattaaagaattttacctatgagtaccttcactatcactctccttcttttatcatttttgcctggaatgaagaaacagagaagaataaaccagtcaatggactttcagatttcagcattcgtaagaacatatagattgagactaaaagttacttaaccagtcagagattgtaaaaaagcctttaacaatgtattgacaaaactaaagcaaagaaaaaggaagggacaacatgtcagaagatcaattagacgtcaattcacaagtggttaccattcgtgcaagtatcatgaagtttaggtccatcaggacacaagcatacgaattcttgttgatcagttccacatctcccgccgctggtgatgcagcggaagcaactgtttgcagtccaattcagaacaaaacccctcttcaaaatctcaacataagtcatacccatcacatcagactcattactagctaaaacaggaacatccactagtttctggcacgacatggatgcaatttgtttctcttttccaagtttctttctgtcaaagaccccaaaagatcgaagaagactcgtgtttcgagcacaagtaagagggtatgtcctaaaatcctccagcaggtgatcggaacaattgtaaagtatagtgaagttgatatgagaagggttcacaaagaaaggagtcctatggagggtaagattgttcagcggtctgggacatggatcatgagaagcctttgagttcacgacctgaaacgactgtgttaagtaagatatgttcttgatgacatattcctcaccggagatcccgagaacagggagcttttcttcatcatcacaagtgagttcaaaacttggataaccacaaaaagattcttgctttccagatagataaaatggataggagatctggggacctttgccgcatgatttcggctcacaagccttgaactttggatcaagagagagggtttgagttgctattattgtgaagtagaagaagatggatgtgtagagtaaacttggagttgaaggattcattttttaagaaaaaactagatgaagaagaaacaagaagaagagaacaaaacagaaagaaatcaaagattttcaggaggagtgggtgagagttaaaatgtttgttcaactagtgtgttgaaagagtataatactaattttcttggtgtaaagaaaataaacactgcaatttgacttaaaaactgaaacttttaatttgtctctttgagcctttgaggttgaagatgaccccacaaaaaaaatcttttatgggaattttagtgctctttatttttttaaactggaaaaatcattgtagtggaagtataatggattttgtgtaaaaagagattttttcaagagagggtcggttagagtcgtcgtcggtctactagcagaaacttcaaacgcaagaaaattaaaaagtcgtttttttgcttcttctaagaccgaccatgaaaaagtaaaaccggatcgataataactagtgtaggttcgacccaaaaagcccaagatttgatccagcagcatgctcgcgctacaaaaacaccagctgtgtaatccctaatatttttggagcgaagactaccacataaatacttgggacaaatgataaacagaaaactggacacgtaaatccaggttgaaaaagtcaaaatgtgtctttaaagattattaaaagttttggtcaatgacgataacaattctcgaccaatttggtcaaagtatacgttctggagtctgacgaaactaatcttaaatgttaatcacatcaagaacagaaattggtactaatcttagaagaaaagtggtactaatcttagaagaagtaaaagcttgaatctaaatgataaacgactaaccttggttagtgttatcgtcgcaggaggagttgtgaggtctgtccgcacatagacaccggaaactctccgaatctaacgccgaaccacaaatcccaccggaatcaatgcatctccggcaagctttgtcttccatgatgtacctcaaatcgaatccttttctcaaagcttccacaaaagttagttcggaccgttgaagctcgtccttagcagacctcagcatcggaatttctgcatatttcatacaaccttcgtcagaatccgacgatcgcaagacatgatatgtcaccggatcctcgtagctttcttcgcaagaaatctgcaacggagctacgccggaacagttgacgaatacatcgatcgtctcggtgttggagtctaatgtgaactgattcttcccgttgaagttccaaatgtttaggcaacctccgtctagtagactatcatcggcaacggaaattttatgatcctccagattcgcagaaacaacgcgaagagtgatgttcccgatcgctagggttaggttttgatcaccctcgcaggagagtttgaatgacgaatgaccgcagaatttgggtttattgaatccaccccagaacggatacgtggtactctcgaataccctgtgtccagatccacatgtcagattacgtgagcgacactcctcgtactgttgatcggctgagaagcacgacgggaggtcagcgacggagaagacgacgaagctgatgaagaaaaaaaagatggacattgggttttgacaactaaagccttctttttttttttttggtgagaggttttggggattttatggaagattggtcaaaatgatcggtgacgacttttattaattacagtccggcgaatttaaaacagattatgatcgctgattagtgattacattataactacatcctaaataaattatttatgtatatgaacggtcagagattcatacagatctttaatggttatttgacttgttggaaactatagtgtgtttttttttggacagactgaaagcgacttgatagttgatacctataaatatcgacttcatagttacatacaaatgcaattgttcgactaaggttaattaatgacttatttgtaagttataaacattttaattctttgacccaaaagaacatttttaagtatgtcaacaatttttcttgaaaattccactgcgattttatgcttccaatatataacaggactgcaaacttataaaattgatgaatataagaaaacattatatatataaaggaatgaagagaactgatgattatacacaaaaagaaaaaaaaacgttaatcgaattacaaaagagtattatgtgaaaatttatgttagtatttcattaaacctcactaaggacttcaatcataattttgtaaaagaaattgcagactggtgaaatagtccaatagcatataattgcatcaaaatctgagtgaacatggttttgatatactttattatgaagtcaactgaatgatagacttgtgatccaatcaaaaacacaccattgaataaatagcaaagagatggagaattgattgttttttttttttgaagtttgaatttttgaccaaggaaaatgagaatacatgtgttatcttttgagtttatttatccatttatgttgttttcttaatatttgtatacacatattcaactaaagttgctataaaaaacgaaatatacaggcttgcagatatttcaaaatctcatgccgaagaccttgactccacacctcaaagactcgtataataatattccaatcccacttgctgcaatagaggggaggttctgcctagtgaagtataatgagggtgtaaacgtagtttactatttttatacgccaaattggttagtagttactatttcccgcttgatctgcaaataaattaaaattgtagaggatgaaaaagaaaataacaataaatgaccgttttgtgttaagggccaataataattacaagaagacaaaatacatcaaaattggcagctaagaaaaaaaacaaaataccgaagtaataattaaagatgaaatgataattgacagaaaaaaaaaaaatctatagagaaaatttgcagaaacagtaaatgagaaaattatccatggaaaaaattgaggtaaaggtgatttctagaagaaattaaaacgtggggagagcttttgaaataagctaaaaataaaagcccctcaaaagaaacgtggaaagaactagccgttagaggttcgtcagattcaaaatctcactctgcacgggtttccgtaaagacaaaagaacccccaaaacccgttcttcttcttcatcatttctaccacaaagatacacgaaacccagaaaccgctctcactatcttctcctctcaatattcttttattcttttaatttatctctatcgtcgatctgagacgattctacattcttagctgcctgagatctctctctttgatctgagagtaaaactccgattcatttgttcgtttttttctctgtaagtgtttttgatctctcttaactattgtttttgttagaactatttagtgaaatgacgtttttaggaagttttgaatataacatttctggatttgatgaaattaatctgaagaagctaaattttccttttatgagcaaaaactaaagattacctttttatggattaagtctgcacaatgttgccttatatgaacttttttccatagatctgatagatttgggggagaatttaagcttagaattaagttgatctattagatctgatgaaaaaattgggaatattttgtagggaaatgactataaaaacaccgggaactccggtttcgaagatggacagaacaccagctgtaacaccaggtggaagctcaagatccagggaagagaagattgttgttactgtaaggttaaggccaatgaataagagagaactgttagctaaagaccaagttgcttgggaatgtgtaaatgaccacaccattgtgtctaaaccacaagttcaagaacgtttgcatcatcagtcctcatttacatttggtaattgaagttttatatctgatgtttccaactcttcaagtcctgcggtttttgatggctaataatgcactcttttgatttcagataaagtttttggaccagagagtttaacagagaatgtgtatgaagatggtgttaagaatgttgcattgtctgctttgatgggcataaatggtacttgtctttttaatgattcttctgtcttttactcggatttatcatagatgactaacttccctttttaatgattcagcaacaatatttgcatatggacaaacaagcagtggaaagacatataccatgagaggagtaacggagaaagctgtcaatgatatttacaatcacataattaaggtaagcactgctttggtcagagtcaatgttttagacgtcaaatgcagttcttctgaccaatacctttatttgtttcactgttgtttccagacccctgaaagagattttactatcaagatttctggtctggaaatatataatgaaaatgtcagagatctgctcaattcagattcgggacgtgcccttaaactccttgatgatccagaggtatcatactaattttatacattgattatgttcttgctgatgttatgtccttgattcagtctagactttcgttgatctaataacctatttatccacaattgcagaaaggtactgtggttgaaaaactggttgaagaaacagctaataacgataaccatttgcggcatctgattagcatttgtgaaggtaacttgaattacttggctttttgtaattctattctcctggttcattctggatagtaagactgactgttggtgtttattttctttgtgttagctcaaagacaagttggagaaactgctttgaatgatactagctcgcggtcacaccaaataatcagactggtaatgatcttaattcattgattctttaaaacacagatacatatactctgcaaatgctaataacatgttcttgatggcaaaacagacaatacaaagtactcaccgcgaaaattcagattgtgtgaggtcatatatggctagtctggtaaaaattgatccctctctgttcaatttctctgttttttcataatgattaactagaactttgtggacttagtgcgtgtgtgtgtgtgaatgtattgcagaactttgtggacttagcaggaagcgaaagagcatcacaatcgcaggcagatggaacgagactcagggaaggttgtcatatcaatctaagtctaatgacacttacaactgtcataaggaaattaaggtactgtacttacatattttctgagagattaaaatctcaatctcaaatactttttaagtaagaaacttatttaatctgaatctgtgaactcttcatagtgtggggaaaagaagcggccatataccttacagagactccaagcttactaggattttacagcattcactaggtgggaatgctcgaacagccattatatgtacattgagtccagctttggctcatgttgaacaatcaagaaatactctatacttcgccaaccgagccaaggaagttacaaacaatgcccacgtgaacatggtaatgatctttgttccatgcttttggttcatcttagtgcccttttggatgaaaacaaactaaaatatttacttcctgtctattatctacaggttgtctctgataagcaactagtgaaacatcttcagaaagaagtggctagattggaggccgagcgtcgcacccctggtccatcgacagaaaaggatttcaagatccagcaggtttctgtccatttcagatcaccaaaatatataattgaaccaaagctttggtacttagtttatggctattttgtgacattctcagatggaaatggaaatcggagagcttagaagacaaagagatgatgcacaaattcaacttgaggagttacgccaaaagcttcaaggggatcagcaacaaaataaggtctcttaatctacctctctgtctatctactgtactaaatatattcacaagcgttggctgaagtttaaactaaaccttttgttgaatctcagggcttaaatccttttgaatctccagacccaccggtcagaaaatgtctttcctattctgttgccgtaacgcctagctcggagaacaaaacgctaaaccggaatgagagagcaagaaagactacgatgcgccaatctatgatacggcaatcatcaactgctccatttacattgatgcatgaaatccgcaaactcgaacaccttcaagaacagttaggggaggaagcaacgaaagcccttgaagtgttacaaaaggaagtagcttgccatagactagggaatcaagatgcagctcagacgatagctaagcttcaagcagagataagggaaatgcgtactgttaaaccatctgcaatgcttaaagaggttggagatgtcatagctcctaacaagagcgtaagtgccaatctcaaggaagagataacaaggctccattcacaaggaagcaccattgcgaatctagaggagcaacttgagagcgttcagaagtcaatagataagttggtgatgtctcttccgagcaatatcagtgctggagatgagactccaaagacaaagaatcatcatcatcaatcaaagaagaagaagcttcttcctctgacaccaagcagcgcatccaaccgccagaacttcttgaaatctccatgctctccgctttcagcttctaggcaagtcttggattgtgatgctgagaacaaagctcctcaagaaaacaacagttctgcagctagaggggcgacgacaccacaggggtctgagaaagagactccacagaaaggagaagaaagcggagatgtctcgtcaagagaaggtactccaggctacagaagatcaagctcagtgaacatgaagaaaatgcagcaaatgtttcaaaacgcagcagaggagaatgtaagaagcataagagcatacgtaaccgaactcaaagaacgagtagctaaactacagtaccagaaacaacttctcgtttgtcaggttagataaagatcacaacccataaataaaccttttttcctccttttatattttctcatcagttttgaacttacgcaggtgcttgagttggaagcaaatgatggagctggatatagtgtagagaacgaggagaacacgataatggaagatgaagagcagaatcaagtggcgtggcatataactttcatagaggaaagacaacagatcatagagctgtggcatgtctgccatgtctccataatccacaggacacaattctacctactgttcaaaggtgaccaagccgatcaaatctacatggaagtcgagctaagacggttaacttggttagaacaacatctagcagaagtaggaaacgcaactccagctcgaaactgcgatgaatctgtggtttctctatcatcaaggtaatgaatgaatgaataactctcacttggaaaaatgttgttgtaaaagtttcttcaactaatatggtcttgtttcgttttcagtataaaagcattgagaagagagcgagagtttttggcgaaaagggttaactcgagattgacgcctgaggagagagaggagctgtatatgaaatgggatgtgccattggaagggaaacagaggaaacttcagttcgtgaacaagctatggactgatccttatgattcaaggcacgtgcaagagagtgcagagatagttgcgaagctagttggattctgtgaaagtggcaacatctctaaagagatgtttgagctcaatttcgcagtgccttcagataaaagacagtggaacattggttgggacaacatctctaatcttcttcacctatgaagacttattgtgtgtttatgatttgtaaaagtacacgacacttctttgtctcctctgaatttgattaaataagctttaccagactcgtctgattatgtttaatatagtggtctagatttcttaaaccttgtgaggacaagcttgctaaaccctcaagtccaactgctaaccaaaagttgtccaaaacactgcgttttattggaaacaacgatgtgccaacgtggcatatttggaagactctcctcgtctttttcgctggacaaccatataattatctcagctactaaccaacaaataaaaaatcaaaatattatttaaatgttaatgttgttctctcgaatcattccttaagaaagattttcactttccaatttgcttcactgtcttgtcgattctgcttctccaaaaaatttcttctttagttctgagtttttctctgttctgaaaaaccccaaattttgttttttttggccattcaaaatttcagaagaaggcgatacaaaatcgtctttgaattctctttgtttatgatctgttcaagtaaaggaacggtcgtaattgctactagaagctcatttcccagattactaaaccggattcaaaatcgaaatgatgttccgattagtgtcatagctactcgacgatcatcaatgtcggtggaggcgtttccgatgaggttaaaatcatcacagaagaagaggaagatgaacattggttgcggtgtttccccttcttcgccgacgacgacggtggtagatgaggaagtagccattaggcggaaattggcaatgagacgggttttggaggataacggtggcgatggaagctccgtcagagatttctcgctattcacgaccaagagaggtgacacgttgttcactcagtcatggactcctgttgactccgctaagaacaggtcaattcttgttttgtctgttattgatgagtgattggaattggattgtttctctggaaacttagtaaagaaagatcttttaggcttcggctatgttgagtaaatcctacaagaagaggtccctctctgttttgagacttgtggttcacgagaatttgagcttaattatgacaagacaatgtcgttttctttggtgtgttcttggattgctatatcgttttctcagctggtcctaactattattaccttggcatttaccttgttaccttggattcaattctgccctacttagatttcattagttcctcaatgttgttagcgttcatgtgaagaagatcaaacaaatatctgagataatctttaggagaggattctgctaactgggggagagattttgaagatcaatgtattatattatacagtagtcggtttgctcttgaccaagtcttcagtgtttatgtgatacattgacctccaagatctcttgactatatatagctttgtgtcacctattttccagttttgtatctttaatctcttgtttatagtcttcttctattatttcttctttggtttcttatgttctaaagctgacatctttctgtgagcttgtttgtaggggacttgttgttctgcttcatggtctgaacgaacacaggtttattttgtagcttttgagttgatcataaactctccttccatataagtagcctaacatgtccatattcaaacgctcaacagtggcaggtatagtgattttgcaaagcagctaaatgtaaatggattcaaggtctatggaatagattggatcggtaaaaccactttaccaattcaaagtgcttgtgtcaagcatttatcagtgtatagtttttctcttttgatactgaataaagttttatcttggttaaataggtcatggtggaagcgatggacttcatgcttacgttccttctcttgattatgctgtcgctgatttggtataatctttttttcagtttccaagagcttccatatacttaactcatattgctgtttaaacattacattgcctctgaaaaaaaaatgtctgtagaaatcgtttattgagaaggtaattgcggaaaacccgggattgccctgtttctgcattggccactcaacaggaggagccatcatcttaaaggttaaaagatttttaaacatgttcatatcattgctcttgaaacaatatgttgactatataaactatttttgcaggctatgctagatgcaaagattgaagctcgagtttcagggattgtgctaacttcacccgcagttggagtccaaccaacttatcctatcttcggcgtaagcaaacctgaaaaacctcaagaatctgaacaattttcacaaacattttgtggcttttgtcttgaaaattagagctttttcaacaggtaattgcaccattcctctcgttcctcataccgagatatcagttaagtgctgcgaaaaagaaaataatgccggtttctcgtgacccggaagctctattggctaaatactctgacccgctagtctacactggatttatccgagcaagaaccggtaacgagatccttagacttggtgctcatttactgcagaatctgaacagaatcaaggttccgtttcttgtgatgcacggcacagctgatacagttactgatcctaaaggtactcagaagctatacaatgaggcttcctcatccgataagtcgatcaagctgtacgacgggttgttacacgatctgctctttgaaccagaacgggaaactatagctggagtcatattggattggctaaaccggcgggtttaaattcctcaaaccaaatgtagcacagttccttactccttaggtaatatagagggatatgcgaaagacataatcaatagttcctctgtttctgtcgattgatctcgacactattttgacattacgcacacttttattgtaatgaatatacgatgttgtaactctgttagtggtcatcgtaaccatttcttgtataaacgatactagatttatattttgttgatagggagataatcataattatatatggggtttataagaatatgaatcgtcagatgaatttcaatagagcatatttctgatcatacaaaaattctacaaaaaaataataattgcgatttgggtcacccggaaaatatccagacccgtaatatcacaagcagtcggatctaaagactttcacggagaaaagggtgaccgagaagctgcgacgccgtccacctctcactcgattctttacggagacaacagtcaacaaaactcctaaactcgtcggaacatccttccggcgcacgcggtggttctccaaagcacacgacgcacattaacgtcgcccagtcaggtctctgtccctgaggaagcaacggaaaatgtccgacgaagagctcaagtatcatcactccgaaactccagatatcgcctgcgtaaacatcggagttttctccggcggcagagtcaaatctctccgggctcatgtaagcgcaagtgccgacgtaggaattgcagtaatctaacgatcgggtaatgattttgctcactccaaaatcagcgattttaacttcgtttctcgagtttaagagtagattcgcaggtttgatgtctctgtgaacgatcttgagtgagtggagataacttaaacctttcaaaatctggcgggaaaatcccgctagttgtttctccgtaacggcgccgcggagagattctaggtttccaccgtccatatactccatgaggatcgaaacctctccgacgattggtttctcgaagatcccttgacacctgacgacataaggagaatccgtgcgacggaggatctccatctcgcgcgctaattgtcttgtgaaagcaggactcatgtcgccgttgactgatttcagagcgtatatctcccccgtggttttgtggtggactttgtatacgatcccgctgcttcctcttccgagaacgtggagtttctcgacatcggaagctgagattccgttgttgatgacgggggcggtggatgaggcaaaggagaaccaggggaggtgaacagagagcggtgggacagggagacggaggttgatttgacggcgtttacgaacaagagccatggaaatagaagagagagagagagagtgatgatggtgatcgaagagtgatggaagttgcagtttttatatggagacttgagtgggatttaagtgaggagcctgggaagctaataaatctttccattaaatgttaatcactcttttttgttctttatcttaattattatttgttgagttgtatctaaaaatggcaactagtgtgtctaccgtttatgtttatcttgcacgaggttaaatgcatgggactgctatctgtcctacttacccggaacctggctatagtggcttgtgtatattgagataaatctacgcaataatgattagatttatatacatttaaagagtttgttttagtgattttgaatggtaactcaattatcaaagtttgttacagcctgtatcgtgataattacaaattacaaaggcgttataaaagcgttacttttaacgttttgcattaatgattagatttatatgcatttaaagagtttgttttagtgattttgaatggtaactcaattatcaaagtttggtacagcatgtaccgtgatattacaaattacaaaagcgttataaaaacgttatttttaactttttgtactacttatttatatagttttgcattctaatttacagctaaaacaactttaaagctttgtgttacctatcagaatcgttatcttcacattcaaacacataatccattgttgttgaaaaataataatactttcaaaacatttattttagtgatattaatttgacttgatagtaagattattatttactcataaagacattggtggaatttagttatataattttcatatactaaactataggagattttaaagtttaatgtgaatttgtgaggttcaatgtacctcggaggctaaggacttctaatgaaaatgaccaaacaataagttatatttaggccatcatgcaaaagctttccaatggccatcgccattaatattgccaagttaattattaatatgattttagtaaaaactatgattagatcttcagattcttagtggacagtcacacatgaccctacggattacaagtatttagcatgtcgattgtcatgcgcgtatatatccaaagaatactgaataaaaataatatgaagtcaatcaaatgaataacaatcaaattatatgaagtcaatcaaacctttatgaatgtgatttgcttctttttccaaccaaaaaacttgtttgtttatttgttagttgttactcccaaaaaaatgtagtaagctttttatgccccatgtattatatatcaagacgatctccaaacatgactatagtttcataggatggattggatatcaggacatgtgtgaatttactaatttttagtattgaaacaaacaacatttcaaccaaaattttttaccattaaaattaatatatcgacgtccgatagtataaagcttgaataaactgaatttcgtatcagtagccagtttgaaaaataaatttgttccttgagattttggtgttcttttccaaaagaaagaacaaagaaaacaaaaggcccttgtaaaaggcggtttagttcataaagaaaactgggcctatctaaaaatttgaactaatgccatatttgggcttagtaagcccggcttacgatacgacgtttatagtcggatctgattcggatccaaacccgtttgatggatccggctcctaccaaatcacttcagatttctgtataagctaaaaatccttgaatttttcagtaagttactatagcatccgagaatttcattctttaactctggttcgtaatcggaaaactcaaagacctgttgtgaagatatattggagaagaaaaaaaaaacgatttcccggcactgaaatagcattatcagatctcgttcccaccgggaagatttcccggcacactgaaattctgacttggaatcgtctgtgaaactatgcctgccattgcttctaagcagtattcaggttattattaaattcctcttacttcgaaaccctcacattcctcaatcgtataagtatgtagattagatatcccaaaaactggaaacaagtctgattggctcgtgattgtttttttggtcgcagacgatgttagtcttctagttttgttgcttgatacgaatcctcttttctggagcactacatcgattaccttctctcagttcctttctcatgtaagtgtctctaacgaatctattgtttgtttgttcaatgcttcgatttttatgcagaaagcttgctgctgttatgtgtaggtgcttgcgtttcttaatgcggttttggggttaaatcagttgaaccaagttgtagttatagctactggatacagttcttgtgattacatttatgattcgtctttgacatcaaatcatggaaatttcgagagcaatggaactggaatgcctgcaatttttggttctttgcttaagaaattggaagagtttgttaccaaagatgaggagctcagcaaggaggaagtgtctgaggatagaataccttcttgtctcttgtcaggatcactctccatggctctttgctgtatcctcttggaaaagcatatagcatcatgataggtttcttgaagctatatatagtacaaactattaggatttgtttgcataagttctggcagtgatcttgaagcttagctttctctctagactgggttaagtaaggaacattttaggttgacatgtttgttctcagctaaacctatagcatgtctaaggccatcaatgttatctggtaatatatgtatttgattttcagtcttcacattttgttgttgacttaatttatggctctagatatacagagggttttccgttctggacatcttcatccccagcctcgggtgagtgttcagtaggatatatgtatcaatcagttgtcttggataaaacttttcatgttgattgctttgtatgaatcttcagcttaaagtattaatgagaatatagactcctttttcttatgtgttatctgttctatcgtatacccccaaaatacagaactgattgtgctattgacgtttatatgaaatacagattttatgcttgcaaggttccccagatggcccggaacagtatgtttcttccttcattttttttctacttgcaagattttgtcttgtttgtctggtctcattaaaaggttttgtcattctttcaggtatgttgctgttatgaactctatcttctctgcccaacgcttgatggtaatcttcattttgattggttctttgggatttccggttcttgatgttctctaaatccagtatcatgtacccaaatcacttcatcaattggttctttaggttcccattgattcgtgttacataggtgtacagaactcagcatttttgcagcaggtaatatcatttctcctttatacatgattctaactcgtcaaactggacctatgcgtcagctgttatctcctggcttatttgtaggcatcttatataactggtggtgtacatcatacacctaaacagttggatgggctatttcaatatctaacggtacgcaactcaagtccaaacgcaaaccattatgtgactcgtctctcatttagcgaactcaatactcaatggctgctaactctggattgttttgttttgcacaaaagacaatctttgcaaccgatttgcactcccgcggttttgtacaacttcctaaacccataggtgtagattttcgcgcatcgtaagtgatcaagtcattaactcttcaattaatcgggtcttcctctgcatatataacagatggttttaagtacaaaatttgcaggtgcttttgccacaagaagacaatagatatgggctacatatgctcagtgtgtctgtccattttctgtgagcatcacaagaaatgttcaacctgcgggtaagagatttgacccgtcatgttctttctcaagataacaatctatcatgttgtttgatactaatatcgaaaagcttttggaaatttgcaggtctgtatttggtcagtctaaacttgatgatgcttcatctgcctctgataagaagagaaaagctcctagtacctaaaatcatcttttgtgccagagagaaactgcaaactttgtttaattgtgtctttgcgttcattttcgataatttttataccatatatcaaagtgaaatcaattttgcaaagtttttgactctttttttttccttgagatagtacccgttgacttgagcaaacaaaacaaaaaggcctctaatagtccatatagaaagttgggcttctctatcgaatttgaacgaatacgacatttgggctgacgtcatttattattgtcggatctatttcgggtccaaacccgtttgatggatccgtctcctaccgaatcacttcagacgtggagaacgaacgagacagagggaagagaatcatcggtgtggcgagcaatggatttgaagaaacggcgaaaggtaaaaaaaatctcggaagtaatgtgtatgtttcatagcactcgaaatttcgatctttgattttgttcgaaatcgataattgagaattgtcgtgcagattttggagaagaaaaagacgattcatgaccttataaaaagagcttcttccattgacgatcctctttctccgtttgattctttccgccgttaccgaagaaacggtaaatttgttcttctgctcaattttattttcgccagtttctcaaaaatatgggattttgtttatgcgaactgattatcattgacaatgatttgatgcatataaacttacttttacaattcctaatgttactacattatgaagtagatgtagtgttagttggaattcgtgctttttaacatggatttaattatctgtgaatcccttactcatgcagactttggtaacctatgatctagtgtgctctgattagttgttagttagttatgataatgtttgtgtgaattttgttttcagtgcttacttgtttcgttttaagttcacagaagagtcttgatggttagctaattctgtgtatgtgttgttcttacgtcttgtagacttatctttgtacctggaatctggccgtggagatagactttcctcgtctgtgaaacatcacattcaaaaactcttgaaggtattaaagagaatgaagtatcattaaattttctgaacatactttcttagaaatttattctagatttattgttgtactcaaatttttttaccattcacagacgaacatggaagggttctatgggtctgattggcctatacaagcaaaggtgaagcgtaaggagatgtcttccgctgatgcacattatatctttgtgcgtgagctgcgttttggtaaagcctatgagacatctactcaaagaacttgcatggaagggtgtaatcagatagctggatttgtgcattaccggtttattttagaggaagagatacctgtcctttatgtgtatgaaatacagctggaatcccgggttcaaggaaagggactaggagaatttttaatgcagttgattgagctcattgcttctaaggttgattccaaaattagtctcttatattcctatttttcgatattgatggcattagcttctgttttcagattcatagcctgatgataatattgttatgttcgttttcatcttctcagaatcggatgagtgcgatcgtgctaactgttctaacatctaatgcattggcaatgactttctacatgagcaagttagggtaagaggtacaccttttggaagatgatcttatttcatgtaacaactcagatgatattttttgcaagtgttcatgggttcctaatatttctgtttcttgctgtagtcagtcatttctatttctcgactctttactgatattggctcgtccaaacatctgaattcccattcgtttttatacagatacagaatatcaagcatttctccctcaaaagctaatcttccggtacagaatcagtagtcttatttttcattattttgtataaggcattcactaaaagaacttctacaattttttgtgtttgcagactctctcggtgaagtatgagatactttgcaaaacttttgattccgaagctaaatctgtgttggaggtttgccctttcgctgcaccactcacatttatgacaaaactgctgatctaatataatatgtgagtgcttcttttgctttttatcttggtattgtattattaagactgctatgattgctttattttgcaagaagaatgatgaagaacctaccaaagattgagtatcaagcatggaatagcacatatagattcactgtaagtttccactttggtctactggagatatcagcaatcgtttattgtttagttttctgaaaaatctgttgcttgaatctgacagaccacagaggggtgtgataagatgcatttagaaaacagacgaatccgatgaagacttggttcctccaatgacttggttcacaccagaggcagatacagaactccaacaatgcctagcaactgccaaattgaccattttgaaacctgagtcctcgcaacaaaccagtcgtttgcaaccagcggagactaaatttggtaagctgtgagtacttctaggctttcttaaccttacggggagattgtgcagttatatactaggactaggacttagtagagtgagaacaattgttgaatttggttttgatataatgaatcagagagatatcttttcttttacaaaattgccaaaagtattgaatcatgagtgcttgaaccttaatttattgtagatagacaaatgtgagatagaatatgaattgcgtaacatagaaggacttaaggacctcattatcatataattaaattgaggaaaagatcttgttcttttttcatagtttggggtcagaaagcgatcattttaatttaaaacatataatgtatatatcaaaaatgaaacaaaaagataataataaagagaggaatggggtgatctgtccgtatcaaaattgtggctctaatagtttgtgtgattaagaaatatagttgtcacatccgacaccatgtgatgcgacttgatttgcccattatcccaaccattttataatcttttgtcatgaacttttctttcatacagttttataagactaaagagatattttgaaatcgaattactacataatacatatcaattactcaagtatcaaatcatctaattaatcaagtgatttttttaactcaagaataatgtatttttccctttacaaaaatcgaaggttacaacttacaaaactgaacaatgagactagttttggcctttttgggggcaaaccggcaaagagtaatatcacgaaagcaagtggaagtcagagacggatcggaaacacacaaaaaaaggatatcttccaaataatcacaaaaaaatatcttcttcataatttgctaacgtttcacattttttatccacagaatctttttctgtacggattagagaaacagatcagattctttgaagaagacacagcgcgtggtgtacactagcgagagtgagtgttagctttgttctgagccacaagatatctctctctcagtgtcaaccttctcgaaatttccatgaacattaaataatgataaaaatctgaatctgacgtggcacatctctgctatttaatataaaaaattggtcacttgctatttctagtaccttctttctttcttcactctctcctgtctcctcttctcactgtttcctatttcgtaattttctcgagaaatcgtcttttcttgtttacgctaatttgatttctcgagaaaaaaaaaaggaagcagaagaagattcttattttatctttacactgttcagaaatcttcggtggacggataacttgcagagttctgattgaggtttctttttcttttccctgttttctcttggatcttgtttcttcatgtgcggactatacaaaaaactgattcggtgaaattaatcagctttatgctctgttttgttcgctttcaggctggttttgtgagaattatagttgcagcaagaaagcgtttcagatattttttaatggccgctgaggtaataattgactagagattgatgaattaagagtagttattgacgcttatagaagaagtagattctatatgaagaaagtttctttttttggaagaacttgaagtaaaagccatttaatttcatttcttgtttccacttcaggatcgaagtgaggaactaagcagcaatgtagaaaatggaagttgcaattccaatgaaggaattaatcctgaaaccagcagtcattggattgaaaacgttgtcaaggtactatatgttttgtcacaactttggagaagagacaaatttcagattttgccagtggatcttacctctcctctgtgtattgttcttcaaggttaggaaaccgtacacagtaactaagcagagagagaagtggagtgaggaagagcatgataggtttcttgaagctatcaagctttatggtcgtggttggcgtcaaatccaaggtattatttgacttggagcttaaattgagcttagaatctagctgctattagatgtagttctgaagaacctaagtcttgactttgctgcagaacacataggtacaaaaaccgctgtacagatacgaagccatgctcaaaagttcttctccaaggtcttgtttgttcatatgttccataacatcagtagtactgatttggttagtttgtaacctgacagttttttatccattgcagatggctcaggaagctgacagtagaagtgaaggatcggttaaagcgattgtgatcccgcctcctcgtccaaagagaaaaccggcacatccttatcctcggaaatcgcctgttccatatactcagtctcctccaccaaatttgtcagctatggagaaaggaaccaagtctccaacctcagtgttatcatcgtttggttcagaggatcaagtcaatagatgctcttcgcctaattcgtgtaccagtgacatccaatccattggtgcaacttccattgataaaaagaataactacacaacatccaagcaacctttcaaagatgattctgacattggttcaacacccatttcaagcattactcttttcgggaagattgtccttgtcgcggaagaatctcacaaaccatcctcttacaatgatgatgatcttaaacaaatgacgtgtcaggagaatcactactcagggatgctagttgacactaatttatctcttggtgtatgggaaacgttttgtactggttctaatgcatttggctcggttacagaagcatctgagaacttggagaaaagtgcagagccgataagttcttcatggaaacggttaagctccttagaaaaacaaggatcttgtaatcctgtaaatgcaagtgggttcaggccatacaagagatgcctatcagaaagagaagtaacatcatcattgacgctggtagcttcagatgaaaagaaaagccaaagagcacgtatatgctagttttagccattgtacagtttggagtcaattttgatgatccgtgaacattgttttagccatttgctgggtgacttggatcatagcattccacgaaccaaatcctaaatccgagttggtaagtggttttacttgtccgccacatgtaattcttgtaatgaagtttctcctgctgtctcacgttaagaagacacttctttttttcttcatatacaaatcagttttaacagtgtatttgtttggccaactattcctagctctgtttcaatcttaggtctggtttatgattattagccttaagaccagtcttaatgttaaaaggtttttacattaagcagattaatatacgagtgaaacttcaaactctgagaattgaaacattgtgcaaagggaaccccctaaatttctgtggacacttgcttaaaaattggagccctcaagtctaattcacttacttaaatattggagccctcaaagtctaatgaaatctatgataaataacaacaattgaagtatatgcaatcaacacaagccttgcttattctatattgaaaagtgtaattctagcttctatctccctgggttcaggtgatgaactgtatcactatcacagaaaagaagcagcaaaaaaatctcagcaatggcgtctgttagatatctcactggtttatgtatgcctatcaaagaacttctctatgagtacagagaaaattgcaaatccagcgcaacctatacacgcagcttttggcccacctgaaacaagaccaatccattaagtcctcaagaacacatgtatcatgtaagagaaatcaaacctctacgagattacagtttgggaactaggccgttgcatattgataatgaatctctaagatttaaattccatgcacagaagataataggtcttacctcgggcggacattgaaccaccggtaacacatccagctatagcggtgtttacagtgtcatgcttagctcttgcctttttcagagaggtaaaccaaaaaagtcgataataaggttttgaagttacgatacatgagttagtagtggaatttccttgtttttcttggtcaataaacaaggtattaccttttcgacaatgcattctgcagcagagaaaaccaaacccataactgcaaatgtcttacaggaattccaactcctttgccccatttgttttgccgtgaacacaaactgctacctagccgtcatagtatcatgcgtaataggattatctaatgcccccaggaacaaacccatcatcaacccgagtcctcctcctacaccacaattcacacagaatgtgaacaaatcaattgaatatccttcacatgtctaactgtcatatcaactctacaaccggcgagcatttatattagtagctttataccttttagagtatttataataatagattcgatttgagatttcacatcatcaattcacctaaccaaatccgattattaagtgcaatctgaaagtgactcaataaccagctcagaagcatatcaccattagaaagctaatcactttaccaatttcactattctcaaaccaatcaaagtacctagagcttttagcatttttggaaaagcaagagcaatggagcaatatagatcgagaaagagaggatatttgaactgacccatgactccactagttacagcacgaacggcgcagttgttccaaacctcttgagctcggatctcctcgatggttggcatccggatcggttgaatctggtagagttctcatcagaagccgcggggggagaagaagcaccggttgttgtttcagcagcactcgaatcagccatttcaaaggttaagagagtaggatccgacaagggacaatgtcatcaaaagcttaaaagaaggggattgtacgaatcagatcaagcgtgttcgttcgcgtgcctgtgagataaaattaatcagggtttatcccgaggttctagggtttaagctacagctagctaccactttaggcccattagtctacattttgggcctgtacactcgagccttactaaggtccaatatatgtatccaattaggttttgaggatatcaagatgtgccacgtggcatattgcttttcgaaagaaaaaacgtctacctagttcctacatatgcatgccgcttcaaattccccctccatatatgctgctctaatctcttttcaaaacaaccaaagacagagatcagaaacatcaaaaatcaaagagcgaaaccagagccatggcttcatcgaacgctctttttcttttcccggaaactaaatcctctgttttaccagatccttctcgtttctttagcccagacctcctctcaaaccctctccctacaaattctttcttccaaaacttcactcttaaaaacggtgaccaagctgaatattttcatccttacctcatcaaatctgtggactcctctctctgtatctcatacccatctctgtttcacaactctgatttcttctacgaggtgtttaccgcagacatcatcatttccgggtcaaacggacccggaccgcgttcccggaaaactcatattatctcttcgttcagtgatcttgtcgttactcttgatttcccttcctctaatctcagatttttcctcgttagaggaagcccgtttataacttctctgtctccggtaactccatcactatctcaacgagccatggggtcagatctttgtccagtagctcatctactaagtggtcagacaagctcaccaacaaccagagatggctgatttacgcctcctcgcctattgatctgactaaacacggcgattcctcgattcattgccgtggtgggtttacgggtatagtacgaatcaccgtgttaccgggttcgaatccaggttacgaatctacactcgaccgattcagttcttgttacccagtttccggtgacgctgactttacaaagccctttactttaaagtatatgtgggagaagagaggttctggagatctgctgatgctcgctcatcctcttcatctgaaacttttagcaaaagacggtcgttcatgaaattccggatgaaccaagaatcgtattccccaaactcagaaccactgagtatcactttattagaaatctgattaagaaatttacaactcctttaattggatttacacaagatctaaactactttagcttgtcacctgagatttccctaaacacacaagagcagatcacaagaacacactctttgatctctctagaattccaatcagactaaaccttagtctctaataatgaaaagcgttgcactagcttttcactcacaatcacggccaagtctaacaagaaccttagcacctctatttatactatcgaggtctttggtcttctaggttagccttcgagatcttggatcactacaaatcttcgcgtgaatatttcctctccaaactgaactcatcctgttgtgatctccacgtcattcgttcatttggcggcatatccacgtcagcatcaattacttgatcttcactttagtcttctaaaacagcttccagcttgttccagcaatcaacactccttctagtttgtcctgacagagggtgcactaacagttcagtcaccgttttagatcatttccggtacaaaagtatcgacggagatttagtaggggtcgtcggagactcatgggttcttaaacctgactctgtttcggtgacgtggcactcaatgaaaggagtcaaaaaagattcgtacaaggagatcatctcggctcttggcaaagacgttaacggtttgaattcctcagctgaggtcacgagttcgtcgtatttctacgggaaattaatagccagagcagctaggtttgccttaatcgccgaggaagtttgctatctcgatgtgattccgaagattgtaacttacctgaagaacatgattgagccgtggttagatggtagcttcaaacctaacggctttctgtatgatcctaaatggggaggtttgatcacgaagcaaggatcaaaagattcacaagctgatttcgggttcggtatatataatgatcatcattaccatattggttactttctctacgctattgccgtgctcgctaagtttgatcctttgtggggagagagatacagagctcaagcgtacagtctattggcggatttcatgacgtttgggagaaaagatgataataattcaaattctagttatccgcgtttgagaaattttgatcttttcaagctacactcatgggctggagggttaacagagttttgggacggccggaatcaagagagcacaagcgaggccgtaaacgcttattactccgccgctttattagggttagcttacggcgacaaacatctggtggagacggcgtcaacgatcatgacgcttgagatacacgccgcgaagatgtggtggcaggtaactattcttgaatcttggttacggctatcaacaagttagaattggtagatatgtccctctctatatgaaaaaccaaactaaaaattaagacaccaaaaccaaaacataattttcgtaatgaagatatactttttaaaacaatatttaaatcaaaagaaaatcatattgagccagttactgttattctttcttggtggacaggtgaagaaaggtgaagctttgtatcctaaagatttcacggcagagaatcgtgtggttggggttttatggtctaccaagagagacagtagcttatggttcgggcctaaggagtggaaagaatgtaggcttgggatacaattattaccgatacttccggtgtcggaaatcctctgatgtagtattcgtgaagcagctggtgaactggactttgccggcgttgcagagaaatggcgttggagaaggctggaaaggattcctctatgctctggaaagtctttacgacaaagatggtgcaattaagaagataaagagattaaatatgtatgatgatggaaactctctcagtaatctattgtggtgggttcacagtagagactgatgtcatggcggtaggctggaaaatgttgcttgtttgttcattattgtaaaaactatgatactgcagtaaaatcctttggaatgattagacatatgatcatgaaagcgacatgtgtgattaagttagtaaacgtttttataaaggaacctgtctagcattttattcacaataaaagaatgaatgaatcatcaaaatacaaaagaatgaataaaattagaagacaaaagttgactttcatcgaacaatcaaaacttttccacacctctcaatagacagagagaagctatgaccaactgtatcccttaggaagcttcagctccatgtagaggttatctaagtcaaaagctctgtttcaccaactctaaataaacatcgtatttttcttctgagtgctactaattcagttcccactttcatcatcgtcagctagacatttcaggttaatgaatgcttcaagagcttctctcatccaccaattctgacatacttctcttgcttcatccaaacttacccatctgcgttgtctcatttccgcctcaggccatcgctcgaactcttgactgacaagcaaagcaaacatatacccatcgtgaattatgctatgtcttttgcttttgtattgccatttcccaagcttttcttcgagctctcctgttacacccgcttcttcgatcgtctctctcaaagcagcttcctccattgattcatccgtctcccaacctccttttggaaataacattcctttgcccttttgagcactgacaagaagaacttggattacttgggtttcaactccattgacttcttgtttcttgtatctatacggtacacatctgcagaaaaagttgatattagattccagaaaaaatgaatagagatagtcctcaaattttgaaaacttcaacacgttattccaaattgccgcgggaataattaaccgtttaacgatctttctattgaacacgaattttttaaaattggtaactttaattattctaacgttcgttgtaaaactatatcaaattacacctaaatatttaccaaactaatcattattgtgaatttgaacaacggccaaagctaatttctaattaggggtaaaattaatttgataagaacaaaaattagggttttggaaaaaaatgaacgaagaggcgttaagacgtacccgacgacttgacgatagccagcgtgatcgtaacgctgcaaatcgcgaccggtacgagagaccaaagagacaactttctcgatctgtgcgggaacaaccttggtggaggggatgttctcgaagatgggcgacaaatacgaggccacatttgacaagtttgacacaaaaagagacacagagaaccctgtcatgtttttttttataataccgacgaaccacgaattcagaacaagagagaaagagttggaattaaagaaaaaaaggctctgttctcgaattcgggagaatcgatttaaggaagtctagagaggaaatggataagagagagggagatgtgaatttgttaagagcgttattggttttaggactatttttatatggaacttcccacgcgcttcaactattttttttttttttttatctaatcaacttgctaaatcgaaagtatacatatttattgactcaactttcccggttattgtaattgagttctcggttttgttcggtttggaatctgaaatgtaactcctttctctgtattttgagattcgttaatgagacaactcttcctaatggattccaaattttggtttcactaatggtaataaccaaataaacaatcaaaatcgacacaaaagcctttaatatgttacactattaaatgagcagtttacgtattcccacttatcaaaataaacacgagtattttgtttatcttctagaattttaatgttttttcgtcaaagaaaaatcaaacttagatatcctacaaaaagacaacaaaataaggtcaactcgtaaaccaccaaaaaaacatcggcacagacacggagaagaaaatgcaggaatggtgtgagatacgcgcatcaacggtgcgtgaagaagctgagcaagtgtttttgttagtttagtagtaagagagtgtggtcatccacaaactcgtccctgacgcaaacacggtattaggcgatgcctttttatttcttttctttttttatcaacatttatctcaactaatataaaacgactcacatagtcacattttgttgctttcttctagaagcccaaacgttgttgttactgctgaaaaaacttataaatgggccatgggccattacactacaagttttctatcttattcattgttttttcttttctttgataattgaaactcaaactactatcaatgatgttgaatggtaggttactaagagtaataatacgaccccaaaaaatggctaaaagtttacttcttattctcataaagatggttataatcaggattaatagaacatttattatcaattttttttatgtctatgtttataaagtattttctaaagttttaatgtttaaaaattttaaatggtaaaagcttaccttttatatccttttttgataaatggtaaaagcttgcttggatatgaaaattttatgatggatgagaatgaaataatcaatctaggttattctcgtataggtttagtttaggtagacttttggcctactaccaaaaaactgcgcaggtcctttttattatcctcttttaattattgaattggctgccgatatcttttatattcagagtatctgcgaatagttccaataaaattctaaaggttatttaattaaaatttggatatatacatatatacgtaccatagtgttttttttttggtcattaagtgttttttatttattttgacaaagtatacataccaaagttgaaaatatatgtatactatatataaatacgtaccaaataccaaaatagctgtacctaaaatctggattaccaaaaaacccaattctttgattcgttgaccaatatcctttttatccaattcttgtccagtataaattaaataaacctataattacacaattgaatcactaaattatctacacgaatattcaaatcatgaacaaaaccatataagcctcaatttctctttaaagtcggacaaaaaatcaggaaaaataaaagaacaaaatactcgtctacgtttgaaaattgatttgtttatatatatagtattttaatgatcctcgagattttaggcatttagctctccacgatcgtctccaatttaggcctccaagatccatgttttgattcgtatagtaccttctcatctagggtttctcttatttccacaccatcatgagctcgatcttcattaactgatgatgggtttcttcttctgtctccggtcatcggaaatatgcagaccgggaatattctcttcaaatggttataccggcttttgttgagtgtctccgcggctttgttggagatgagagaaagttcttcttgtgttaagacagagaagagcatgtcggtcgggaggaggaggtagagatgtcgtctcggccgtaaatattcgtcgggagacacggcggtgactcggtggctgatttggagtaaagttgagtcggtaataaagtggccggagtgtctagagacgatgtcggaggttttgatgggttttgagaaaacttcaagagttccggtgaatggagccaagattttaaccactcctgaggatgagtttgttgatatgatcaatggtgcgcatgaagatgtgtttcccattattgtgatcagagtagacgaacaagagaaagagaaagagaaatagaaagagagaaagacgtttagaagaatgggctggctttataattatgcttatatatatagttgtattagtttagggattaagtgatgattaagtattaattaattttgttagctggttgtgtacaactgtgtgtatcttctttctcttcgtaatatagttgtcgtttcttaactttattgggactttatctgatagatataatttaacttattaaactacaaaaagtaaggttttcgtttcaacaacactaattcattaatgcacatatatatggccgctacataattaattttcatataatcaagtcaaactcgataattaatcagattcatcccttatgagaacagcttatttagtttgttttatgtttcgctctaccaaacaaagaaaattacaaatagaaaatgcgtgtatctaagtgtgactttttgttgtgacaaaggtcatttagaaactaaatattcttaattcagtgaaaaagcatgaatcaaggcggtaagattataagcagaaaaatatatttgactttcttacagtttttggccgtcccataaataaactttatacaaaactatgacttaactattgtcataacacataagtgaaaattgtgttttttttcttttctaaacttgattgagacatagtgcgattaaagtgtagaatgtgattaatacgatagagtagagtagagtagagagaagaaaacgcacatggacgaaggatgggtctgattgtgaagagctgggcgatagggcagagctcgagtcacgacgctacctaactcatcattagacatggcttctccctccgttttgtttttgtttttcatttttatactttgacatcataataataaatttatagttcatctgtttttagaaattccaaaagccaaaaacaaagattacataacataagtcggtaccatgaaacaaacaatatatcatatcaatatatatacagctcaatagttgtctggaactctggatacatttattcatttaattaaaggaaaatttgttagttgccacttttttatacagtatgttttttaatcaaggttttctattgttaaaacaaaagcattataaaaaaacatgccatgtataatcattactgtagatttggtattcagatgtagacagataaattcatgttactcaatagattaacgttataaatttaattaataatttgtagtcgattaagaaaattatatagacttcatatgtgtacattatacgtatacagtaacacacagattagtatcaatttttaggctttatagatgtaagaataactatatcaaattttgttgaacattattagtttttatgtctggtgtatatgtctatatatgtggctgtatgtttacttgcgtatatgtatttgtcgctgtcagattttaaaacagttcaaattatgtgatttgatttgtcaagtgccctggactttggactctacttgttttgttgtttatcgctcgttttgttggattaaaataaattaaatcgaatccatttgatgaactgtcatatggtttagtatatcaataattttacaacacaaagtcactaacactcggataacattattattatactaacacatccattagctagaagcctagaactaaagtgaaaaggggatcttaattagctatcgtcaacatatttaaatcagggaattattattaattacattatctgggagttggaatgtcaaaatcttgacaggaactaaaaagctagcttccaaaaacgttagctattaaattctagctaaggagtaacatatacattttaacagtctttttaaaaatatataactgagatatgtgtatcataaactggagtttgcaaactagttgttcgtattgtaacgttatagttaaaatcttccatattcaggtgcactaatttacatgtttatgactaagtagaagataaaaatgaaaattaagaaccataatacgaccatttataaatctggagattagacaatatgttggtaattaaagagttgttggaagttattagtactattatttggatttcatagtacatatagatcagttataacctttagttgaaataaaaacgttaccgaacatggtctgattaatttccaacaaatgaaaacctagctgataaagacgtgaaataaatatagtagatcatcagaagaagagtgttgccacgacagccgatgcaaagctaagtccaccgaagttgatggccggggctgagcttgttggcttggccgtcgaaggagctgcatttccggttgatccgcttcctgttcctgcgttttaataagaataaaattacattaataatccaaaattttaaaaacttagttttataccacgaaaaatataattctcgtataaaaccctcgcaattcgatttaaatttcaaatatttaaacttctatgtattcataccggtactggtggaagatgccggaggagttttcggggttgccggcggtgttgaagacgaattagtaccttcgttaacacaaaatattgtcgcattaattaggctagatatataagaaataaaaacggcgtgacattaggctaaattaagaaactaattaaaacgacgtcgtagtatggtttattcaccggcgctggttttgcatagtgacacgtcagctttggcgccacaagccttggggagatcgagagcgttttctttagtgaggttaagcgatttgagcatatcaacgttgttaaagacagcgcagagacacgtggcgtctttggctacgatctcattcaacggcatgcaacacgtcgccggcggcggagtcgccaagtgaagatacggctgacacggcatcagtttctgaatacacggcagtgagtgtgcgtctcctcctgcaccgccgctcggtggtgaagtcatctgagcattagacgacgtaacgtagcaaaatacaagaacgacggcgacggcgaatctaacagcctccatttcaaaacgttaaatatctctttgtattatgttctttctatctttagttggttgtgaagatgtgaaagttgtaaaacatgcgtgtggtttatatatgtacacaaggtggttataatttttggtttttgaatttaatccagctcaccagcctgatttttcgagataatcagtttctgatcctatcattatgcattggaaacgaagactaagctctggattaattagaaaatcgttacatttattattacaggagttgccaattttaagagtttagatgtttgttcatatagaaagtgtaatgatatggtaccttaaatggaatgatatcatatatgttttctcacctaacacaatacaacttcttatcatttttttttaataaatatgtataatgtacgattactatttctttttgatcaaaaaagttttgcttttggcagataagttaaaggctaaaaggctgttggatatggacttccacgtaagagcctacacgatgtaacgttacattaatctcaatttgttaaattatagtatcatatatatatatatagagagagacagagagatgcatatgaaattggtttgttgactgtaaattacatcggagaattgtagtgatcggagaaaatgagtggcgtggttgggtttgttggtcttgattctttcagcttcgaattagcttcttcgcttcttcgttctgggtttaaggttcaagcattcgaggtctgttgcttcttcttcttttttttttttcttttttttctggggatcggcatgttctggaaatatcatattgatcggggttcaattattcggaattaaacatgtgaaatttgtgggttctgtagtaatttcgaaatactcggtctatctctcgggaattcagctgttttactggtttatttcaatcattcactacacacgtgaaattgatttgattagtagtgtggaatttttgttgattttttttgctttgtctattggaaaaaataaggagggaagctaaattgttgtatctaattcgacagataagtacagaattagtggagaagttcattgaattgggaggacacaaatgtgacagccctgcagatgttgggaaaggtatagcagcatctgagtgtgttgttagttataaggcatttgaaacactaagatacatggaaatgagttcagagcatttgatttgatatccagcattagactctgtacatgcaaaccgtcttgttgtgtttgtattgctacttcgtttcatgactctgtttacttctgatactgtcttgtgtcatgttatttactttgcttcctctctcctctgtctttgtttttaattaagcagctgcagcagccgttgtggttgtactatcccaccctgaccaaattcaagatgtcatttttggtgatgagggtgttatgaaaggtaatcctgaagattctttagctcatattttatgaactttatctcagaattattgtgtaggagactgtatgcgtcatttcttcgcaggtctacagaaggacgctgtattgcttttgtcttcgacaatatcgactttgcaactccagaaactagagaaacaacttacaggtttcaatttgatactctgagtttgaggcatggtttgcctttcaacaccgtattttgaagtttgtgcttttcagtcgtgacaattgggatttgtttccaatgcagagaaaagagagcagatttttgtagttgatgcctatgttttaaaagggatgtctgagcttcttgatggaaaactaatggtatatactctcttgtctagcaaagtttgttatgctggtggagtactattgctagctgatctccattcattgttaaaagttgcatgtcaccgtacttatagtaacccttttcttttcaacttttaagataatagcatctggaaggtcagattcgatcacaagagcacaaccctatcttactggtaaaacttaactctagtgtatagaccctctccagatgtagacgttatgaattttcattttgttttctgagaaaatctctttgtttcattcagcaatgtgtcaaaatctgtacacctttgagggagaaattggtgctggaaggtatgcaactttccagaataaccttctcgtgatcactacaacttctaagtgtttgactgcctatttcctcgtcacgagtcatattgggatcataatgctcaacttgtttactgagtttaatgtcatgaaatctatgagaaacctttggtcataatatgtgtaaaaacacctttgactattctaactgttccccggcattacagaaaaccaattgatgtcattgtttttttctttctgaaccagtaaagttaaaatggtgaatgagttgcttgagggcatacatcttgttgctgctgtggaggctatatctttaggttctcaggcgggtgtgcatccatggatactttatgacataatttccaatgctgctggaaattcatggtatgctttatgctacatggactttccttttgttatgagtaataaaaaggtcttttgatagtaggactgttattaatcacaggtttgagaacatttcttgtagtagtagatctttaagatacacacatttagagaacggaaaaaaataagctgaatagtctaattctggaagttttgagaatagactattgcaagtaagttgtaactacaccagggtttcctgtttaccaaatctatctggaagaaaaatagtttttgtttttagctcctcatttaggcccattgaatatatcactgaaggtttatgccaaattgacatgcccatattttgaccatggctgtcacagaattaaattgtcttgtgtatattttgttttcaggatttacaagaatcatattccgttgttgctaaaagatgacatagagggtcgcttcctcgatgttctctctcagaatctggtatgatacatcaacttgaaagtgttattttatcgatgtcgttctttctgttcaaaggaaaataggaaagaaagtactgcataatttagctccaatttatattatttcttcactgtgattaagtcttgatgtttagcatatgtaactaatgagacgctaactgactttctgatgggaaggccattgttgaagataaagccaaatcgctcccatttcctgtcccacttttggcagttgcacgccaacaactaatctctggtataaatcaatatgatcgcttgtccgggacaatgatttcgacctctttccacttatttatttctattcataactttcccttctccaggaatatcacagatgcagggagatgatacagctacttcattggctaaggtcctgataaagttttctccattcctagttctttggaaacttgtggaaatcgtaactgaatggaaaactactgtcatagaccatttacatgatacatgattctctaacgaaaggttcacctaatgattgagcagatctcggaaaaagtacttggtgttggcatattagaagcagccaatagagaactttataagccagaggatttggccaaagaaattactactcaagcaaagcctgtgaatagaattggttttattggtcttggagcaatgggttttggcatggcagcacacctgttgaaatcaaatttttctgtctgtggttatgacgtaagcctttgattaactctccgatctccactatgaatggtatagggagtctatgatatacatgttcagaatgattgtgttagttggttttaattggtcatatgagtcggtagtatatatacatgtatatgagtaaattaacactgtgtttatagaggcacatggtttgcctcaatctaaacttttggctgtagtgcattcatagatttccctacgtttggctgttagctcggtgaatggtatgctttgtgtttcatataattgttaatttactcatgtattcacattagctcgtcagattattataaatgcaggatttactaataggtgacttaacatcaaaaagaaacgctgttttatcactcttaagcagtaaacatgcaacattgttaaataaaatgttgaaattgatttgaattgcaggtatacaagccaacacttgtcagatttgagaatgccgggggattggcggcaaattctccagctgaagtgacgaaaggtactccttgaaagcagatagattacagtgtagctgtgtcatgtagctctcagctcttctgagatgaatatctgccttttccccttaagtccagtcatttcccccagaaataatacgttaacaatttgtgactgctcctacagatgtagatgttcttgtaattatggtaacaaacgaggttcaggctgaggatgtcttgtatggacatcttggagcggttgaaggtatatctctatatcctagattttagcactggaggttagagctgactttcctatattttctttcaaatatttcagctataccatctggagcaactgttgtacttgcgtcaacagtatctcccgcgtttgttagccaacttgaaaggcgtctagaaagtaagtttttttctttgcttgatgatagaggaaaatccttacaaagtgttttcagtaacgggctacagtaaatactgtttcattctggatggtcatacgctgatcaattctcacttccatcagtatcttttactgtcacttgattgagttctttggtttattcttttatttggtaatcttgcagatgagggaaaagacctaaagctagttgatgctcctgtgtctggtggtgtcaagagggctgccatgggggagcttacggtatgaagtctagaaacctatctaatgcgtctgtaaggaagctgaagttatatagtttttcagataatggcttcaggtaccgatgaagcacttaagtctgcgggacttgtgttatcaggtgacgattgcattttcatttttctggttatatagttcttgttcacatcataacctggacatgcctaattttattatttttgagcagcattaagtgagaagctctacgtgattaaaggaggttgtggggcaggaaggtaatttgttttgactttttgttattaccatcacgatcctttatttactgacatggacacattcactttctttgtaacttgtttatttgatgttcaatagtggtgtaaaaatggtcaatcaattgcttgcgggagttcatatcgcatcagctgccgaggcaatggcatttggagctcggttaggtctgaatactcgaaagctattcaatgttatttccaacagcggtggaacatcttggtaagcattacgtagatttttatggaatatgtttttttttcttttatctttggaaaattctgtgttacatttctgagcatcaacgtcttaacatttctgatgaaaagtgaatcactctgatgctctgaaaaatgttaactatcttatgcataaagccttgtcttaatgaaaccctgtgctcttgtttgttgatatttacttttacaatttaatgagaaacgcgtttattagcctttaatggctcctatttttcatcttgcaggatgtttgaaaatcgtgttccgcacatgctggataatgattacacaccatactctgctcttgatatttttgtcaaggatttggtaagataagcaacattaatcaatttgtaaatttgttttgttttcttaactttatgcatgagttttgactgtagggaattgttacccgagaaggttcatcccgtaaagttccactccatatatcaacagtggcacaccagctattcttagccggtattctccagtcttttaactgttctcaattcatcttgcatgtgcatcatttttgtcctaccttcttaacaatacaaattattatttaagagctcattatttgggttgaatacagagttttatgagttgcaaatttcgtgaaaaatattctttgcagtgcttctttctagaatgttgtggagaaccagaaaaactttctacttttactgaactatactactaaaggtggagactaatatgtttagagatattttcatttacaggctctgctgcgggctggggacggatagatgatgctggagtggtgaaggtataattttggtttgctcttaaagcatatgaactattggacacaagatctacgtatagtgtttgctggttatctttcgtagccatagatggacagatgaagctatatcagaaacgtttggtgtcgtctgtttggtgtcttattaagctgtaagtaacggaaacgttttattttatttataggtttatgaaacccttgctggaattaaagtcgaagggagacttcctgttctgaagaaacaagacctactgaaatctcttccagctgaatggccttcagaccctacaactgacatacatagactaaatatgggaaactcgaagacattggttgttcttgatgatgatccaactggcacacaaactgttcatgacgtagaggttttaactgaatggttagccttgcatctttctctatgaaaaactgaacttatcgtgtcaacaaaaaagatatcatgaatctttcactgaaataattggcaagtcgctagcctagaaactaatggaaggaattgataattgcttattgcttttccctacattttgacaggagtgttgaatctatttctgagcagtttagaaaaaagcctgcatgcttcttcattttgacaaattcaaggtccctgagccctgagaaggtcaagacaatttttattttgtgtaatctacttattgcagagtcccaatttcatggaacaatgaaactttatttttacatcaacttcaccaatgccaagctctaactgcatatttcatcaacaggctagtgaattgatcaaagacatctgttccaacctatgtgctgcatcaaaagaagttggcaatgctgactacacgattgttctgaggggtgattcaacattacgtggtcattttcctcaggcaagtttggtaaccctatcatgaaatagcagactatcatgtcaatgttatgatttcagcttggcatctgtttctgtcataacttgatattatgatccacacacaggaagcagatgctgctgtctcaatacttggggaaatggatgcatggattatttgccccttcttccttcaagggggacgttatactattgatgatgtgcattatgttgcggattctgataggtatgtctttgtgagcaacgtgtgtgtgtgtgtgtgtgtgtaattttttcaaactttcagaatcagggaaaagttcccttcagaggatgaagattgatggtcttcattttgaatattgcaggctcgttcctgcaggagagacagagtttgccaaagatgcatcctttggatataaatcctcaaatctccgtgaggtcttaattcttccaacaagggaatcatcttatgttatttgaccctttaagaaattaatagtaaggaacaatttgatatgatttcagtgggttgaggagaaaacagctggcgtcattccggctaacagcgttcagtcgatctcaattcagcttttaagaaaaggtggccctgatgcagtgtgtgagtttctgtgcagtttaaagaaggtaaatttttctaagcagatttcgcgacgacttctggatgttgctttccgtgaacttttggtcttcatagttgtggaatcagttagtcccagttgtgtagaaagtcttaactctatttccatttcatatgtaaatcaggggtctacatgtattgtcaacgccgctagtgaaagagacatggctgtatttgcagccgggatgatccaggtaagccgcccaattattcttctagtctttttagtttttgaggcatattcaattagaggatacatttatttttctcttatattcttggtcccttcgttcgattgaacattatatttggcaggcagaactgaaagggagatcctttttatgccgcactgctgctagctttgtgtctgctctaatagggattattccaaaagatcctgtgttgccaaaagatttcgaatctaacaaagaaagcagtggtgcactaatagttgtaggctcatatgtcccgaaaacaacaaagcaggttagattatctactaacaacactaatttctttgatatcttctcaatgaaataaaattaaagagccctgagtcattttcttctaactaacaggttgaagaacttcaatcacaacataaccagaatttaaggagcatcgaggtaagagaagtagatgtaacacgggatacttatattagtatataccacatgttatgcatgctttgtttgctaagttctagcaatgatcaacagatctctgtagaaaaagttgctctcaagtcatctgaagtgagagatgaagaaatcagaagagcagttgagatggccgatgctttccttcgggctggcagggagactctaattatgagcagtcgtgaactcatcacgggaaaaagttgttctctatctcaaatctttatatatttgtgtcgttggtataaaatcatgactgaggaatatcatcattaacgggtctatattcattttgacagcatcttcggaaagtcttgatattaacagcaaagtgagctccgctctggttgaagtagtgagccagatatcgaccagacctcgttatattcttgctaaggtatttagcttctatatttatctttccatctcataaacttcctgacacactctgtcaatccccagttgaaatggtaactgttctatgatccaaagcctttcgatttttttttatgacactgtaacgtcattgtttagggtggaattacgtcatcagacacagcaacgaaagccctgaaagcacgacgtgcacttgtgattggtcaagcccttgctggtgttccagtatggaagttaggtccagaaagtagacatccaggggtcccctacattgttttccctggtaaatcttaatttgtattcaaaacatttaactgaataaaaataggtattcttaatcaactctttttccttatatgtaacaggtaatgttggtaacagcacagcgcttgcagaagttgtgaagtcttggtcagtggtagcaggacggtcgacaaaagagctgcttctggtgagtatccttctcgttctctagcttcatatatctcttctcatattgatgttgtctttctatgtaaaacagaatgcagaaaaaggtggatatgcagttggagcatttaacgtgtataacctggaaggaatagaagctgttgtagcggccgcagaggaagaaaatagtcctgctatattgcaggttagtgttctgaccaaaagtggatttctgatatacaatagcaaccaaagattaacattctgttctgagttgttcaaagatgtccgacacaaagagatttgataactgaactttttttggctaccttttttaggtccatccaggtgcctttaaacaaggaggcattcctttggtttcatgttgcatctctgcagctgaacaagccagggtaagtggctttgtaactgtacgttgattctgcattagatacataccaaaattttaggcaatcatgtacttttgaactcgctctctagctttcatctgtggtttttcggaatagacattgaaatcaaaacttaatagctgatcctaaatacccagtacatgggtctgactctgagccccctgattaatacgcacaatgtggcaggttccaatatccgtacactttgatcatggaactacaaagcatgagctattagaagctcttgagctagtaagtttgagatctctatcacttatgtgcaatctctgtgtcatcttttacttattcttatattgaaaattcataccaaatcgatttcttgcagggactagattcagtgatggtagatggttctcatctttccttcacagaaaatttatcctacacgaaatccataacagagttggcccgttccaaaaacattatggtggaagctgaactaggccgactctcaggaacagaggatggcttgactgttgaagactatgaagcaaagctcaccaacgttaaccaggtccttgttggttttaagccccgataaatccaatctctcacctaacaaatttatgttgctaaaccaaactacaatttattattatgagttttcaggctcaggaatttatggaaactggtatagatgctttggctgtgtgtataggaaatgtccatggaaagtaccccaagtccggtccaaacctcaagcttgatttacttaaggtgaattatattcttgtgctgactgaagtaagttctatgagtttgtgtcattcttattctaactgatcaccatgtatgtaggaactgcacgccttaagctcgaagaaaggcgtttttcttgttcttcacggagcttctggtttgtctgagaaccttatcaaggtatgagtcgatcatgtttgaaagtttcttgtttggtaatagaaaactaataaaatcggcgggaaattttttcttttgatggagatcttgatatgaatttaactgaattaacgtctttgtgggctatgaaaattgttgactgaatgagatcaggaatgcattgagaatggagtgaggaagttcaacgtgaacacagaagtaagaacggcttacatggaagctcttagctctgggaagaagaccgacattgttgatgtcatgtccgcaacaaaagcagccatgaaagctgtgatcgcagataagatccgtctctttggctctgccggaaaagcttgagttgttgataaaaaaatgtccgatcaattagttaagtacaattgtacatcacatccaaagaataaaaaaacaacaaatattacatcacatccaaagaagatgaatgcattgtatgcaatgcagatgcagtgttgttggaaataaagaaatcatttttagtactgtttaactgttttttttttctttttctcagtcaaatatataaatagaaactaaatgggcaaatatttaattgttgttatcggataaaactactaattattcatggctataaaatcctcgcaatcttcgccgtttatcttcccgttccccgatcaaaaatatcccaaactctcacacacattctcttcattgggactcatattcttctttcttttctttttctttcttttttcgtgtttttattttgctatctccaagtatttatctttatgacttgctttgttcctatccatggatgtatacttctttgtaatggagattacttcatttctgaagcttttgagtcaaactgatggttttggatttgggatcttcgttattggttgctcctctcagtttttcaatctcgtctttctctgttgtttgcttcttttgggactaaagtttctatctttcaaaggtacttcattgtttttgcagtatttagagaagatcaatcgaatttctccgaacattgagtttttcaattccttcaatcgagaacacaaggattgcaacaacaacaacaacaacaacaacaacaacaatgggttcatttcaaaatctcatttggctgatggattggatcagaagaaaccaatcattttacactggagttctgattctactaatagattgagctgggagaactgtgatcttctccttctacgtgatgggcttgatcacatccagaacagagaaaataccgtggcgttatcggagacagagctcgacgagaagaatcatcatggcgaagaagaggaaagcgaggacgaagaagaatcacagtctcagaatgatgaagaccaattgttagacgttattactctgagaacaatggtgaagagagagagaaaacgtggagattacatgaagaaagagctggagaaggagagaagagcagctgaatcagctgctgaagaagccatggctatgcttctgaagctacggatggagaaaagcgttgtggagatggagacaaaacaatacaagagagtcgccgaacagaagcaagtgtacgatcaagaagtgattcaatcattacagtggatgttgatgaagcttgatgatgacgaagacaagattcaaatgtaaactgtttgatcctctgtttttttgtatttatgcgtataaaactataaataagcaaaatataacatgtatgtatccaatttcgattaaaccgaattaataatcaacaaaccaaaccgaaattggatctaatgtttattaagacaagtctagttacgtggccggttactattggatatgtgacaacgattcaacgtggcaatttatggactattgaaagacgttattgcccctttcatcttcattctttctttggtcatccatctgaaaattcgatctgatcactgagaaactacggcgacgacgaagaatacggtggaggaggaagtacaatgagaatattaagctacggaatcgttattctctctttactcgttttctctttcattgaatttggcgttcacgctcgtcccgtcgttctcgtcctctcaaatgacgatctcaatagcggcggcgatgataacggagtcggagagtcctctgacttcgatgagtttggagaatccgaacctaagtccgaagaggagcttgatcccggttcatggcgatcgatcttcgagccagatgactcaacagtccaagcagcctcgccgcagtactactccggcctcaaaaagattctatcggcggcgagtgagggaaatttcaggttgatggaagaagcagtggatgagatagaggctgcttcttcagctggagatccacacgcacagtcgataatggggttcgtttacgggataggaatgatgcgagagaagagcaaaagcaagtcgtttcttcaccataatttcgcagctgctggtgggaatatgcagtcgaagatggcacttgcgttcacgtatcttcgtcaagatgtaagtaaagatggaacttttgattttctttatgaatagatgaagttgcatctgagtgtttgttattgatttgcgattctgttacagatgcatgataaagctgttcaattatatgctgaattagcagagacagctgtcaatagttttctgatctcaaaggattctccggtggttgaaccaactagaattc

SEQ ID NO: 9 - DNA, 108767 bp, Arabidopsis thaliana
gaattcccatcagttacacttgttctcgatccattcagaaaaaaggatcttgctgtacttgaaaggttactaatatgcttagcgcgtatcattctgcaaaattacaaatgaaaaatcacagattcagacaacctcacagcaattgattatcaaacatactctaaaactgacggtttccaagcatagaaccaaccaatgaattagaagatacattagaaaaacatacccaattagctcttctccaaactttgaacattactataaaaactagcttcctcccaacaatttaaattctccaactttcttgcatacactcacaagtaaagcatcatacacttcgaaataagagcaaatgtttatactttctctgcttcccacattagaacattcaattctaaccaaatgctcaaaatttcgattttgtcaccataagaatcctttttcgacatctgattcacattagaatctacttgatcacattcgaatctcactaccggtcatcaaaagttttttaatttacaaagttgagctaaagtctcgagaaacgcgttaaacccagaaacccatctcggcattattcccatcgtaatggaaacgcaaaaaacgaaaaacagaaatcgtcgtgcactgattaagattagtaacaaaggtgagattttaagcaggatcaatagaacacaaaagtcacctgaaaaacggtggcgttaacttgttaggttatgattattgatgtccctgcagaattctccaggtgatattgaaaataaatagagagagagacgagttcgtcttcttcctcacgttgtcgtcgaaattgagagaagaagcgttcttctactctcctccaagcatatttggtcacacacacggaggctgctgccaattcaaggtctcaacttttttttttgctctccttttatattttcacttcatttctcttacctaaactttcaaatatacccctcatctttaattagtttccaaataacacctaatagtcttattcttacaagaattctccccattcttaatagttttttttattcccctttcataacttctttctctcaattagccagtaaatatttctattttgtttgatacatgataaattcgaagtattttttgtggttttaaaaaggattatgtgttttatggagttatagaagaatatatggctttgactaaaaagaagaagaaattgagcttctttttgttattttccactttggttagttcttaattgcaacgtagaagccttgccctccccaagtttcgcaagtcttcaacaaaaatgttccgcaagtcttcgctattacacgtggcgttgctttcatgtcttgcccgtgactgtcctgttactctagtggtcagagaaagtttctttttcagttgtattttgactattcagattttggtggtaagttgagaaacgagaacttttagcggaataagcattatatgattaaaaaaactctataatcaaagaagaataattgtcttgtagagtttgctaatcctcttctccaagcaaggtgcaaagtctcctctgcatactaggcttagttcaatacatctttcaatctagttaggcccattagcccgttatgtttacaaagttaaaagcccacttacttgagaaaattcacagatgcacacatgcattagattatgtactgcaatctgaaaatgcatgatgagaggtctcatacacaaaacaaaatcaaaaacaatttagaaaaatattagagtaacttataaagactgttacagctgaaactaaaatactaataaattcgacttctggcaataattaaggattacatctcttttgtttagagtataattgaacttttggagctgtaatataatttgtatgtatgatttatgaaaagtgattgaacttatacatagatggaaaagttggcgtaacaacatgcatgatacatacagaacacatgcagccacagcatttgaatagaacacatcatcacaattcccaaacataatcattctcttcagcaaaaagacacactctttccaaatataattgtcacttttactgttttaaattttaagttatgccagctttaaagttgccgacgacaaaagcatgtccatcgtttctttcttcttcggaagattaatcagaggatttaaaataatctaaattcgagattatgttgtataaatatccattttgaaacttgaatgaacaaaaaaccgataaagttttccacgaataagttgttggtgtttttagtaggttcatagataggagggtggaaggtctctagttgggcaataaattgaaaccgcttttttctgacctaccaaatattaatttgatcgaatcattgaaaaaaatacatatataaaattatccatataaaaactatgtagtttgctttaaaatatttcatcgtatgcaatgatatatgcatacttaatccaccacatgtcccttgaaacaaaagcacttaagctctgtgtggttgacattaaatcacacatttcattttgttaaaattaaagtctaaaattttattcatggtagtacatccatcatcaaagaccattttcattgaacaaaataaagtttcaatctctaatcctttgtgaaaattcttactactatatattaattaggtcttttggaatatagacgcgcaacacacattttcttatatatggattgaatggtatccaaatccccaaggtaatgtaatgtaaaaccaagataaagaaaacgagtatgacattgacaattgaacttgtagcgaagtcaggataggacgacttgcggtttctactttctaagccaaagaaacatagttttcattgatttttagtgtttttaaatttgttgttgacttccattaatggaatatttcgtactttgcttcttcttttcgaattttatttacctatataactttgctttattttctacaacacaataagtattgctcataattgaggaagtctatacacacaatattttcctatcctttctttttttctgtcgggaatttcttcatatcctagcatctagattatgattgtacacatacaaaaacagaaaagaactagacttcaaaataatgcaaattagaaacaaaaaattgctccaaaaaaaatatattcaaaactataaataaaatattattatgatttttcttctattttacgtacattgtatatctctagagaagaaaataatttttaaaaaatagtttgggatcaacgtcgcacttattgttttgtcttacaatctcagagtctcaccgtatccaccacgctggtcaacaacttcaacaaaactctcttcctcgaacttcaatcttatcccttcatttcattaccattaattcacaccaacggctaacattgtcctcctcgctaaactgttaattatacgtttggccgtaatgttttgaagtctgcctatatttcttttcaataaatgctcttttaattaggttttaatttggtgaaatccaacctttaaattttctgatgctgttaaatctaagagtttgaattttctaaaatcattgttgtcggttatcatttgtacatcttgatagaactataatatgatcaatataaacttataataataataactgaaaatacaaatgattttgtttgtttgtttataaaaccactgaaaaatgcaagagttaatccactgagttcaaccaaaaaataaagaagtgaattctattagtcataagcttggaccaaaaaatccatctagaagaaaaaaaaaattgaaaaaaaattacaagtttctaagaagatggtgcaatggttagaaaaatctctcaagttattaaatgcatcataaactaatactgtatattactatacacaaaaatcaaagactcccttttttttaattgaatcaaacaaaatccgaaatttcgaaaggtccgacttttcctcacctgaacccgcgttttctctccccctcccaacccaactctccaattcgccggaaaatcaccgccaccgtcacttccggcgtccatatgaactaaagagataagcttttttcttctataatccttcttcttcttcttccttgatctcctttctctgagtttgctgagtttcttaactcagccatgggtaactgtaacgcctgtgtaaggccagactcaaaagaatcaaaaccatcttcaaagccgaaaaaacccaatcgagatcggaaattaaacccattcgccggagatttcaccagatccccagctccaatacgtgttctcaaagatgtaatccctatgagcaatcaaactcagatcagcgacaaatacatcttaggtcgtgaattaggtcgaggcgaattcggaatcacttacctctgtactgatcgtgaaacccacgaagctttagcttgcaaatcgatttcaaagcgaaagcttcgaacagctgtcgatatcgaagacgttcgtcgtgaggtagcgattatgtctactttacctgagcatccaaacgtagttaagcttaaggctagttatgaggataacgagaacgtgcatctggttatggagctttgtgaaggaggtgagctttttgatcggattgttgctagaggacattacacggagcgtgctgctgcagctgttgcgagaacgattgctgaggttgtgatgatgtgtcactctaatggagttatgcatcgagatttgaaacctgagaatttcttgtttgctaataaaaaggagaattctccactaaaggctattgattttggcttgtctgtgttcttcaaacctggtaaagattcaatttttagtgtttcttaactcagtggatggttctatttttagactatcctgccatatcttcatgtttatggaagtttgtgtagatatctgagattgggtaaataacgttttctttattgtaggagataagtttacagagattgtaggaagtccgtattatatggctccagaagtgttgaagagagattatggaccaggggttgatgtgtggagtgccggagttattatctatatcttgctctgtggtgttcctccgttttgggctggttagcttcttcttttaattattttagcagctgtgtaattgttcacctatgttgattagataaaccgataagattgtggtttctattgacagagactgaacaaggtgttgctcttgcgatcttgcggggagttcttgattttaagagagacccttggcctcagatatcagagagtgccaagagccttgtgaagcagatgttggatcctgatccgactaagcggttaactgctcagcaagtgttaggtgaagttcttgtgtttctgttttctttaatggtcgtagttaccttaatccactctattactaatgattttctttttctcacctttcagctcacccatggatacagaatgcaaagaaagctcccaatgttcctttaggagatatagtcagatctaggttgaagcagttctctatgatgaacagattcaaaaagaaagttcttcgtgtaagtgttttttttttgccttttacttttctgctgaagtttgtagagagtctgttgtgtgtgtctatatttggttttgatcattatcatccctgttaatgcttccaggtaattgcggagcacttgtctattcaagaggttgaagtgataaagaacatgttctcactgatggatgatgacaaggatggtaaaataacttacccggaactcaaagctgggcttcagaaggtcggttcacaacttggtgaaccagagatcaaaatgttgatggaagtggtaatttaagcattgcccttatctgattaaagaccaattcagtgttcttctctgataaacatagctgaaatctgtatggctttgacgcgcaggcggatgtcgatggaaatgggtttctggattatggagagtttgtagctgtgataattcacttgcagaagatagagaatgatgaacttttcaaactagcttttatgtttttcgacaaagatggaagtacatacattgaacttgatgagctacgggaagctttagcggatgagttaggcgagccagacgccagtgttctaagcgacatcatgcgtgaagttgacactgacaaggttctttcaaatatccaaaaaaatcctcctttaaggcctaacaataaagcttgtcaagagaaaagatatatccctctgcttctgagtcggattgttgggcttgtttgctttttacaggacggacgtataaactatgatgagtttgtgacgatgatgaaagctggaactgactggagaaaggcatcgagacaatattcaagagagaggttcaaaagcttaagcattaacttgatgaaagatgggtcattgcatctccatgacgctctcactggacaaactgttcctgtttaaatttattcgttatcaccaaaaacagagcaatgctccgttttttccccatttcataaattgggaattttccgggcttgttctttgagggatgggaattttacggaagctatggttctttacatatataaacattttacattgtattttgtatgtaatgttttgttcaaaggttgtatttttattgtctcaaagcccctaaaccaaagagtcaaaggaaagatctttattacactgacaccttatcaaactcagcagaagtcttgtccatgtccttgtccttggccacaacatctttgtaacggtaccaatgtgagaccaacaagaaataggccaagtttagagtcatcataccagcaaccaagaagtagaaatactccaatcttcccttgtttaaatcttccggaagccaacttcctcctgaaaatccctctgtggtatcgtgtaccgccgataacaaaaaggtgctgaggtaactcgccaatccgattccacaataatacagagaaccagcaaaacttcgcatgttctctggaaactgtttgtagtaaaactccatttgtccaactccagcgagggcgtccgcgatacccattagcactagctgaggaatcaaccacataccggacatcgaagagattgcgccttttcttggggccaaccctagcgtcggttttgtgagagctacctttcttctgtattgttctacaattgcagacaccatcatacttgtgatgcatagaaacagtcctgctccaactctctgcagttgtgtgataccgccgtctctgcctgtatactttctaaggaaaggtacaaggacgcggtcatagataggtatgaatatcgtcattccaagcattaggaagacggtataagaaccggccgggatctggaaacttcctggaccaaggcgtctatcggattgaagagactgaaagattgtgtaggttgtttgttgaatgtaagctaggtagaataaggcggccgagagccaaaccggaagcacccggatcacgcatttaacttcctccacttgttgcatactgcagagtttccatgcatccaccggcgacccatctttgttcagcttgtcgtcttgtgtttggattgccgatttgtcaagaaacctgcaaattaagaaaaccctaaaatgtttctaagttgttccacaagaaactaagagaagtagtgaggttattagtacctgaactgctctgtatggcccaatttcgagttcttgaaatcactggcgatgtagttgtaaagctcgttaggcccaacgggctttaaccgcctcttcttgatcgcgacaacaatgacacgagttatgctgtgaatgggactgccactagctttaaccttgacatagagcttagaaccagcgaagaatatgatgcaaccaagtagcattagaatagctgggatggctaaaccaatgctccagctcacgtttgactgaacatagacgatgagggttaacgacaccatctgagcaaacgtgaaggtgaagaaataccaattgaagaaactctcaatccctcgtttcccttcttttgtcttcggatcgaactgatcagcaccaaatggaagattgcatggcctaatcccaccggctccgatcaccagcaaaaccattgctccggcgagaaacatgatttgtccgatggatggcccattgcacacgcttcctatttccttagcgcattgagctggatgcaggggatgaatcacagccgttagatccattgccaccgaaccctttgcatcaaacacaacaaacgattgaaactttcagacataatcagctagttttttttcaaactgaaaattgtgatgaataggttttagaatttacgagaaagcaagcgatcatggcgaaagatagggtcttgtagcggccaaagtaggagtcacagaggaaagcagcgacgatggtgccaaagttgcttgtgccaccgtagatgttgacgactttcgcagccgtgatgctcttcatgttgaaaaccgtcgttaagtatataaccagattcgatgaacttccaacaatccccaatttttcaaatgtctcatttcctaccaaattaagaaacagagcattaagttactctgttcataaaatcctctgttttctctatcagtttcttgttcgtttcaagaccaaaaatgttataataaataaaaataaaaaacatgaaagaaacagatccataaaaaaagtcctatgttttaattttatgaatcaaatgttttttttgtcaatgaatcaaatgtttcataaataataataaaaacatactaaaagagcacgaaattaataaatattcttatatttttgtttatttatttctaataaatatttttatttatttacaagtataaagtcctcatgtttttccatcagttttttgttcgtttcaagattatgagtgtaagtaaacaaaaatcataattttgaaacgaacaagaaactgatgaaaaaaacatgatggctttatacttgtaagcaaacaaaagtatttatcaaaaaaaaaaaatatatatatatatatataagaaagaatatggatgaataaataccaatgatgaagggcatgactttccatcctctgtagatgatcttagactcatcatcctctgcaatgttcttctctgtcttctcaacctccattgttatgtttttctctatgctctgctctgctttctctaagtgtgtgtaatgtgttagtatatgtgtgtgtgtatatatatattagtgggaagtgagaaggatctcattatgagaccaaaaaagctatttggagattataccaaaacaaaagtgttggattagaatatagatttgagtaaaaagagtcggctttatcgaaaggagaggactggagttggtattcctcacttcattgttttgatttgtcaactaacacactaacgttcggataacttattagtttatttgttgccatgacttatgtaatattcttaactcgttatttaaacattaagtagcagtcaagagttcatctttaatatctgtaatatcgacaacgaatctatccttttacttttcatctagtaggtattcttaaacaatatgaaaaaatgataaaagaagaagaagaaagctaagaagagttgtttaagaatcatatattgtgccaatacgaacatatttctgtaatgttgacaattggctttttagttgaatgcaataaactttcaaaaatgcaaaaggaatcttctcgctaccgttactttttttcttctcaaaactttaattatgtaaaagaaacatttaagcatgcaaaagagaaataaggagacgaccattgcattcaaaaatcatgttgattcgttttgataaatatgaccctcaagaggggtaaattgtattattggcggtcaactaatatccatattcttttttattttaccgattatagttcatgtacatttctaggttttttaaaatatatctatataagtaatgaatgaatgaattagacatttatttcgaaattttctatactatcaaaaatagaaacccaccgaattacgatttaatttggagaacaagagtatatgttaactaaaagtcttatctaaaaaagatgtacatttgcttcttctttttcaagtgatgggtaaaagaatatttatattaatttcataataaatagaaagttgtctttgaaattattgctacagaaataaagcatttcaattttatagtgagatatgattgtgagaacaattagaagagaatatgagtgatggagaagacagttttgattatcaagggaacaaaaaagtatcttttcctaaatgatataacccaaaaaaatcaaatcccttttgattggattagtccaaaagaaaccacccatcacttttctgaaaccccattagcacactatcggtaatctaattacgttcgttcgttaataagtagtaataaagatttgtttttggagccttaattattatgttttgttattgtcacataatattcctaaataatttgtcattttttcgtgaaggtggaaatatacgtcagctttggatcacaacgtgcgtaagtgtttcatttgatggacctcatagagtcatagtcgcttcaaaggcttctagtctggtcagaaattggacaacaagtagctaaaagaagatttaaagtgtaccatgcagcatcatcattagtgttgcttctatttacaatatacacaccaatgaccaaacacacaaatgatacaaaccaatttagttattaaacaatctcaattcccgcctttctttagttgattggttgcaaagctgactcatgttcaagtgacttagtgaactgcagaaaacacatatcaatctgatttgagatttcataaaagacatggaaattgcagtgagagtgtttaacaacattcttgaagactttttcacctgagagatcttaagctcaagctcgttccactccgaggaaggattgcttcctgaaacgattcctgttcctgcatagatcaatgctccaagaccctgggagacacaaaaggaccaagataaatgcactgtatttaacagtgaatgacccgtttgctacactaaggggagttgtcaccttttcgactaaagcagatcgtatgcctacagaaaattcactctccccaccaccaaagaacccaataggtccagcatacattcctctatcaaatgactctggaaaaagaagaagaatatgtatctcggtataagcatatattagtagatagctacttctacagagaaattcttttttccgaaaagacagtgaaagaaaatttgaaaagcatcggaatcaaattatgttataccaatttgtttaatcaaaagcctagcttcttctactggacatccgcaaacagctggcgtcggatgcaaagcagttaagatgttaaactgaaacatagacaaacatattttgaggtaagagagaaaacgtagcttttttcactcaatggaaagaggactgtagtatgagactacaacagattataagttaaaggaaactcatatctgtctattttagataacctgcagaacaagtcaagtgatttagatgatcatgagaggttaaaatcatgtaagaaatgtcatgtaacctcatcatcttctctttttagctgtcctgccaattgagaatatagatgctgtactcttgcaagctttctcactgatttatggggtttaactactaccctgtcacatatggtctgcaaagcagaagagaggattacaagaaaaataaaatcagaaggttatatataaaaaagacattcaagataaatatgttttagcattcacaaagattctgctaaataaatgttcttctacttgaagccaggaattgaggttgatgagtaaaaatattgaacttactttaagtttttctcttatattctctcggacaatagaaaactcaagatcgtctttgggactacagtagtatttgcaaataatatcagtacacatatctggaagtttctaaacatgcatcttgtaagtgtacaaagcacaaaacaaacagttgacctggttagtaagtcgcgctctatctccatttcacgaacctttgaatcacctctaggccttgttgcagccaaagcctcactgcagacacctagatgttttctgtggaagagtctctcaggctgctccattaagatgtatgtcaacattatcatagcagctaaaaaacagagtttggcaacaacttatctaccacgtaagaagaataagtaacctaccgtgttccctatgaatgctggtgcaccgggtggttgaagacagaattggtacgcgtcttgtccttcacactgtcatattaataattagactcagatttcaacacttcaaaattgatataaccggaagaaagtgattagtctaacaaatgagtgaggaagaaaaagacacctgcaaccgtgctaaccaagcgataggatcaatgtcggtatccgtaatgattctgctactgcgtgcaagcacaacctgatccccaaaccaaaatttcgtcactgaaacccataaaatgtatacaaaaaaggaagataaggttccttaagtaccttgcttaggggtgaatgtttgtccttgataatctctagagcattattcacagcagggtaataggctccttcacttggaacatggttcttgctaacaacaataactcctaaagattctcgccgtaatctcattataacagaagaaacctgataaaaccagacagttttagctttgattatatcaagtaactaataagttaaggagcagatttagaaaatggctaacctgaagcatagtttcctgaagtgcttcaatagcattttcaagcgtccatgagagctcattgtcccaagcaacagttgcagccagcattgagcttcctccaaactcatcaaactcgacctatgtgtatatcaacaaaacaaagtcattattagtccatggtaacaacaattatcttaaagaaatcaaattctagtacctggggcactgtaaagtaaaacgagccaaaatgttcccattccacagcgatcttccctgtaggatcaaatcgaagacctccataggcacgaatcagaggagactttgaagacaagaaccttcaaaacaggggaaatgaacataagaagcgaagagataaacagcagaaagaatcaaacttcatgaagataaaaaactttcggtgctggtaccttcggattgatctccagtcatcatgagaaaacgggtcgagatcgcggaaaaagacagcagacccgattccagcgacactaactggattatgatcagatgatccattgtcacttgagaagtcttgaagaagatctggacggccagaatcgctacgacgggaaaagaaactgcgaggaagaatttcgttctgtgcatgaagccaatcgattgctccaattttctgctcaattggtaccttcaatcacaagattaacgtctatgaaaatagggctttatttttatttttgcgcgggagagaatataagtcgctaatgtttcgatttttgattttttaccactatttattttcttttatcttaaaagtcaaatatttttcttccagataaacccatgaaattaaaatcttactttcttacatcatgaaataactatttaccttaattattttcataaacagataaatccattataatagtattgataacattcataaaaagagactacttgcttgatatttttctaaaaatctaacaataatttatttatttgcagaaatacaaaaatattgaaccaatgatgcaaaatagttcaaacctgacccccatactatttgggtagatagattttaaatctaacaataaagttgagtcaatctatgtttatgcaaccgacagtccgacagcaagaaatggaacaatatcacacataccaatgtaagagctccacgtggcttaagctcatttgttttttaatcattgtttgccttacgaatttttggaatggcacaaagccacaaactaatgaagaaattattacgaatttacgtacctgtaatcggacaatgccggaggagaatggaggcggttgagatttgaggtcagagacggcggttatcagcctctccgtcgcggctgccggagatggcaccgttgatagagtccttgtttctaccgtgccaagtggtgctttgtggtcagcctcacatccgttcatagacagtgtacagcgtaggaacctctgtttcacaaagagggtttcaaatactgtgacgtaaaagacaaagaaaaacagagtggttttgctgaaacctgaaaatgattgaaaacaaaaaacgaaaaaaaaaaaacctggcgagagacacgagaggataatttggtgaatgaggttcgagagtagctttggaagatcgaactgggattgtattttttagggtttgtgcccagaaaatggaatgaacactgaagcgacgccattagagagactacgaagatgttgatattattgtatggcactgagacttcaacttgtacgatatgtcttgcctgaatatatatacatatatatagatgtgatcctgaaattggtcccacattatgttaaatttcgttttgagtttcatgaaaactgctcaagaaattcggtctataactagattttaacccgacaactcatttttaacaattaatatatataaaaatttgtaaattattttatagtttgcaattgttactaagtaacgtcctgccaaacccgtctacaataaaaactatttattttattaatattgatcttatttataatatctttatgaatcattgtcaaaatattttagtcgttacgggacattgaacccacacatttttcgcctattggttaatatatgttcattcttaaaatttcgaatcacaaaataggacgaaattgttttgagattttttaaactctatatgttatataatgatgttaatttttttgatataataaactttttataaatttaaatattaataatgttttatgaagtttaaatatatatataataatatttaaaaaattaatattttttgcctctttaaataatgatataataactctaaaagcaagaatttagaagatttaaatctttaattaaatattttcatgcctaaataattaatgtcagtagcatgacattgtaaataagttcaaatacatgatttgtttatttaaacaaaaaacgtttagtaagaacaatatttatttaaacaaaaaactttattttaaaatattgttaacaaaatacgtttatgctaattttaagggattgatgtgaagtttgtctggattaaattttattgataatgtaattgacaatttaaattaagaatttaaagtaaaattaattattttgaaaaaaagatttaatgctaatggcattggattgtaaataagttcaactctaagatttatttgctaaaatggctgcaaaaatgtatatatagatagatttgtaatgtaatttaatatcgactgtgtgattgtttaataattaacaaaatgaagattttatttggtaatcaggatctatcatgaaacgaatctcagactaatttttcaaatatttatctaaaatttagcattcttgtcccatgttcatgtaccattcgaacgttgcgcctctacagtacaccaccatttcgttaccaaaatagccttagcgggcaaatcatatgtagttatagaataccgttcttaacatttagatcatgttcttcgttaatataatggcacatctgattaattaggttaaacacagttagccatgtatcatagatttctatggacatttaaatagacgtttatcaaatgaatgaatcaaaatagcttttaatttatctaatggatgttcagcaaaattaaactaaaccataaatctatattattatttttaacaaaccataaaatctaaatttaaaccctaatctttatttaataaaatagatcgacatatacggtataaaatatgctcgggataaataaataaaaaactaatcgtctcgtaacaattaaggtaaaattgtcctatctttgtaaataatatattttctgttagcacttagccacttagtagtggaaatgtggaattaatctgctccaaactctagagattagtgaaaagaaaaacccttgagatttggaagagagttagactcttcttatatattcttaaacaaatatctgtctcttacaaacttttacatattcagtttctataaacctttaaaagtcaagttatattaactattgaaaataacaataaatgtcgaagctttgatggtcaaacaaaacaattgataacaaatcaatccccttcaggccacgtgtggggaggtaacgatacgtccatatcaaattaatcatttacgttacagaggcgtttcgtatctgaattcgtatgagcctgcactgctttttttcctttttaatagttctgttgtctttgtcatctactttactatatacagagcaaaaagaaagagtacgtctatgaccaacatttgacggagatgttattaattgcgtatcgtagattcgtataggtttgttcaatatttcattttgaatttttgtttgccagtttaaaaaaagataaagttaagagaagatttgatttatttttgttaacaagacaatattgtgttaaagaaacaagtgagctggaagaaacacgacattcaacacgaaaacccaagtatatcgtgttgttgaaacacgagtatatcgtgttaatggtatggcttgtgatgtttcgatcacaaccactaatcattgacgttactcataagtttgtttttcgtcttctttttctcttttcgtttttttaaaaaagtttttcttcttctttagttggttaattttttctttttccgacgatttaaaggttatattatcagaaaagtaaactgaacgaagaaaaattcaattgtttgagactttaaacaaaactgagtgtcggattaatgaacacaaagaagtgggggaatcttctatatcttcttgtcagaaaatccaaatgattcacatgaaacatgtattatctagaaaggaaacattcatttctaatttctttctctttttggtgacctgtgaccaaatcagaggtcaactactattcagaaatttgtttgtacattaaggatgaatttaggttgctgtggctaaaggtataggaaaccacatgagaacaaatagcgttccagtcaatattttaaactcttctctcctctactatcacaatgacacgttacactggatggagtggaccactgttttttcttagttcctctacgatacacatgatatttacataattgaatcagtaatatacaaactgggagaggatggaccacttttagattatgactatttgctttttgtttggaaagagaataatgataatcaaatgtattattgtacatgatatttttggacttgattttggtgacataatcaagaaatacacacttgtcttgtcttgtcttgtatgtggatacgattgtgatccggattcattgatcacctagacacctaccaagtgaatgattatactatattctaatatttggaagacactagagagattgttagttttttctgtttttctgtttttctagaattgctagtcttttaacaaaaaaaaattaaattaaacaaataaagccaaatggttaaataatcaaggcttaataaaattcactttgtccgatcagtgccataaaaaaaaaatcatctatatctcttctttttttttttcctttttttttttatctatatctcttcatcaacacatatatagggtttccattacaagaaacaaagaaaaataggttataatcaatcatcatattaatttgggccaaaaagctttaaagtaaccatataaagatcaagttttaagactcataaaactaatcacgcagaaaaaaaaatatgatgagaaaaataatgatgtcaaaaaaaaaaaaaaaagaagaagagaaaaaacaataattggacgaaaaaaagaacaataattgatcgattcaaaaacaaaataaatcgaagaagaaaagaaggattgggacatctcccgctagttttccacgtcattacgcttcaaatagtaacgccaaatttttttatacattgggcctaataagcccattaatagctctaagtttatgggccatgtacatagcatggaagaaaaactctataaagttgggttccaaaagtcagtgaaaaatgctccacacgaagttgttaatatacactcttatcagattttgttgttgaaccactaaattacttgtttaagaagatataaaaatcttattataaacgatctactatatagtatagcttgactcaacatatgatcacgaattcacgatagattattcaattttaaggattgaaaaccttttgaatccaccttttgttttgatatatatgttggagtattaaccttacacataacttcgagactcgtgattttttttaatcaatccttgaacccaatgatgctttcacgtacattctaaaaaggaattccaagttttatttattcgttctaaagtttcatatgtacacattagttccataaactccaacaacaaaataaacttgtgattaaacaaccaatatatagatgaactaggaaactagtgaaagtctaaacccatttaccaatgtactgagtatataagaacatatatataacaattctctttaagggctcttctcagcttcatttctagtcacattgtgatcaatctttaaatcgccgcccatgatggaagatagagctgtcgccaaagccgattggaaacttggatctgtcgtgattgccttgattgtttcagccggtaaagatggcacttggtgactgatgatgttcttgattccgatatgatcaagatttatttgtggagaatgtgatgaagatgatcttccaaacggatcgaaagatgacccggcggttcgggtttgaatgattttgtggtaaggtgattgctgatgggtgttaatgttgccgtaagctgcacggtattgatcactgggattaccaccaccaccccaattcatcaatgtgttggtgttgtttgaaaagttgagattggttgaaggataactattagatcgtgagacattacttggaggagagctgaatctattgagcattgataagaacggttgctgcgacgaggaggaggttgtgaggtcgagagtgacggtcggatggccagaagaagaaggggattggaggaaatgagttttaggttttggagtgatgttgttgccggaaagagagaagttaaggccatgaagatcagctgcggcggatgaggaggaggaggcgccggagagaagcatggaggcggcagcggaagtggcagaggccatggcagttgctgacatgggaagtggatggttatgtgttccttcgtacgttgagataagtatagacatatcttctgaacatctttgcacctaaataaaagagttgatatgatatatatatggttctttaataacataggactatttagaatataattatcagtttagtacttttacctgttttcttactggacaagaagctgcaatggtgcaacgatagtaagctcggggacatggattgcctttagctattttctggccatatttcctccattgacatccgtcgttcatctacagagacaatatatagcccaagaaattaaaacacaaactttgattctgttcttgtggaatatactctttgagaagtttttttttcttataaaaatagaagtgagaaaaaaggaaggattatactgttagcattcatagatgtatatactaattaaattaaagatatgaataaaatgtactaaccgttggtgtctcacatcttgatctcaccgaaaccctagttttcttaacaaggttttgaggcaaaatctcatcttcatcttcatgatcatctccatcattcttaaacccaaaactattttgtgatctgatcttattattgttactaatctccaacgacatggtttcttgattatgatcaatctctaacttctcattaggattactcaaagccttgtattcaatccccatactcaacccttgaatactgcttttttcattatcatcataatttctgtcaccttccgcttcttcaacatctttatttttttcttctttattcgaaccacttggaacctctgaatttaaccgtctgcctaggctcaacgagacaagttcttcacgttcgttaactttttctctgtcttcatcttcgcctttgtcttgatgatgcccttttgattggaacttggttggttcgttatgtttggccattaattggttgtattgtgtttgaaggatgtcaaaatctttcttgattttactcaatgatgactttagtcttcgattttcctctttagcctcatccatttcgactttagttgagtccaactgatctcatcatacgtttataagatatggttaatcacgatatgcttaacaaatatacaaatatctatcgtttggttgatctttcctcaaattatatatgcatgcctcaaaaatccaatacatatttttttctttctttctcataattattgtacttgtgatatatagatgagcaaattcttcgtaaaaacctccgcaaagacagaaaattatgaaactgacaagagatttgaagatctaatttagtatgattttagaattcaaattaagattcattgattaagactaatcaatcaattaataaaaatggattttggataaaacaaaccatctatgtgataagattatgaaagatacatgtatgtaattccaaggattgatttatgcgatttataaatgacgtctaaatatttgaaaactatacaaaaggaaatttatgataccttggatcttataatatggtcgtgttcttgatgagaatcatcgtgagatgaatcaagttttctcatctcatcatggctttcttctcttccatgaccactcctcaagaaatcgtccttctccatattagtcttctttgataaattttttattagctctcatgttttctcttgggaactgttgatttctatatatgcaacctatacatcctttgactatgccaattaaacaattcacaaaaacatgcaagtctcctatattaataatgttcagagaacatgacatatttctataatttacaaaattaccaaatatctatcttaaatagaatgaaacatatagtgcacatataatattaaattaagatttaaaattcaattatagtcttgtaattagatagtctcgctgttttgttttacggtaggttgaaattccaaaatcagaaattaaatactagtttataaagagtttttgtagactataaaatgtaaaaacattgaaccaagtggttgtacaattattctatttactcattttatgcagcaatgtttcaaaccatgagaaaaacaagcacgcaacaatgaaatcttgaaaggtcaacagccaatccaattgaacaaaacaaataagttaaaaataacaatgtatacgaccaaatatgaatgggatattataatatactattaattggtttttctgccctttaaactaataccaacacacgtacataataaaaacaaccattgtgcatccgatttattcggaaaaaagaaagaagaatattgttcgtggatcgatagtgtcgactaattggaaaagaaatattgaacttcaacgcttaatgttataataaaatagctatgtctcaacaacaaacactgttataaggtttggagccgaaattatggacccaccggccaacgttgctgctaaagaacaacgttgaaatttcttgatcacatcgttacaattttatctctcttatcttttcattttcaaaatgataaacttctagtggtagcgacagaacaaatgtctagatacaggccaatccgcaaatggattactatggttaattaacaagagaatgaaccaaaataggtaatagaaagatcattccaagagatttcttgctaatttaaatagtctaatataattaatattataatttagctaatttattcgtagtatttttcgatagctgttactatattaccttttaagtcaatatagcttatcaatacatcgttttttttttggaaaaccaaacgtgtttcgtcttagagctgatgtgtttgttttgccactcgcgtaccgacgtacgtatcaatgttaacttattaacaacaaatgagacgactggttgtttttcaaatggcaaagaatgaccaaattcggttttagttgctccatcgatcgttctaattaaagcatcaaatgaattgtattggatcggaattattattttatctactactggatctgaatctaaacgcagaataaagtttggtatacaatataattaatgtattgtggagcagtggaattttgatattattaatcagcggttagaaaagaccttgactatagatcgaaaatactaattaccaagaaaaatatatatgactccagctatgatatacatgcgtttacaaaaacgagcactccaatatatgaacttaaagtcatacattggtgacattacacaaataaaatatctttataattaataaaaggtcaatttttgttgaagatttatatttctgcagatttaattattggtgagtgcaaaacgtaataaatatttacacaaaccactcaaatatatgccatgatgtatgagcaaaactataaatctagaacacaaaataaatggtcatatctaatcaatcagcttacaatttttaaattttttgtggcttccctacaaacaaaattccataggaaagtttaatcaatttcaagttgtatattttatttaggtttagcgcagtttgtctctttgtttaactaagtctttttttttttttttgccaaatgaatggtacttggtacgtagacttggcatcaaactagtaatatatgatatatgtgttaatcataaatataacactagagttgtaattaaatttaccaacataatcttacgttatatgagttttaaactagaaactaattgaccatatatcatgatatatttgatgaattatcatggacatatcacatgtgattgataatttgatattaacaagtacatatttaaatggaccacgatctaaggccttttgctggttgcgtagagttatgtatatgccattgacattttagaataaatagtcagcttgttgacttggtgttttattatagcacatcatgtcttaactactttaacttttctcttaaaattgtttagaaacattttctacaattagcaaaagaaaaaaaaaaggccagaaaaaaaaaaaattcagctaaattcgtcgatgcccaaaatccgataacaccgtaataagtaagagaatacaggggtatatttggaaacagattaaaacgcagaaagtagtgttccatttacaaaaccctaaaccctaattgctctcgccttcttttagcttttcatctttacctgtctctgcccttaacctcacacagatatcgagtctcggcgattgaagtgaactctcatccttataatttcatccgaaaggtaaaattttgacagctctagtcgctaaaccattgttgtttaggtctccttggaactcttctgaatttgcttttagattagtttactctttttgagcctttgtttgtgtaatcttcgaatggattcatggttttgcgttaatgggttctgtttgttattacagattttggataaagttttgatttttttggttcgcaatgacgctgctcgaagctatctccaacgccgtagcgaatcaggacaaggtcgactcgcaatccgattatccaatccctcttagccacgatggtatctttgcgaatctgaaaccaaagctagaaaaccctaatcttggtacccttgtcaatccaatttccgggtggggaatctctgaaagtgatgttgaagtcatcgatttgggtaaaaagttttcatctaagctgaaaaggaagcttaaggatactaacgggtttgtcaaagatgagtttgtcaagatgttaaagcagtttcttgagaaaattggtgagaaagttgggatttcagaggctgagtctgagatggttttgggagatcaagctggttctgagatacagatactggtggagaaaaatgggtttttgatgggtagagatgtatctggtttagtgttgaaaggttgtattagtctagagatgtgggagctagtggaaattttgatttcaaactccttggttgatcattcttcatactcttatttagttagcaatcttgttgagaagcaaaggtcagatttgctttgcgtagtgatcaaagaagcttcagatcttggggcaactgagctactttcaatcttgaagtattttttatgcccatcaaaggaagcaattagcactatggctaaggtaagagaagaatgggagagtcaggctatgttggctattgaaaaggtgagcaacacagagctatcaaagaagtctaaagttgcagaagaggcttctatcttgttaatggttgctcatgacgggttttcaacctcagagctttgcctgcattacttgttagcttcacggaatgttgacgaagtcatgtttgcatctgcagtcagtaagttgaatggcaatgagatgggtagctttattcgatacctctctaaatggatgaagaagtatgagatgttcccacaagctggtccatgccctaaagccgcctccaagcttggtttgaaactatgcaactgggttcctgaactcacagacattaccaaatgtttgggacttcttatcgatgagaacttctccactctggttctgtactcggatttgcatgaagagctaaagtctattgcaagagtagccgatgggttagcttcagaatcaaaactttcctgttttgtggctaatgtggttgaaagtttgaagcttggagctgcccgaaactagattttcacaattgttggagcttaatgcaaccctgttttcactttttattatggtctccagtgacatttgtattttctagtttcagttcatctcttaactaaagtataattttgttcgctatctttgagagtttgtctccaacctctgcacattgccaatctcatttaggatgcaccacatggtttaaaattgttttcttttccaagaattctttatcagttacaacaggaagagtaaaaggtttatctttgcaatacaacagcttactttgttgaagaatgagcacaagttgttgctcaacgaagtgtctcacagagccggataataaaaaccgttcctttatgaacactcacgagaccttgccgcaaaatcaaacggctaatgtatcatcaccacgaaagtgaggtactctcgctgaggttgaagaagaagaaggggcaagaatgtaattacatccagaaatgcttcatagttacgcagctgagttattacacttgttcacaaagtaagctgcagtctggggactacccaactcctaactttcttcaccttcttaaattacctatctgtcaattatcatcatttcccaattgtgttgatacttaattggtagtagcaattttttccattaaagttttcatttttttggttttttgttgatggaaaaagtattgatccaacggctgtagaagaacggtgcaacaagattttgaattcggagatgcgtttgttttagttttaaaatagaaataaataaagttgttctctctctctcttcgtggacactggaactaacaccaccgatgcactacactctgtagagactgcaaatggaaagcatcttttggtaatcacgggtactgttgtcttcgtcttagtttttgtcggaaatcagacattagatccgaccagattctctatttggagacagacattactcggatctttatttcattttgtatgattctttattgtagattttgagatcaggtagtgtggatttgagatcaggtacatttacttgcaaggtgagttccagatctggttttggttatttcatttctggagttttatacgtttttgcaattttggagattttgttgattttagattaggatgatcattgcattttctttctctttcttgtttgatttcattggttaatgattgtggattactactatttaatctttttataaaaaaatccaaatccttagctcatgtacttataaaagaatgattttatgtttgatagtgatctatacatagttataaacaaatggctgatccattgaacttagtatgatgaatcctgttacaaagagcttatgtatctctttaatgtctaaaagctctagatagaaccaaaatatgaaaattgcaatctttagtaatgaaagtgttgtgttatagtcttgtgttattgcttgaccataatattttgtgattgttcggactaatgcaggtgttttgaattttggttgtggacataatgggaaagcctgcaaggtggttaaaaagtgtactacttggaaagaaaccatctaaatctagtggttctaaagataaggaggtaacacacttccgcacaatgttgtatgataaaacaaatgaatttcaagcttgcatagttaaatttctcaggttgattacagtagtggttctcgtagaggaccttgactgcttgacatctcttttactagttttttcactttagacattgcaaatttcccactaattttgtgtcgtctactattgtctatggtgtcactttctgatttcatttccctttgttgtctgtttctaattgttcctgacaacaattctctatggtttatcacgtgcagagaattgtgaatggaaaagaagtagtggttatatcaaagattgaagaatccgatgttgtttcggatctttcatcaattggaaatgcagcagtctataccagtggtattgtagagacgcagaatctaaaacatgaagatgtttcggacgacgagatacaagtttctgaggtccaaccaacagattctcaagatgttgcttctgttcctgatgattcgctatccgaatcagagaaaattcaacaagagatcgcagcagttaccgtgcaggctgcgtatagaggatacttggtaatattcttaagcttctggactagatatagacatggctcttgatttgcagctattggtgtttttctttttctacttttctttttttctattctgatatgagctctctatgtgaaggcacgacgtgctttcaagatattaaaaggtataataaggctacaagcacttatccgtggtcacatggttagaaggcaagctgtttcgactctgtgctgtgttatgggaattgtcagattgcaagcacttgctcgtgggagagagatcagacattcagacattggagttgaagttcagaggaaatgtcatttgcatcatcagcctttagtaaatgctcttcaagcacttctctgtgatttcggtttcttggctgaatagctcttaactttgattaatgtttttgtcttatcaggagaataaagccaactcggttgttgatacacattcttacttgggaatcaataagctaacaggaaatgcttttgctcagaaggtatacttgtttctactattactatgtttgaaaagttgagaagaccatggtggatgattctgttgccttattcttatcagcttctagcttcatcgccaaacgtgctgcctttgtccctcgacaatgattcttccaattcaatctggttagagaactggtcagcatcttgcttctggaaaccagttcctcagccaaagaaagcatcactcagaaaatctcagaagaagtttgccagtaatcctcagatagtcgaggctgagtttgcgagaccaaagaagagtgttcgcaaagtcccttcttcaaatctcgacaattcctcggtggcacaaacatcatctgagcttgagaaacccaaacgcagcttccgcaaggtttcaacaagccaatctgtagaaccactaccgtctatggacaatcctcaagttgatctagagaaagtgaaacgtggcttgagaaaagtacataatcccgtagttgagaactctatccaacctcaactggttccacagattgcagttgaaaagccaaatggtagtttagaagaatctgtgaatgcctttgatgaagagaaagaagatgaagtggctgagacagtggtgcaacaacctgaagagttgatacaaactcatacaccattggggaccaatgaatctcttgattccacattggtcaaccaaatcgaagagagtgaagaaaatgtaatggccgaggaaaaggaggatgtaaaagaagagaggactcccaaacaaaaccataaggagaattcagctgggaaggagaatcagaaatccgggaaaaaggcttcttcggttactgctactcaaaccgccgagtttcaagagagtggtaatggtaatcagactagtagcccgggaataccgagctatatgcaggcgactaaatccgctaaagcaaagctgaggctacaaggctcttcttcacctaggcaattagggacaactgagaaagccagtagacgttactctctaccatcttcaggtaatagtgcaaaaatcacttctcattctcctaaaacaagagtctcaaactcgagtggcaaaagcgggaacaagacagagaaaactcttctttcgtcccgagaaggaaacggttagtctcctaagcaaaacaatctttcccacaatgatcattttatggaattttctcgtctaactttgcttggattggttttgggttttgcaggtaaggcaactccggtagagtggaagagatgactgatcatctgataaagaaaagctgaggcctttgatgtttctaaactacatcattttactatctatatagctaatgtgtatgtctgtctttgtccttgtgtttgtttttctctttgtgtttgtgtaatgagttgagaatgtacatcataggttttccttttctttttttgtgtgtgtgagggatcttcattttccgtttaatcttacattacttctcatatattatcttcaaaataaaataaatcaactttagatggttatgtcatgtataatgaactaattatccttaagctcctcatatgttgtgacttgtgatataggaatcttcaaatgtcctagggtcctaagtttgaatgaatgattagggagggaaaggatcatatttcataagtaaataaaggaaaaaaaatgcaaataaagaaaagcataaaggatattagattgagctcaaagaagcaagactgaatttcattgcatggaaaaaagagcttaaaattacaaaagttgaaattaacacaagcttttgaaccaggcttcctattcattttattattcttcttcatcattttcaatttattctttttgaataaacactttttttttatattcattttatatgtaacggcagtccatgtcaggagaaagggaatgttccaaagatatctctatgctctttggtgattctatttgaaagcagacattgtggtagtgtatgacgtacaatgctcaaaaagcaacacaagaatgcacctttgaaactatatatttatatgtatgtgtcagtatcaccattcaccttatctaaacagaaaaactacacttatatatctgtatgttagaagaaaagaaagtatggaaatgaaaggaaaaaaaaaagggagagggagatatgcttagcttccctagaagagagttccaagtgtaaacccttttttggttcaaacttgtcagaagagagttcttctaaaaccagcctttatatatgcttctttcttaccaatcttctctccattccaaaaacaaagagatagagagggagatacaaaattctctcttgttctttaacctttttccatttatatataatctctcaagttgtactttcagaaacaaaacgctgtagtatctacatattagttaacatgggtgtttcaattggtcatataggaatgattcttcttcttctcatcgcgttttcggtacttcaaactgattacgtttcgggtcttagatgggacagagacatgaggatgcagcttatgtttgttcatcctttgcgtgttcttgaagagtctgagcctgagtcctcttcatcatcaaaaggaaacttggcgccttctcctttcgttatgtctgatcctaatcaatctgtgaaaagaatgattggaagaggatctgatcctattcacaacaaatacaacaaatgctgacatttttactataatataaaatgaaacaatgttttgtttctgaaagtaaagctaaggctatactctgtttctgtaatgtcagtaactctattttctttcagtactctgttttataaagaaggttaatatttgtctcttaatccttcatcggcttaagtttctatatcattgttctttaaaacatgtcttgcattacctatttggttgatgcattattatattatatgagtatgcaagacttcatttgttctctgtgtgatttctcgctgtttcgtatttaattggttctgattaaccagattattaccagtataaacatcatgcataacagaatcttctgagattgccggaacaaaaaatatggatcttctgaaatctttttcgataatacataaattcttctagagttttggttattgagcccaaatccagacaactcagaaagccagcaacaaaaggtcgtcaaatatactgggctttatctttgaaataagcccattaaataattcgcaatcgtaggtgtacgtagttgattgatttttttcatgcatgtttaaaatcctgagaaatctgtacgtttctggtttctcggagagattttctactctaaaaacaacattgatgttaaacgataatgacgattatattgtcaattattttggtagtaatgataattgataagaagaagaaaaaaaaactctatgaacaagtttaataatatttgccaatatggcatgctggattttctcgaatcatcatgttttcgatttcattcatcaaactataatgaaaatggattaaatatgatatttggagggaaggaaacatacataaacaaataaataaattaaagtagttggaaaaaagtggagtagattcaaaccttccaactataataatttatgcaagtcatagtttgacaatcattttgggccctttctcttgttggttccttaatttgtttttgtatctctgccagtgtcagacgcagtttttacagactttttgtttaaatatatcacaaaccttattcacgattatattttatactcttgaagtaaaattttcatcagtgtgactcggtctcgaatccctagttttacaatattgtatatacatgtaaatccagtatgatgattgatcagtgtatgaaatatatatataaactattcaaatgatttggggttgtatagattttaggttggcaacttcacgagtagggcacggttggtgagaaacaaagagtcttttacacaaatatttaagaacatcccatctctcgctgactctctctatattccaaattgttttaaatgcggtcttaactactttatagtttatagtattctgcagtagatgtttggacgaatatctgctatataatgtgattgttaattagcacaatatggttctgaaaggtatcattattaacttaattacctccttattggcttattggaggtggcaaaaaatttgaactcgccaagagaaattgaacagaagaactcatgccgtgtcttcattttctattcgacaaaacagacttcttgacattcgcccgtgattttcggctttttattttcctaatgatcaaagaaattgttttgtaaattttatgtttcagtttacaagtaccattttttctgaattgataggatatataaagttaataccattgtagttatagccaaaataaacttacgtactattacagtgagtagtaaaagtcgagatcaaaacttgtcaataatttgttggtatagttttgtgtgtcaagatgttcatatatggttttgatatttgtttattttgtttttctttctctaatcgaagattttttttttttttttttttttttttttttggctgtcaaaaaaatatatttgatttgttaattatgctgatatatttcataaaattgtaccgaacattcgaatctccataattcaaaaatcagtctagattattaagcactgtcgatgacttgatgtagtagtctacacgttaataatttatatacagaaaataattttgatcatctttagggcaaaactaatttataatcaaatcgcatggggcatttgacgttgtcttttgtgtacaactgggatccacatttgttgcttcgcgttataagtaagtagtcaaagtattactgaatttctaaataaaaatccgaattgaaacctcattatcttttgtgcattaatatatataattttactgaaatggaatttataattctatacttttatatatagttgccaagaaaacaacattatctatatatataatgatatatacaatgatatatatttatttatagttgtatataagacttaaatggaagtccataatgataataaaaaatgtgattgataatgcgattatactccaacaatctgtcagtgtctattgcttgtgggagcatgtcccttggagtgactcggatacgcatttattttgtttattcaattatttatttatttcatgagccactagtggctagcatttaattggttttattactaaattatttttccaatgaattaaaagatttatgcgaagcaattgcacgtgaaaacaacggtacaaataaggctcattgctgagttttatgtttgcaattttggaagacaccgttggaaataaaatgaacgtaaatttgaattctagtattaaattaaaaagtaggttccctcgtatcaaatttaagaattttgttgttgttcatataatatatacagataaatagtatatctattatttaaaagtcggttaaaaatatcttcaacattttcaaaaatattatactcgattctaactatcaaagaaaatggtttaaatatactagatgtcaagatcactagctagctagtaatcttatattctacatcatttgttgcacttcttccatgttacgtaacatatttttacccttataaacctaattacatgtcgaagtctttgtcttaccaaatatagatatatttcatttcacaatgacttctttttctgatgcgactttttcaaatacttagtcatataataatttaacaaatgcttcagcaaatccgtctatagtgtagagatatatagtcaacactcaacaaccctatttatatattaagggctacaaaggggcatttcattggcaagtaccattttacttagtatccaaaaagagtgtttgatcatttccccacaaaacaaggtaatcggaattttcttttagggtttttcgggagatcagtttacgaagaagatgaagaagaggcaagtggtgataaaacagagaaaaagctcttacactatgacttcttcttcaagcaacgtccgttacgttgagtgtcagaagaatcatgccgctaatattggcggctacgctgttgacggttgccgggagtttatggcaagcggcggagatgatgctttgacgtgtgctgcctgtggctgtcaccggaattttcaccggagggaagttgacacggaggttgtttgtgagtattctcctccgaatgcaaacaactgatgaacgaagatggaaaaaagaagaaaagccaagaaaggtaactgaaaacaaagaaaaaaggaacctgctttggatttgatctattgatttatattagatcgagatgtattttatatgtatatgtatatggttaatgttgtatattcaactacttacattaacgccgatctatatgatgaatgatttttcaatcttgatgtgatacatacttcaaatctatgtgtacctatatttaagattacaatatgtggaacaatttttttgtttttcctttttttggcggatcttgcttttgattattttaaaaacccagaagtcttaaagcgtttaagaagttgtcgatttagaatagaatgagccgtagataattttggtgacgagttctaaagacgtacataaaccattaacattccgtataacacaaaagtatccaatcgaaactaatctttcttcattgagctaatcacatttgtacgtctatatatatgtgtatgctaatgttttaagcaggatacataataaactatatttcttatttgaaagagatgaatctttaagagcacttagcttgcgctgaaagagatgaatccttatgagcacttgcgatctctttcaaattccaatgcttgttttgatgtattaatatatttcgatgtatatctatatcgcacatgtagagtatacgaagcatatggtcaatgacagcaacagaaaatggggatatacagacttataaatggaattcaaaacacaaattaataagcaagttaaatctttgttcttattcttatattgacttatagctagataggtgagttttgttgaaaataagtagttaaaatgattattttattgtaaaataaaatttggatcttagcttttattacgtaaaaaaaaaaatataagtaatgcatacaagtaccaataatcatatgtttcttccctttgtctctttctgttgaatattcgacccaccactttacatacaaaagattccgataaaatgttcaacacatattaaaaatataaagtttgatgtccatatgaaatttaaatcaaagtaaatttagtgttatgaagaaaatattattaaacttgatgactttattcgattaagtcgagttcatgtacatattaaacaaataaagccagaagtcaagtgtcaaagcattacttatatatctaattaatagacggtctggtcgttatcattctttttggttgctagaaaagatcatgatggagtttttttgttatgtttatgttaatgtaatttaatttaaaacacagcggcccacatttcaaatcatgttatcaaatcgtttaggttcatgtttttcaattcgcttccatatataacaaagattttaagccattatcataaagcaatataataccaccaaaaacatattggccacttttgctctcatcaaagtggccactcgaatttgttggaaaagaccactgtagtatttcttaatgtaattaaaaaaagtcaagatactcttttggagcatacatattctgattttgtgaacctctagacagtacgtagacaatttcttttaacgtaaaagtaactaaaataggccaataactaaacacagagttggaccacatattttccaccttcggcataacaaaatttgtattcgatccacgacccttaacaccattctcatgaacccaggcttcttttacattgcttggctctaaagttttcaaggcaaatgcttatttttttctccaggttccaaagacacttaaaagataagagaaaaaaaagaagaagagacattatgaaaatagagtgttaaatttagaactgatttgctttatttctcaccaagtacataacctagtcccaaacagataaatttcaccatttcaccgcacattttgccttcccgtgacgatcattttcttaagtgttggaagccaagaactgcactcatcccattcggtgcttgtcataagcccctgttcaccaaaattaacaaataacaaaccaaactctattctttattcaacatttataaatacgataatgcaagattactaaagattcacaaatacaccactttttacctgtatttttaacgctgcaccaaaatcacgtttgtccagagcttgacagagctgagtgagtttttcagcagcgttcttcgagatgtccccattatttagttttgaaaacagagctcctagctttcttgagcaattatcttctgcctcacgcttcttggcaggagtatctcttgaataacctcttaatggttcaaatgtctctttaaatagccttgtcaatgaagccacaataggtttctggtgggctggatcattccataacatcatgaagaaaacaatttgattttagtaaaaaacttatatataacaaataaaccacatgtaatgatgctgacaaaaagtgcgttttctgctttaatgttttacaatgtcaatacctggtacattggaagtatctgcagtctgaacagttggtggtggagctacaggttctggttgcaccgctacctggtgtgttggagtcataggtcggactggaggagcaacagtttggggaatcttggagtttatatatggaccaacttgtgaatggatggatcgatatgaaccaggaccgggtggagcattgtaagctgggccagcggatcgctggagacagaggttttttggttagtcaaaagctaaaatgtggacaatgtaaactaaatacaatggagatggaagtgaatcatatacattaaatgaatgataatccatggttggttgctgatattggtccgcgttctttagttctcgaggaggattcaaaggaaaaaaagtaatacttcttgatggctgagcattgcttaatggagctggagtaaaagatttctgcaggaaaataagacgaataaatgtttaagtaaaaaccaagtagataacagagtttgttccaagccaaacaacatacctcttgatatggattggaaattttaggctgagtgtttgttgaagcagaagtgttagcagcttctgcaagaaacaatattatcaaaaaatttagctaatatcagaatgatagctttcttcgatagcagattaatcacaacacagctgaacacataccaggttctgcatacagagaaatccgatcacgcaagattgaaagttcaggtgagaaatcaccagactccagaagttttaagaacttcatagctgttgcaataagtccttgactagccaatatctcagcataactttcaaagagtttacgtagagacgcactgactctcttgttgcaagttgtcaaagcaaggacaagagttttctccataagatcctatttcacagaaaaagaaatgcaaaaaaaagtttaagcagagaagtactatttaatatttatgcaagatatagaattctatactcacttgaacacactcagcataagatttcccagcactttgtttttcaaggctcattgaccaaatgtctactgttttgtcgacattgcctgcgcaaatgtaacacagagttgcagccaaagtaaaaccagcagccatcaaatttgaggcaagagcatcgcagaggcttatccattcatctccttctgcaaactgtttgtcaataaataagaaaaaaacattccattagtgtagttattagtgacatcaaaccatctaggagcaagtattttaacttcatcaagaaaatagtacttacagtgcagatgagagcaagagtttctttccaggatttaggttgtcttgtatgaaggtaggtcattagatcattgttcatcattgcagaaacaacctgtaacagattaacatagtaatataagatgacacttatacttatcaacatatcaagtaaagttgaaaaaacgtctaataatatctataccttcatgtaaggagcattgctcatccttatatatttatcacgagtactctcccacaattctgtaccaccaacatgagcaataactaaagcatcagccatcttatttgcagaaaaacactgagccactgcttccttgtaatctcccacaatcaatgaacgttggatggcatcatcaaatgttggatcagagctctcttcttcttctccttctggttctggcactttctgagtttcttccacgtttgtagaagaacatgtagcatgaggctcattagcagtttgatcattttcctcagatggtaaactaaagccaagatggctacgcaacttcgtctttgcgttcccatcttcttcaagcataattttcagcagtccccatgtttccttctcttcctcagatcttcagaaacaatgtacacaaagaggaaaattgtaagtttctgttacttatataaggatgattatttgatcattttcagtcactgcaagacttactcggcctcttctgttttcttctcgcataaacccctaagggaagtcttctctccattttctaatgcagcttcaaatttagaaattcgattcaccaaacttttttctgtggccaagctatgcagaaagacctgacacgcacacataagagtcaatgaactgaagaaatataaaaacagcaaaacagaataaaacaatgtcctctctaaaacaagacctcagatgcctcaggaagatttttgttaaacgaaataagctttcctccaaatccaaaagatgcaccagccgggcgcttccaccattttggtgctgttaaaggatctgcatcgagaagatggaataagaagtgctgttggttctaatgctcccaacaaagcaatgattcaagcatattgttcaacaagagggatcttgaaggacattacctgaatataaattgttcacctcggtaccatagctgctacaaccctacatagatacatactttcattttattttatttatgggtgggaaacaaacaagtattcttcagaactaagcagtaccatgacagaacaggaacctaactcctaaaataacaatgaagaggaaaaatgaacttgtgctgaatttactggttcattatttgtatacaatcatatattattgatcttgatctagaacacaaatttcaaacaccaaaacgaaactgcaaagagctacctcaaggttatagatgccaattttcccatcaactgaagatgctgatataactccaggcatctttggataccaatgaacatcaaaattccagttttgaccagtaggtaactcagccacaatctgacataattggaccaaaaattccattaatttagataaagtactagttaactgacaagcatatgcaagctaacaacaaggctatatcaaatctattgtctcttcacctttcctgtctttgtgttccaacaaatagttcggttgtctttcccacaggtaagtagatacaagctgtcacttggacaccactccattgcaatcacacctgttgtataacaagtatcaccactctgtttcaaccaatgcaagggtacattctatatagtaaaagagatggagatacctctttggtgaccaacaaatgtgcgaacaggtgattgtagataccttatgtccaaaagctgacagaaaacatctttagagaccaatgaaaagagccaaatttgattgaacttgaaaaaataaaaattaatatgatctgattaccttcacattcggtgaactatcttcatctgaagcaaccaaaatctgattaaaatgatcaggatcccattgcaaaactgagcacctaacggtagttttcaagctgttgattgataatggctagatcaggttttgataagagatcacagaggatttctaatataacaaactaaaaataaatcaggatctcaaaacttactctgttataatcttctcgttattcacatcccatatcactaagtaaaaacaatattcatcatatacacgattagcacaagttgaaaaattgtagttaacctatgtgaaccagatcatagaactctaatgctcacctgtagtcccgttgtgtgaggtagatgctaaaacatgttgaaaccctttattccatgataaagaagagatttcactttgcatataagaaccagtaccctgcaacgagacattgtatatatcttaaagatatatacaccagaaaagataaaattgcagagatcttgaactgtatagtacctttagataatgagaaggctttgaaggatttgctaaatcccaaatacaaactgtaccatcatcagccccagaagcaagttgatttggagacttaacattaaattcaagaccacgaacctatattacaaaacaatgcatgtacacatcaaataacgatgtatatatatcgggaaaaaaaacaaaacagaagatacaaactcacaggtcctttgtgttttgacaaatctctaacgtgcgcaatttcaccagactcagaactgataaatacaaagtaaaatactttacataatcagtataaattgaagagaggctaatagatttcaattagggtttagggaaaatcacctaattggattccataaaccgatgttcccgtcaactagaccaccggctatgagaccatcggatccagagccataacttccccaagcgagtcgattaaaccgctcggaactttggcattgacctactagttttagctcacgatcgttggactgaaaatcgagttcaaagatctcgagattggcggatgaactaaacgaaagatctactgctccggccattgttccggctgctatgaacggagattccggcgcgatggcaacgaaagcggatctaccaatactctttatgcaatccattgtgagagtgactcgaagaaagcgatttctcaagagtgcggagggaaacagagagaattttgtaatgagttttcgaatgttgtagacaaaaacttaggtgtatatatatagtaaacgagtaagggtagtttcgtaatgttggactttggtggtccgtgatcactaccattcacaatccgacacgtcatttgtgtgttgtcccaaagaccaaaatatccattatttccatttggataatagcacaaaagctttattataaaggtgacaactaaaatatattttttcatttttattaaattgaatgattgtttaaaattaatacattgggctagttatcaaatttagacgtatgatatactcatattttttaagttaatatgtaaactcatatttttaaatttgaaaagaaaaattaaaaacaatttgggctagttcacaaaatttgatattggaaaagaacggtttgtagagcccagtggatcgtctagggcatctaggccttatatctacaagtccttttttcagttttgtgtcaaactattgatgtcaaaaaaaaaatcagaaaatcaatagtgtcaagagtgggatttgaacccacgccctttcggaccagtacctgaaactggcgccttagaccaactcggccatcttgactttttgatttataacatacccaaatattatattatcctttgctaatttttaaatgttttgccaaaacccatggatccccctagttcagaacctattcagttctttgctgatcaaacaagtttaagagacaatgtgaacttgaaacaaccagaaccctgcatagcgatttaaaatctaatcattttgatccacatgtactttgatgaaaaaacaaaaaaagaaaatttccacagttatatatttggagttttattattctaaagggacaataatgatactgaaaagatatttgacgttgccactgccaaacttttcagcagacgtcaaggcaatttatacttaaatgtgtgtggatatgtatttgttggaaatgcaaaatccattacgcaccaatctttctacctagctatttatgaagtactgaacaataggcataccaacaataaataccaagccagttcgatttctctcttctctttgttgttcaatttccacataccacttgtcgtaacattgtccacatgttatttttttatcatggataataaatccacaaactaacgagaaaaaggaaaataataatttgatgattgagataattcgaatcaatctttgataaggaaaaaagatactgtataacgttgaaaggtccaactcataatgttcatttggcttgcatgtaaaattactgtaccatcaggaataatatggtgatactacagtgtttaagtgagatgaatagattagtggggatacctaagttagcaaacaaaaacaaaatatttacactaaaaaatctcaagacactagaaattttagccttcgtaaatacatattgactactttcagttataattcaaaactgtatcactttaaaaaatgtgaaaatataaaaattgatgaatgttgtgaaatgtatatagaaaaaaaacagaatcacattttcaaaacatatattattaatttactattcatcaccatattggcatattctattgattgctttagaacttacatgtaacagagagtaaatatgagttgatatattaagaaaaagttgttgcaaattttttgaatagtcaaatatatactaatattttatagcttataactaaaatacaatttctaagccggaatccatttttcaactgatgttttgtaacgcgaatgaaccaaaatatctatataaagttaagctagattcttcctttatcaaacggtaataataactttactcactttttgttttcgagaccaaacaaaattaaaatctatatatttttgaatcaacgtattgtgtttgattatggaaattgagagattagggttcaagtttttcagctgtaatttggatcggtgaatatattttaaatagcaatttttttttgtacatgcctcaaatagtaattgaaattacatagatatatacacacatataatgtacttatcctaatatttcttttgaaggaaaaccataaatcaatttgacaaaatacaaaagccgtaatcaatttttaaaaattgaggggtttgcaaactgtgtagctaactatgacttgtcaccatttcctccaccaagattcattttctctatataatagtgaaatttcctcctcatgaacatatccaccattcaaagctctttctctctgcaaatcttccatcatttccatagctttcttcttcttgtcatttcctttaaatctttttggttggatattttgtattttaacacttcataaagtagtcatcactaaacaacatatatacacatacaaagagatggatgctgaaaagaagagtgcccattttcgccaaatctcatcttataaaccacaattacttgtcctctcctcaatccaagaaaacccttcttcaaaaatctcagaaaaagccaatatcaaagctgacaatgacgccgagattggagttttcggagcagaaaagtacttcagcatgaagctagatcatgttgattccacggcggatatcaccaagcaacatgaaaaggaaaacacacatgatcatcctaatgctaatcctaatcctaatcctaatcctcatcctcatcctcatccccagttgacgaaaacgacgtcgtcaagatcaaaaacaagccgacatggaacgccaagtgtaagatccgagtcaagttgcaacagtcaaacctttctcatgaggattaacaaccacaatgaaaataagcaacggaaaatgaacgatacgagcatctcttttggtgggtttagatgttacggtccctgctctggggtcaaaaccgtccataccgacccaaaaaactcctgtaaaagtagaaattccgatcgggattttgttgcttacgacgcaagaaagcacaacgacaaaccaagactccattttgaagccaagaaagcggattttcatgcgcaagagaagatttcattacctattcaaaggtccgatatcgccatgaacctcgagagaaagctctctctgcttacatgggacgcaataccaaaccaactctctaccaagaacaacaatcacaacaataatggtaataactcttcaatgagtagcaacacgcaagaggaagagacagcaagtgtagcaagttctgatttgttcgagattgagaacataacgagcagtgtctatgagccgagtgaggccagcattggatggagtgtggtaacgggaagtatggcagatcaatcggtgatttcggatttcgatatgatgaagagggtcacgagaaatggtccggtggttaaaaccaaaccggtgattggtgagaaagtccggtcggctgggtttttgtcgggttgtaagagtcacaaagctgtctcggttgttgatagttctagaaaagtgaaagaaacagccaaggttgatcatcacgagatgtctcatcagaagaagtttaaaactgagattaggattcaagacttgagctttctttaataaacaatgtttgtgtatgtgtgtgttcttaattagttttcatcaaatatttttgtaatatttcttcgtgagtatgctaatgattttgataattttagtcacttggtttatataataaaccctacaattatggttatcgttgaaaaaaaatagtggataataaaacaaagctatgataatggtgattttcggggaatttacataagatccaaccaagattgacgtccaaattaagtttgatcagacactagctaaccagtcacactatattttacgatgaattctataataattttgaaattcaattcagaaacccaaattatccaggaacaaaattgatacaaagtaaccactgaacatatatatattcactccagttttttagtcttcgaccatcgtacaataatacatgttgcttattagatttactatcttctttggaatatgatttaagttcttaactatgtttctgcatgttataccatatttgcaacttttaagaaatgacactaaaatataaggattatcatttccacaccacatgtttcaccatatcacatccatggacgttacgcattaattggaatggattatataataaaacatcgtaattatatagatccctcccgtgagtcacgaccctacaaattatgcatatcagcatgtggataataagagacgacgatgagaacttgacgtcgagacaaggaaatatcaattagtctctatgagactacacaaaactggcattaacgtcggatatatatttgtagccatgcaattgcaaacttagggttggttagtagtaaatgtgaaggggaatgttctcaaattgggaccaattcaataactcgaaacgagctaatttgttcaaataacgaataaacagagtatgggcattggatgcaaaatatataattaattggaccgccttagacagcactatatttattgaataaagttttaatacatatcggtaacatcttaataaatctacatattaagatgttactgtataaacattttaactaatacacatatgaacaaaacttgacattctttttttctttacagaacaaaacttaaaaaaactaatattaagcgaaataattcattgctgattcgtttctaatggttcgacagaatataacgaaattaatgtactaccatatttgtttacaattagtggaagccgaaaattatgtctatactaatattttctatgtatttaaatcaagtattgtggtaccaccagctgtgaagaatgttttcaacaatattaattactttgtgaccaccttacccaattccattcgatattaaataggaaaaagaagtatacctattattatgttttgtctgatatacatacacataaatacccaactagagccaaacaactccaataaatcaaccgttgaatatgaataatatgacacctttttattcataaatgtgatccttttaaacgtataaaaatggagtagttaataacttaataacttaacttaataacattggttcctttacaccaaaaaaaacaaacattttatttgggtctcaagaggtttattaatagtggcccatgtatagactgttgcaattacattatttcagtagcccgtaaagttccctgggaagcccattttgagcccatggataagaaatttaatttaatccacacagaaaattatataaagggtgggttgatcagataagttattaagaaatcatcatgattgtattgtttgatttgttacctaatattgtttttgtcaccaattacatgaattttttgttgttgtcaatacatgacttttgttgttgtcaacacatgactttttctttaatcataaaaaaacttaaacaacatcacatcatttaagctagatatatttttgttaatcacttaatcaccattaatctatatatggatgggtagattctattatttttaaatcacaaaaccaattatataaaaataaaataaaaaacctaaacaaaagaaacatatgaaattcccggctctaaatgacaaaaatacccttcttctgtaacgtgacgtaatctaattggttaacaaaacccccaaaaccctaaatcagtttgcccagattcacgcatcacacaatcgagtttttagggttttagcggttgctctctcggaagccagagagaagagggaagaggaagtctaattcctctgcgttttttgcaattagggttttctcaattggaatcgaaaatggtgacagacaagagcaagaaggcgaaaaccgaagaagaaaacgtcgagcaaatcgatgcagagcttgtcctctcaatcgaaaagcttcaagagatccaagacgacctcgagaaggtaaattccaaaaatttttaacaatccccatgtttaaattttctcgtgaattttcctttagtcgatgttcatttattgctttgatcaatgagaattgttgtgttggactctctctcgattcagatttctagtggacaaattataaagaaaagtcagtatctttattagtaattatgttgttgttgtgtctttcgagtgaaatgtggtcgctttcaaattgactttgtcaataaaactgtttgaggattgaattgttgtgttgagtccaatctctcagtgacctctctggttttggttttgatagataaatgaaaaggctagtgatgaagtgttggaagtggagcagaaatataatgtgataaggaaacctgtttatgacaagcgtaacgagatcatcaaaaccatccctgatttctggttaactgctgtaagccagactctctgttctgttttttttttcaattcagagttttaaacaatgttttctctaattggaattttggaaatttacatttgttgtagttcttgagtcaccctgctttaggtgaacttttgactgaagaagaccaaaaggtttgtgttttccttattagattttgattgattgattcacagttttcattctttgtcctgttgattcgatatttctgtttttgaacagattttcaaatatcttagctctcttgatgttgaggatgccaaagatgtgaaatctggatactctatcacttttgtaagtttcttttgttattatgcgactttatcataatttgattgatatatctctgattgatctaagaaagccaagttgtttagtttattcgtttactgattgttgttacattgtgaattgcagtccttcaatcccaatccattttttgaagatggaaaactgacaaagacttttacctttctcgaagaagggacaaccaaaatcacagccacgcctatcaaatggaaagagggcaaagtaaaatggatctttattgcataaaataagtttatttcttaagctgtcactgtttttgagattattcttaactatatttctcaattatcaagggcctggcgaatggagtgaatcatgagaagaatggaaacaaacgtgcactacctgaagagaggtatttctcatctcccccatttcactgaaacccatcatagatccaagttaaaactcttggcaccattcttattagccattacacgtctaaggactctctatcttttacctgtcttttttcagcttctttacctggtttagtgatgctcaacacaaggaggatgttgaggatgagatgcaagacgaggtaatgatcctatattttttttatgacttgattgtaagagtaactccatgtatggcccaacttgaactcggaaattcgtcttgtagcaggttgcagatatcatcaaggaagatttgtggcccaaccctctcacctacttcaacaatgtaagctactcaccatatcatttttcagtctttacttggtttagagcgcttaagttgcttggagattttggtaaattgttaaatgtaactttgtaggacgctgatgaagaggactttgatggagacgatgatggagatgaagaggtaaaagcctcatcttatttcctttgtttggttgagttttctacttaaaaattactgcatctatgatatgctaattaatgtgcataatgagatgaaagattagatagagatatcttaagacagaacattgtgttattattaatgcctgaaaccatttaaattctggagattccattataagttgtgcctgataagtttttcaaaaccatatctgtctctaggagaaagaaggtgactctgatgaagatgatgacgaagaagacgaagttggtgaggaatgatggcagggatacccagaaaccacatttgcttacatgtcttctctataacagagtgtgtaaagttttgtgtgttgaaaggtttttaattttaagcaaaagtggattatgacgacaacagacaagcttttaattttattttaccgtaatagttatatcttgttgtaagaaaccattttcagccttttgttggaaaatcctgcttaaatggtttttgagtcttacataatagcttcttcatcttttgtcttcttaaagagaattatatttgtaatttcatgtctgttgtgtttctttgactttactgaatagagaatttgtgtgtttatggtgaaaatatagccgatctgcttgacagatgaacggagtttattttgtctggtgacatgactctgttctcttatatcaggatttttgagaaaccctttggtatctttattgtttggtctgaaggtatgtatatactttttgtctttgattaacctagtaatatgattactaactcctgtaagttcctctttcagatcactagaacaaagcaagaagttgtaatatctattgtatagtataaagatgctcgaaaaatttcagattctggttagctctagttgtacagaagaacaaaaaagtctctaaagactcaaatgtttcagaacgacctacgcctatgagtgtctaaaccggttaaatccgaaccgaaacgaatggaaacagtcttgagaaacaaaagagtaaaaaactgatcatagaatcacctagttttactaaaaagtggtatttaataaaattgctctctaaacaactttattaataacctacaacaagatttaatttctcatttcttaagaggccattaactacaagaatcacctgaaaagtattaactactcgcagccattatctccaattaattgaaaccgttttttttttggtgggaaatgtattattaatttcttaaccgttactcgcagctccaactataagtttataactatttttcgttaacaattaaaatattaattggcaccatacgttacaagttaactgattacaaatactaaggagtatataatacttaggaaaaactgtaattatatgaaatcaactagctacttcacaaaagagcaaattaactacgattggcttataaattatatccatagatcagagagatgctaagagagacgtctatccattacctaatccttaaaaaaaacgtccctcttattagcattagttaccattaatcatttatatctctctcgtaactccaaagtttttacagggcaatcaattagccgtcatacccactttcccgtacattttataacttcacttctatatctaccactacatgcatgtatatatatatacacaccgttctctctctcccgttgattagtgatcacaaacccattaataatgatgaaatcgttttgcaagttggagtatgatcaagtgtttggcaaagaaaataattcattctcatttctaaaccactcatcactttactctcatcaaaggtaaattaattgatcatgcatgacttttttttagttttacatgtttatataatagttcttgatccatgttttgttgttgtgtgttcttaatgcagcgagttagcaaatcctttcttcgagttggaagacgagatgcttccttctgctacctctagtaattgttttacttctgcctcaagctttctggctttacctgatcttgaacccatctccattgtgtctcatgaaggtatgtatattgtagttgtttgatctcatggattttatgtgtgcacttctcattcttgtcgttctgtttaagcagatatacttagtgtgtatggttctgcttcatggaccgcagaagagacgatgttcgtttctgattttgcgaaaaagagtgaaaccacaactaccaagaagaggagatgcagagaagaatgtttttctagttgttctgtttcaaagacattgtcgaaggaaaccatctcattgtacttttacatgccgataactcaagcggctagagagcttaacattggtttaactcttttgaagaagagatgccgcgaattgggtattaaacgttggcctcatcgtaagctcatgagcctacaaaaactcatcagcaatgtcaaggtataaacaactataaacataagacaactaagttataacaagttaaattcctctattgtgtatcattaggaattattttttgcattttttagttcgccaaattttcttgaaaatttgatttttgttgttttggaaatgaaaacgctatataaagccttaatgctatggtctaccgatttagtgaatttgatgtgactatttttataattgtaacaggagctagagaagatggaaggggaagaaaatgaagataagctaagaaacgctttggaaaagctcgagaaggagaagaaaacgattgagaagttaccagatttgaagtttgaggataagacaaagagattgagacaagcttgtttcaaggctaaccataagaggaagagaagaagtggcatgtccacgcccatcacatcatcatcttcttctgcttctgcttcttcttcttcttactcttctgtttcgggttttgagagataataggtgctcgatggtctttgatgaagaggtatgagaagatgatgataaagaggtgaaggatctcttatgaagtttctctagtgtgggttcttctatttgtttgtgaatgtgttgtgtatggtttattgtattcgactctaaattacaaaacgtttttgactcattaatattaaaattactactaatatagtaaacgatctctctctcttttttgtttgtctcaataacttgttagctagcttttcaatctacttctttaaaaacaccttcttcatattttgacccgaatgcataacttatgttggttaatatctatgttcacgtagcttcgtaattcgtatagtaaatttgtatcaaaattttggtgtcaatggcagtaatttagtacaacaagaacaacaagaattttgcttccaattctagaatataagaagattgcttaacaacaacaaaaacaataaagaatcactctctttatttatgctttagagatctcaaaactaaaactctcaagttctctcaatcccataaactctcttaaggttatgtctaaactcgacatctattaggaatacaattatatttagataactgctaaatatataaatcataatcctactttgaatagcttatgattccagctaattcaagcttatccaacaatttattattcgagttgctaaaataaatattttaatttttttatattttgtgaaataccgcaagtttgagaaaattagaacgactatgaatgtaaatttgatttaggaattatgattacttattttttattttgcattcgatttttttttttctttatttttgggacctaatttggataatgttgggtaacataataaaactgatataaatcaaaagagttttgaaaagataaaattaagaagaggaagaaaaaaaattacagttaattagccgatatctataaaataaaatatattgactaattatatactatatcattcttataaaatatatgattcctagacaacatttcttacaaaaaaaaaaatgcataaaaggctaaaactcccatgcatgagtactatgtacattatagcgcaatagctctgtgcctctgtcctgagttagttcggttgctgcagtcaccaaatatacagagacttattcagtttggtggattatatagctaaatagtttcaatggagatatgaattacaaacctggttgtaagaagtttgactaaactttaaatctggaacccaattactttgatgatgatgatgtaagaaagtgtgaccaacttttaagtactaatttttttaatcaactatatatttttttgtcttaatttataaagtttttcaagcttaaaaggaaattgagtttaaacgtcaataatcagattaacaaaaacaattaattaattaattgtttgctaaattatacccaaagaaaaaaaaaggaaagtaaaagcttaggaaaaaaacatacaccgtttgtaaattaggaaaaaaacaattacaaatgtaaactgatatcaaatcccaatagtattagattttctactaaagatatatatatatatatatatatatatatatataccatcgatctaggcctctgttataaatacatgaatgaattacttcaagagaaccctaaacggctaaacataatcgataaaatttatttattcttgatcgttctcgccatcatgatttcatccttcgcacatgaaattgagcacaatcctgtacctgaagatgttggcataatcaatatcagtgttgctacgaccaaaatatatcaaagtatcatcagtaattatgatctctatgatgaactaacatcagaattctcttgtatcccggtttctttacgcgactgtgttgctgtagagcttactgaattcttgacgggatcaggaaaaatcactcccatcgatgcttaccatgtgttactagagttgtttcgattcgtcgatgaaataacttcctctgatgattatactccaggttgtgctttaagagtgttgatgactcttacaatcgctattcctcctgaacatattgaagaagacgttctaggtttagaggatgagcaagacgtttacggagaagcatcttcatctcagtttgaagaagttgttccattctacgggttgccatacttcagggatgactacaatgattactttccttacgaagaagcatcttcatctcagcttggagaagttgttctattccacgggttgccacacttaagggatgagcaccatgctagctttggcttcgatcatcaaattgaagaagcgtctcattctcagattgaagaagtttttcaagtttcgttcaatgagaccaacactgtcaggttaaaacctgcgagcaagctcactgtcggggctttgaataggaaaacatacaagaaagctagtggtgttgtatgtgagaatgacgtgtgcactatttgtttggaagagtttgacgatggaagaagtattgtgactttaccgtgtgggcacgagtttgacgaggagtgtgttttagagtggtttgtgagaagtcatgtatgtccattgtgtcgtctcgagttgccatgtgaaagataagggtgaagaagacgaaaaggtcaccaaattttgtttaaagctttacgatttccaaaatcatagtttagttttctgcaaactcttttctattgttcttgctcttgattcagtttatagtattggactctcattcaagaattataatcaggttgatactaaatttttattaaatgatttcacgattttacagatttttgttaatctgtaaacattttgctctcgattggatacatctcaaatggtgagaaccacgtgagggctctaaccattttttaagtttaaattttgcttttatcaaacttgagaacttgaattgatgtcatgaagttttgtcttctccaatggtggggttcttaaacaaatttaaattttgtaaaacaatgcatatatgtttgcttttactcagtacaaaacattgaaaatgtacaatcaatcaagagagtactagagacattacaaccaatgaacaacattgcacagagataggctattaaagtcgttgcacaagcttgaagttacttacaaggggaacactgattcgacgcccactccagctggctctcctccacactttctattggagaatcatgttcatcaccttcttcagccttcttctacatactcttctcttaatctcaacaagtccttcatataacaaaaaggcacttgttaaaatgcatatgcagaacatagtaaggaacacattatccaactagctccaactcttggctttctgctttcaacagccagtgaaagagaaacacattgcagttatcaaagtcttaaatgcaatttgtctctgtaggatacagtccacaaagaagcagaggacacaactccgggacagacattctctagctcaggacacaactccaaactgtaacattagcaaatctgaggacagatcaaacacatgacttttgcatatccgtaaatgattcacaaagtatgctaataacatcaaatctgaggatcagtatctgaattctctgctctgttatattatcaaacatgagtatttgatttgataactatttcataccttgaattcataagtcaaaccagcttgttgaagaaaaggaagagctgcttgaccagcttcgaatagtacagccttttcatcaatgccatgagaccacaagactggtgtctgcatatgcaaaatatggagaatcagagacccgaaatgattctgcttattgactgcaaacaaatacgaaatttaaagattgactaacatgttccatagcagcctgagcggcgagactgagcttgaacggcgagagaagtgatatggccgtggcactcattgctctcttcaacgattactctccgactcggagtcgtaaatctccgagtaggttaacctcggttcgcacgatggagcggctgtggagacagaaatctccggtttgatagccatcgccagagagagagagagtcgagagatagacacagcgtttttttcttctttcgtcaataatattcagccaatcacgacatgacacgtcatcacttttctctggttgcaacccacgtcaatgcttttttatttaattttattctacccagagtttttctttcccaatccaatattgtgattaaaaaaaaagaaaggcaaatcagatttatgtattttaaaaatgaaaaataaataagataataacaaaaaaaaatggaatctttccaaaagaaaatcttctcatttaaatttcttccatcaaaattctcatttaatttgatttattgggatcattggagaatgttagtggaagaaacgtttacagagatcagagaaatgagtctatattaataaagcaagagcaaaaatgtgcctattcataaaaccttccaaatagtatagaaattgaagtattagacactaaggacaaaatagtctttttagataccactggtgttacttacttcttttgtcagattatgatgttaaaaatttaataactttattgtacttatttcttttgtcagattatgatgttaaaaatttaataactttttccacaatggttacttttgcaaaagaccctataataaataatatgattccaaatcccaccaatataacaaacgtagtagaatcctctacaaataacgtctgtgacaacaacataaacacacaagaaccattttagaagtttgagttcttacttcttcttttttcatcatcatcttcattcttcaatcaatcatgaaaatatattttagccacagtatcatacgcaatcctcaaccagaaaacgagggcacaatcacagtaaatgcaaagatcgacggttacaatcccacgtttactggttcatcttttgccgaacaattccttgacgaagataacgatgagtgtcgatgcaaagaatacttcaattacttcttaatggaatcaggaatcggcgacgacgataccatatttgcactaataaagttcaggaatcggcgacgacgataccatatttgcactaataatgctaagtgaatatgctattgcagtatgtgatcgtagtaactattctacgggagatgagttgctagtgtccttgcgtcttattcctacctttcagattggagacgcgattccaattggagaagagtatcagatggaagaagcggttcgagcctcgttggaggagaccaataatattagtttgaggcccgcaagcaagctcgtggtcaagtctttagccaggaagatatacaagatgaccactagttctactggtgaaatgtgcataatttgtttggaagagtttagtgaaggaagaagagttgttactttaccttgtggacatgactttgacgatgagtgtgtcctaaagtggtttgagaccaatcacagttgccccctctgtcgtttcaagttgccatatcaatgaactagtttgatgccgtcgcatgagtctttttccgttttgtatccgtgtattttccgatgtaacctcgttcctaacgctctttgttaacaatatcgggtcaaaccttctttgtaatgcttttttaaagttaattaatataattaattaaattttagaaaaaataaattagtttagcaacaaaatctgtagattggatttaggtcaattattctaattttcggattttctatactattactttccttttttcttaaattttggaaaactacaacatattcgtttctcattttgtattgcgtatttaccgatgtaaccttgttcgtaacgctcttaaggattttttggtcaaaaacccaaaaatgggtcaaatgagttaggaatacctttataaattgattaatataattaattaactttttctaattaactattttggcatactaatcggaagtctcataatgttgcaagcagaatcgtccgtcttaggtaagaataagatcgttcatcgtaggtatgatccaccataaagaatcgttaggtaggagatcactatgttagagagagagttgcacatcgtggagttgtttgtggattcgtacatcataatcgcatgagttgcgtatagttaaatctgatagtttgatcataatgtgtaatttaagattagattaaaaaaaatctatgtacatatttaaaaacaaaaacaaaaagactgtaaattggatttagggtttgtcacaaaagtagaaattattaaccacaaccaaatcttacatgggctatacataaagccccagaaacattaaaggcccaaaaagagctcaatatatcaccgcttgttgttgaagaaattttcgtcggactccatcttagccacatgtcaataaccgtttgagcgtcgattctggtgaaaaaatcatcaccgagatgaatcgatcaatggttcatgtgtttaccaccatcacgatggaggaatctttgttagacagtatcatataaactcttttttaatcttaaaattcaattcttttggctcaaacaatattttggccaacacctataaaaacattaacatattgatatatttatcattcttgtaacgtcgtaatatatggtagacatgactttgacgatgaatgtgtcctaaactggtttgagaccaatcacgattgtcccctgtgtcgtttcaagttgccatgtgaagatcaatgaactagtgcgtggtgttgtcgccggggtctttttccgttttgtatttgccgatgcaaaacacctttttccggttttgtcaacaattgtatgtgtcaaacaagcgtagtaacgccgttagttagtataattatttaattaaaagttaaatcagatttctagtatttaaaaatggaaaataataaatatgttgccgaccccatcaaaaaaataaaatgcatgcagaatcctctataaataacgttgtgacaacaacataaacgccagacacaaattccatcaacattttgatttcttattttatttttcatcatcttcttttttcttcaatcaatcatgagaatagatttctaccacaatatcatacgcaatcatcaaccagaaaacgctggcacactctcagtgaatgcaaatatcgacggttacgactacacatttactgatacatcgtttatcgaagaattcctcaacgaagaaaacaatcagtttcccaccaaacaaaaattacattatttcttggaggattcagagctaattaacgattacgatatggaatggggtactgcgatatttgagctaattttctatgttgttgcagtaactaatcccgcaagaggtgactattctccgggggatgatttgcttgtgtccttgcttatttttcctaatgatgaaccgatcgaagaagagtatgagattgaagaagaggatttgagtgaagaagaggatcaaattgaagaagcggttcgagcctccttggaggagaccaataatatcagtttgagacccgcaaacaagctcgtggtcaattctttagccaggaaaatatacaagaagaccactagttctactgaaaggtgcacaatttgtttggaagagtttaacgatggaacaaaagttatgactttaccttgcggacatgaatttgacgatgagtgtgtcctaacgtggtttgagactaatcatgactgtccactgtgtcgtttcaagttgccatgtgaagatcaatgaactagtttgatgctgtcgccggagtctttttccgttttatacccgtgtattttccgatgtaacctcattcgtaaagctctttgttaacaattttaaattaaatatcgggtcaaaccttctttgtaatgcctttttaaaattagttaatataattaattaaattttagaaaaaatgaaatagtttagaaacaaaatctgtagattgaatttagggataattattctaattttcgtattttctatagtattcttttccttttctcttaaattttggaaaactacaaatatattcttttccagtcttgtattgcatatttgccgatgtattctcattcgtaacgctcttttaagatttttttttttgtcaacaatccaaaacatggatcaaatgagctaataacgtcattttgggttggttaatataattaattaactttttcaataaactagtttggcatactaatcaaaagtcccagaatgctgcaagcagaaccgttcgttttagtcttccctatagagataagattgtccatcgtaggtaaaacatatataagtaagaatcgttaggtaagagatgacaatgttacggagagagttgcacatcgtggagttgttcatgggttcgttcatcacaatcgcataaattgcgtataattaaatctgatagtttctggagtttacatgctcttgtttcgggcctggaggattaagagcttcggcccagaatctcttgatattcaaaaaaaaaaaatgtcgattaatttaattattatgtgtaaattaggattagattaaaaaaaattatgtacatactaaaaaaaaaaaaaaaaaaaggacagtagattggatttagggtttgtcacaagaatagatattattaagttattaaccataaccaaatcttacatgggctatacataaagccccagaaacattaaaggctcaaaaagagcccaatatatcaccgcttgttgttatagaaatttttgttggactccatcctagccacatgtcaataaccgttcgagcgtcgattctggtgaaaaaatcatcaccgagatcaatctatcaatggttcatgtgtttatcaccgtcacaatggaggcacctttgttatacagtattatataaattcctttttttaatcttaaaattcaatccatttggtctcaaacaatatattggccaacacctataaaaacattaatatattgatatacttatcattcttgttaaaggtaatatacggttcctagacaacatctcttatacacaaatgcctaaaactcccctgagtatatgacacaagctcacacatacaaaaacatgtacacacactctctcgctgtctacatatatatatttatcttagacattgtaggcaatggctcaaactagtccttggtcagacataagtccagtcatcatacatacatgagccatgtcttgagttagttcggttgctgcaatcaccaaagatacagagacatattcagtttggtgtatcatctacctagatagttccaatggaggtgtgaacacacaaacctggttgtaagaagtctgaccaaacattgaatctggaacccaattttgatgatggtggtgatgatgatgatgatgatcattgacaaacatggactgatcatgaggaatctgaaagcagccaccattattattagccatgggatcatacattgaaggatcttgttgttgttgttgttgttgttgctgttgctgttgttgcaagttgttcaattccatttcagattttatctttttctcttgatcttcttccattcccaaagtagtaccaaacggtgtaggatatgaatattcctctccaagttgttgtaaccccaaacaaccgtttccttgttgttctaactgctcaaactgttgtcccgggttgctgcatatctgatcttctggtttcgtagactcaaagaagcagcttgagtaaacgggaatcgaaccatccatctctctgtttgaaaccagtacttgagtgagcatttttataatgaaaaggtttttgaaactgtgactttattatactcttacctatggggaagaaaactggaatcaccaggtaagattgtttgctggtgatcattatcaggaagccaagacatggagtgagcttcttgcatactactattacctcccatcgccataggcaactgtatcccgctgtgaaactgcagtaaaaggctttggcctggttaagaatatgtcctgaggagagacaaagagaaagagaggggaaaggcgacaaaatggttataacctgtgttgttgcacattctattggcaagagttggttctttctgtaatgttcctgcaaaatgaatggaaacatcttttgtaaacaaaatttatatgggttcaggaaactgaaatgaatcctgagtcttaggtctgtatgatcgagaaaaagaaaatatgataacgcaccttgtgaatctggattctttcaatggatttcctcaatgattcttccaataaatcgaggtgctcagtgttttctattctatcgatgttcgtccaacaactgaaaacagccattagaagaaaaagactcaaatatgattgaaactatatttcaaaaagcaaaaactttataactcaagatactataaattttcacacctcaacctcctatgacactccattagctgagcttggtaaatggctacttggttacttagaccctgtcgtgtggtaatgttaacacagactttagcaatttgactcaaagagattaaaaagtatccaagaaaattcatgaaccgaagatggtcgatccatacctcaatagtttgattcctgcaggataaagaagacaacatctcagatatgtgagaggcttacaatgacaaaatatggttattaatagtaagaactcacggcaagtaccttgctcctaaaaagtcatgtatatttacatcatgatccagtttcttaaaagttttcttcaatgcctgcaattgagcaaaacaaatcagctcaaatttgtgtttcaaaaaaaaacaaaagttgatgatatacacagtgagtttttatgtctttacttcaaggctctccagtttcctgtaatattaaaagaaagagacttcaatttaggttcataacacaaaattacatcaggattgatagtaatttaaattttcaacataatgcttaccatacctttttgtcctttcttgtggagttaattgcgcaaacttggaaataacctcttcaatgcaactacacaaaagccaagttaagactaaaatcagtatattgctaaaaacttgaatacagaacctcaatctctcatccctctgagagattcaggaagccaaatcactcacgaagaacattatctaagaactgataacagaaaggaaactataaaaaaaaaactaggctctgttttagagtctctaatctctcccaaagccaaaagctcccaactaaaccaactggtcaaaataccccttatctgtgatcttctaaatacactcaccattcaaactaaatccttataaaaactttcagttcctaaaccaaaatcagtgaaaccttttttgtgatagaagagcaatgagaagattacacaatgcatcaaaaatggagatatgatgcatttaaacacagaactaaagatgataaaagaacaacaaaacataagaatgattttgataattatacctgtgttctccatggaaagcagtagctcttccggtaggggaaaacataagaaggacaatatcaatatcacacaaaatcgataactctttggctttcttcaaaatcccattttttctcttcgtgtatgtaacttgcctgttgcttgtgctctcaagtcttttaatcttcaacttaacccttcccatcccctgttcaaaaccaatacagcatcaaaatcccataaccaacaatgaaaatattctaaagactaaacattttcttcgaatactcacttcaatcacctgataaaattctacttattggaaggaattgattgtatatttctccctattgagaaaatgatgaaacttgttttaaaagaagaagaagagcaccaatctttgaagatgggggacgtctaaattcggacacagagtctatctctagacaacaaaattcactgtaacggaagatgttttttttttaaaaaggggtctttcgcagcagaaacagaggaaacaaaaatgggtgtttgcgtcgaaacaagagaagaattcatgaaaatgagcacagaggaggcgaaagtcacaaagaagagaaagatcatggaggaggaaagaaagaaaaaaaggcaccaaaaagatttgtcccgaggaagaagaaggaggaagaaaagtttgaataagagaaaaaggggaaagattaatggtggaacagagagaaagctcacagaagcagacgaagggacaaccttttatttcgctgggaaacttaagacgtcgaccaacggaattgtgtgcttctgtgctagagagagacaaaggtttaaccaaaccggttttgttaattcaattgccttaaaaaccgacaaaaccaaaccgttttttgttaattgattaacatgtgtattcgttgggccaaagtagaaagcccattaatatctttgacttgtctctgccctaattagctccgcctctcttcttaaatacgtctatttatcacttcttgataaaccctagaattgacccatgttaatgttttgagatttgatctttttgcaagttttttggttgtttttgttatgtatattttgattttgatgcctgtgatggtgttaaatatactttgagagatgcgtctctacgaaaaaaaaatcaactctgaggcattttttctctctctttacacatctggtttctcttattttactgtgatctttgagcttattaatgatttggttttggtagctcttctagcttctgatttgatttggttgcctgatttatgcaagtgatgatgaaaagacagggacatcagaatctccttgttaggagatgagaatgatgactaatgtctagatgggaatctctctgatgcatatctcacagactgtttatcaactttgatctagtattttctgttttgcttcgttttgatactcttttggtgtcttttgactagtgcaagtgacgatgaatagacagggacatcagaagttctataatgatgactaatgtctagatgggaatctctctgatgcacataactaagaatcctttgctcattatttaacatttttttgcttgggtatttagttggttttgccaatgatgtgcctaaacaattgcacgtattatcagatttttcagtgatgaatatcacttatgtctgaggcaaaccgtgaatactgtctacaacaaatgtttgttctgttctaatccctaatcatttatttggatttcatttgagctctatttgcaggaagaatcacttgcaagaaataaagtaggacgtcacaaacatgaagctggactcaagccagcagaagattgtgaagattagatgagaaatttaaggttatgtctagattttgtatgtgcttcatttgaattgtaaaacagaccctttagttgaacctcttctctaaataaagattcatttgtttcttgaatgtaatctttcaaattcaatgaagtatttgatacaactgttcattgaaaaaataacttcaatctaagcaagtagctacacaaagaagaacagaatcactatcagcatcacaaagagaagatgacacttctacactctttgagtttcttttttacaagtgatcaaaaaggataaatagagaaaaacaaaaacaaaacaaaaaatccaaacatgaatcattcatcatattcagacaaacatgtgcaagatcaaagagaatcaagactctcagttctgcttctcacaatccgatggaaaacttctcttactttcctctcaaacggatccaaaccatttctcaaagcttcacgaacttgaacaagctcatcaactctctgtttcacctcaacttccttgtcatcattcaacgggaaatgaatcgaatcgatcaattcattcatcaacctcgaactcttctcaatcctatcaatctccttaagcaaaccacaacaattcttcctatctcttctcttagattcctcaacaatcttatcgtgcaacgacataaccggagctgcccattggaaatgcctaggcacaaagaagttaacttgcaatccacggtcttgacaaggaatcgcagctaccaaaacccacatcacaaaaagcaaaaccgaagtcattgtgtaaaccggtacagctaaaccattgctagcaacgacatcgtttggtcgaggcgttgccaagttactcgctaaagcttgtaactgcttagaagctgaccatgatcttgaaacactccaagaaagagatctgaaatgaccaatcgaacggtggtgactgtctttgactcttccgaatgaacggttacgatgagctagattggttccagaaggatgatctttctcgtcaagcattccgattgctaaatcaatcagagctttcttagctcgccggagctgaccttctccgatcggacggtgactatctaaagcagagatcacaatatcggcaagtttctcccattgacggatctgttcgataccgtcgcggatggcgttacagacatctagagctttgatgctccgttcgaagtaatctgaaatcaaacggtccatcggagatttagagatctgagatcggtggttgaatacgatagctcgaaactcttcttgacaacagaggaaagaatcaagaagctttccgatccattcgagagagagaaggtcgtttgaagaagcgttgagatcgatgaatttctcagcgacttgtctttgaaacgaatctagctcaacctccatggtgcttggctcgtggtggctactacttccggagacgactgttgatgagtcaacttggtctcgccgtaaacttagcaacgaccttccaaatgatccttgaaaatccgtagctggcatcctcaaaacagatgcaaagtgggaaaaacaatcagatttttgtttctgtagaaaattctcagacttgtaaaaaaagaagaagactttttttttctttgttggattgagagagagtgatgatgatgattgatgaaagctagaagaagaagagatgtgtttataaagcgagaattttgaccgcgtattttaatatctgctttagaaacattcaatattggataattttctcattttccttaactaaataaaaagaaaggtgtgacgaaataaaagctataatttgatttgttgtgtgttctcattccttttttattttctctttttgttactcggtacagtacacgcagtggacacgtctagtggtaataaaataaaagtacacagatctgtctgtaataaaatctcagtttgaggaaattcattggtcacggggctgtggtatatgaagtcgagaatgagacattaatgggtgccacgtggagaaaatgggagctgtgacagagacttggtcaatgcaatgcacatgtggataaaaagccagctaagtcttcgttggcgtgtattgaagagagagattggtaagtaaagggactcggtcctggttgattctttctcgtcgttctagaatgctcaaggacacaaaaatgttgacatgtaattttgtctatatcctttttttttttggtttaatgttaaactttacaccaaataaaaaaaaaggtgtacattgtacaatgaaaatctcaaaaacacaccaaaaaaggctaatataacattttattaaaagagataactatgagttgtatcacaactaatgaggtgaattgatagaaccaaagtaaaactcaaggagagaaatgctgatagtgatatcctccagcgagaaggagatgagacgactgcgtatagtgcgtaacaagagactcagtagcatggatggtactagattcatttgagaaaatcgttttattacgctcattattaatcagatagatcgaggtttgaagaaggagtttcaagatcttacttacaaaatgtggaggtgtggattgaacattcaagatccacaaggaggctgacggaaacgagattgtctatataatcgtatgatagtataaattttgtgttgaaatgtgtaatggtgttttttggtaaccgaaaattgaaatgtattattatgaaactgtataatgaaaaaaaataattataatggaatatggtaaatatgtgtcattaacaagtcatcaatcatgtttgggccagaattaaaattgtacaactataagaattaattgacacacgacaaaatacactacatgcagtgatgcagatcttttttttgtttaaataaaaatgttacatcatatctcctgtcatgtgttcctaacacacacacaaaaaaaagaaatatctgaaaattaaacttaaatttgaaaagaaaacaaaaacaataaaccacacgtgtggtttacaattacaagctcgaagaggctttgaaacatggaagcacgaaggttactgacaaagacatgacaagctctccttcttcacctctgctaacttattttttgtttttaaagattgattagttttggtttttgtcaggtagaatcgtgcagaagcgtatttcccgctaattgttcctcatcagactcactttccagtctatacgaccaattaatttagccccaattgactaaattttttatacttaaaaataataaatattcactctgaccaacttgcgaccgaagaaatcaagaaaagcaaattaagatagtttaccaaacataattatttatatttttaagacatcggatgtcgtcaacaataaatttctgaaggagacaattgctcctaacatgatcgttcaatgattcagaacacaagacaacaaagaagtacataacatatattatatatatggaagctagagagtatatataatgttgcatgactgatataagaaaatatataatgtgtatgtaaagtggtttatgattcacaagttagttttctacttagtaacagcttcttcaagctctcttaagccaccaaccttctgttcaatttcttcgataagttcttcacgccatagctccgctcttgctttctcttctatgtcttcttgctgcatcatataacccaaaacacaataacaactctatccaatcttataatagttgtacacattgtgaatctgtgatgatataccaaaggtcaatggcccgagcaagcccagcccgacccaacttaggatcaatgttacctaccatcagatctgttaacgtttgaattattatatcaagcccaacccggctcaaacttactaagcatgattgatctatcaataggatggatcaatgttacctaccatctatcagattgtgactttcgtttagatgatcaaggttgtggattcatatttttgggtgcatatataccaacggtaaacgctaacctaaaagcacctatttttctttgtttagggaggtttatcgcatgctgagacacatggaggagtactcaaaaccggctctgaacaggtctacatggcctactaagaccaaggtgggatagtctgaggtcaaactagatctgaactggtccacagggtctagtaagaccacagcgggttggtcggtccattgcaacatccctagttataatttgtatgcatttctaagtttttttctttctttcctaatagtattagaaagggagagatacatacagtttcatagacccaatatccagttccatcccctccatctccacggtactcctctgagtcgtagaatggatcctgtattgatccaatatcacaaagtactattaagatcccaatgcagcaaatgtatcaaaagattcagtttgagttgttgttttcatacttttgctgaaccgaagtacaaacatccccaacaagtgaacatgatgtagaacatatctgccatatcaagatcaatatcaaaacataagaaaaagaagaaaaaaaagtctaagaaagaaaataaaatctctcaagaaaccccaagtgtttaacttacaaacattcttgatagctttatcacttagatgccacacgtgtttctctgtaatgatatcacgcattccttctatttgttgaaccatcacagccattaatggcaaatcatgtggcaatgcctttcttacacataagcttcctctcatcaaattcctttccctcttctcattaacattcttctaatttttcaaattctaagacgtaaattcacaagaatatggagattttttttctaattttagtcttagttagagaaaattacttacagatagccaatatccatgattcggtcctgaattctgcttcggctacaacacaatacacaattcttaaactttttttcgtaatgaaatatttttggtaagaatataaaataatatgtaccgagtgattgtaggaagaaggaatatgaagatttgtgaaggtgaaacttgtgaaagcttcagccattgttacttcttgatggtggcaatggagaagaaaaaaaaaaaatgttggtgtaatcttttttattttttcatttattttaatctttaagattagattttttgaggcagaaaatgtgtggataagggaattggtatcgtccactcttcacttttgtgataaacaaaataaaaaaataacgtacgttagcaatcacatcgcataacactttttttgtcttttaaaagcccaatttagacaatcacagtacacattttagccttctaaaacgctcaggttgggaacaactatttgccttaaagagtggtaaagatatttccagcaaaattcaactacaaactttcgtattttacccgtccaacaaactttccattcgcgcaggttagcaatcactaaacacgttcactcctctagacgtgcaagttagtaaccacactaaaattgctaataaatctttggttggtgaaattcaaactttccgcttatgtctcttcccaaatacatcatttgttgaatagcgtacgttggcaactattgccaaacttttaatgatatttccatctaattcaacttcctatgcgcgcatgttagcaatcatcccaaatacatcattcgttgaatagtgtatgttctatttgccaaactttcaatgatgtatatccatctaaaccagcttttattcgcgcatgttagcaatcacaataacacgtctactcttcttagcgactagtattttgtcaaaagtcggaagaaaatctccggccaagtcaacttctatcgctttaaaaagcgcatgttagctattaaaaagcgcacgttagcatcattttcgggaaattgctaatcaaactttccactttcgtcttcttcccgtgtatatctttaatctcctctgtttggtgactattatccaatttccaccgatcttctcctcataaaaacacctcttcctcaacgaattttttatccatgagtcgcataatgggattgttcgatctcgagaaacacttcgccttctacggtgcttaccatagcaatccgatcaacattctaatccacatcatcttcgtttggccaatcttcttctcagttttacttctcctccactcgtcgaccccaattttcgacccctctcaattagggttttctcaatcgttgaccctcgacggcgttttgcgatttaacgttgggtttatattcgccttgatttatgctctgttctatatcggtttggataagaaatctggatttgtagctgctcttatgtgtttctcttgctgggttggttccagttttcttgctgttcgactaggatcttctcttgccttaaaggttagattttttttctctaatttcaatttagggtttttgaaaaaacttcatttttggagaaaataattgcgtagaagcatgtttatgagggtatatgactatgtgtatccatgtgttgctctatgtgtatatttatatgatgtgagtgtggttcatgcatttattgttcattgttttctatgctttgacttgaaagttcgtttatatcattggttatgctcggggaagaagaaatagatttatttatatcattagtcctctctatctgttgtctatgggtcccttcattagctgttaacgttgagacagcagtactaatatcatgtctctagctttgaacattcatgattagtagttattgcagtttgttctgcaattgtccacctttgcacggttctgattctttggtccggagacttgtcatgtttttagtgttgttgactcattggttaagaggatttgatgtgtgcttggacggaaacaagtgttgttcttgaccaccaacatttggatggtctcagataattagaatctacatcacttgtttaactaaagtttggtttttcttccatagtatttgagacatctgtaacttaggagcttttttatgtatcttctgtgttgtgaatcatttgattagtttatatgtatcttcagtctgaatcatttgattagtttgttatatgtattcaacagcaaggggaaaacagttaatactcaccaagacgccaactctctctgttatgtagatactgtaacaatttaattgtctttttactcaggttgggttagcatctcagctgttatgttggaccgggcagttcgttggccatggagtattcgaggtaagttctctggcttttagaaatcattgttttgattctcctttgtgtcttgtcatccgtatacatgagtcctaacacatatgttattgattcttgtctactcacagaaacgggcacctgcgctgttagacaatttactccaagcttttctcatggctcctttcttcgtgttgctcgaggtaaaagttgttggtgttatgttatgttgtgatttgtttgttatctcctgctaccttattatactgctctgtggaaactgtaaccagaatacatgaaaagctaatgtggaaatgtttgaatgaatacaggttcttcaatcggttttcgggtatgaaccatatcccggttttcaagcgcgtgtgaatgccaaggtagaaagtgacatcaaggaatatagggcaaagaagcagaagaagaataagatcacataagcttggattatatataactgaagaacttgaacccattgtcgtgtttctataaccgaaatgataataagaccaccatgatccatggattgatgtatttgtgtgtaaactatgtttcaatatattgaatataatatgtttcagtcactcatgtttcaagaaaaataaacaaaatgcgttgcatgtattacaatcacatattcacaggtcaattgttgttccgctcgacttgttttagtccgttttgaaccaatcaattctttgtgtttaactaatgagtaaaactggtagcttaaatataaacttttatgattctttatgtaatcataaaaacactaatacagtatcacctaaattaaattcatattgattaaatatgtagcttagtgttttatttatactagctagctactaatatcagtgtatcataataattagtatataaattatatataaaaaaatccgcttgaggcacctaaaatgtttggattctaaagataaacatcttctagattggaattcggaggtgggagggaatccaactttctttattgttgatactctaatcaatttattaatagtatcaatcttgaaaaaatccttagaaattagaataataatgcagcgttgaaaaaaagaaagaagaatacatgaatgttgaaagacagaataatagtaatgaagtgactaaatatctagtttccaaaaaaaaaaaaaaaaaaaaaaaaaagtgactaaatatctatcacgtgactaatatgtaaacgcaaagcgataccgaaacgcgttttccatgtgcccatactccataagaccataacgatatcgtcttaaatgttggttgtaacgacattattttaacattctacttggccacgatgtcacataactcatggtgatgtggatatttctcgatttataccgcattttttcttgcaccatatttattatatgcattgactgtctataagcggtcgtgttagtattttcgtatcattaagaaaaaagagaattattatgttaaatgttgttaatatgaaatccaccgttacattggatttgaaacgttttttgttttctttgtaagaatagctagaatgtgttctgggtaacatatgttgctacgtgctcgaaaacatcggaatctaatgcttatcgattttgtctttacaatgtgaaactttataactaaagcataacttttaaggtttttttttttgagttttctcttgtcttttcgtgtctcatcaagccaatgtaacttgaagaattagtaatggttctaccagtaatcctacattacttatttttatttttgtattcccttgattttgtttcacaaattaatcattattgcaaacaataggttaatctgttcataacaaagagtaccataggatattatcaaagttgacaaaaaaaaagaagatattatcaaaataatttgaaaaaacaaaaacatcaacttcgtacattgaatatataacgttgcatgataaaatccaaagcagcgtggaccagaaccaaaagaaaagtactgcaattatcacaatagttttgtcttcttctctttttttttctgcttaactgatcttcctaattaaaaatttaatatacagtatatacttgattgtcaacagacaacatatgattttcttcacgatcaccaaatttatatatgaacacaacctttcatttattttaaaatggtcctcttgaatgagtgaaagtaagaggctagtgtataaaacaatcacaaaaattactgaaatgaaacaaaacactagtgactagccctcaccgatcgcggccgatgtcgatccttcataaattcttctaaaatattattgatttctttaccttgtttatataattcaacatatttataatggaatttatgcagtataattttgatggttaaaattacacctaacatgcatgaatattcacataatatcacaaaaactgttaagaaaaaagcgaattacagaattacatagttgtagttaggggtgttaaaatgggtaactcaactcaactcaagtcataatcaaatgagtttaaggttaaatgagttatgggttaacccaactcattttgttaaatgggttgagtcaactcataactcatttaatttgatgggttgagttgttaaataggttaacccatttaaataataatttaattaattattattataaaacaataataaataattatcattattaatttattatcatcaaacttagaatatttacggattccactttttacgggtttacgtttttggtggaaaaatcacgggtttacgtttttggcgaaaaattataggtttacggttttgacgggaaaattacggatttacgtttctagcgggaaaatgacgggtttacgtttttggcgggaaaatcttgggtttacgtttttggcgggaaaatcacggatttacgtttttggcgagaaaatcacgggtttatgtttttggcgggaaaatcacgggtttacgtttttgacgggaaaatcacgggttttcgttttttggtgggaaaattacgagtttacgtttttggcgggaaaattacggatttacgtttttggcgggaaaatcacgggtttatgtttttggcgggaaattcacgggtttacgtttttgacgggaaaatcacgggtttacgtttttggtgggaaaatcacggatttatgtttttggcgggaaaatcacgggtttacgtttttgacgggaaaatcacgggttttcgttttttggtgggaaaattacgagtttacgtttttggcgggaaaattacggatttacgtttttggcgggaaaatcacgggtttatgtttttggcgggaaattcacgggtttacgtttttgacgggaaaatcacgagtttacgtttttggtgggaaaatcacgggtttacgtttttggcggaaaaatcacgagtttatattttttggtggaaaaatcacgggtttatgttttttggtggaaaatttacgagtttactttttctcaatttcatcgcttgtatgtttaagaaatttggaaaaatattaattttattaaattggtttagatgtgttagttaaacttaaattggcattggtttagagattttagttggtttaattcaattttacaaaacttgatgggttaattgggtaaaccattgaaaccattaaccattacaacctaacttattttattcatcaaaccaattgactcatcaaatcatttgactcatcaactcatttgagtcaaaattttcaactcattacggtttatgggttgagttgaattgagttgaccaatgaattttgacccattttgatacccctaattgtagtatagcattataaactatggcgaatataaaactcaggatacatgttatagtagtatatcacacaatatcagtaagattataaatacatgcatattcacacaattaaaagtatatatatatatatatatattaaaaataaaatcaaaagaagtctagactaatatattaataacaacttacgcttttttacaaattttcatttagttttgagttgaaagcatatgctcacactaaatcattgaaaggaaaaaattattttgaaaaaacattatgataaagttgatgttgttgttagcctatagagagcttaaattcttacttttttatatcgtcaccttgattgcattgactagttgagaagagatgtcacatgtggagcagcatgatgggtcagaaatgtagacaataaaaatttctgaatcaaagtgtcattttgttctttaccaaatatcagttctctatttttaaaaatattattaaaaaaacaaaattatcccaaacatgaagaaaagtagaggagtcaattttgttttagtggaccttcaattttctgtgtttggtaatatatttttttgtcatttccttttttttttttttacgtaaaaagaaacacagagatgacaataaattggacatcaaaaaggaaaacaattgagacaaacacataaaatgaacacaaacttttaaaattgaaactcattgattggtagtttggtaccaattgataccaaaagattttgttatacccatcaaaaacaaaatttcatgagattaaatcaatgttaatatttataattgcgtgggcttaaacatagttatggttttgattgtatagaacgaaattgtaccaattgatctaaagttaacctcaactcggcttgaatttaaatacattttagaaattcattcggttctggctaaatacccaagtttcatgttcggaaaaagaaaataaacacagaaatgtaaataagtcaggatgataggcaaatacctgcagcattaattttgtacagacgtgtccaagtttcatgttcagacgtgtccctaatgacgacatactgtctatttttcacactttcaatcacgtgcaccattaatgagtccttgattcgtagtgatgattacgttgataaaatccaaaaagctttcaaagaaatgtttaacactttacttaaaaaattaaaagtaacagattttttttttaacatttttttttcaatagatcatatacatatttaaatattccataagcattttaaatgtttatctatcttctataatcgtgatcttgcattaaaaatagacttatttttattaggacatacaactgtaataagaattttcaatgaaatattggaaaatatttttatttttattaaatattttggcgtaaaaatatttttattttgattaaatatttcccagtattttattgaaaattcttattacaattgtatgtcctaactgaaccccacatgttaaacgacgatctctctcttttttaattttttttcctttgaaaaaaaaaaagctatacgacgacttgctctttagggaaccattttctctttgtcaaaaaatggtccacgttaatattcattgttgcaacttgcaactttaaaacatatcttagcatatgctaacaacatgcatgcactcacacagtcacactatattaagtcaaaagagatgatcaagtatgtgactactctcgtacatgacagcgtcgtacgaagtcatctcgtacatatccattgcatcaatctccattaaacgcctaacttcctcctcgccccaaatctgaatatcttctccttcactaccgtcaatcttctgacccatcattgaatctctttcttcttcttcttcttctttttcttcttcctcttttgcttgatcactgctttcgattattgaattcgacaagatgtacttgatcctatcgagactatgttgtctagatgagatacctgcggcgagtttgttaagaagacgagacgagccggaggaaggagagctttccgtcgtcgacggggacgtcgtggtggaagagttaccacaatctgcgttagtggtattgacggtgaggtgtttgatgatgggctcgtgggtcatagggtcgattccctttctcgaaagtcttttcttgagacaagagttccaatggttcttgatatcattgtctgttcgattctgcatcttcttcgccatggctgcccacctttattttttcaagaataacaagatttagtatgtcctttatcaaaaaaaaaaaaaaaaaagataaattaatattgtttccgaagatcccaaataaaaaaattcaaattaatctccaaactttgtggaaagatcacttaacatataaattaacgtcagagtggttaatcattactgaagtatatatgtggactctctaccaaagtatataatgttacatatatataacttgataattaacctgtttccgagaacagcatgaagttggatgatttcttcttcttcttgaggagtgaatttgcctcttctaatcccaggctttagatagttaagccaccttaatctgcagctctttccacatctctgcaaacctgtttttcataataaattattcgaagaaataattgtgcttttgtagtggcaaacaaaagaatctgccaagaattaaactttttattaacactggaggatttgaaagcaaggaagttgtaaaagcttcaacttttcgagattgggtcttaaaaaaacaaggaattttccaaccactatgtatatggacaaagcacagggaacacctgtcgctcttgagcaccgttaaaagatggaaatcattttttatagtatcatatggatataattggtatgagtttctttttttgtgaaagaattggtatgagtttctactaaatagaaataagcatctacaaaaattataatcaatcatggactaaaaagtattataaaacatgggtgtatgtgtaagtacgtactttcaatattcattcttgatttggttgcaaaaatcattataagaaaaaaaaatcatcagtgattttgaattcaaagaacatggattatactattcacttcagcatgtagaagagaatctctacatatgtaacaaatttccaatcccgaaaatttcggtgtgtatattaatatacccacttatgatttaactcatagtcctctaataatacaaatgagaactttcagcaacaaataggggaaagaaagtacaaagaaagtatcttcaatattgtcttaatcattttaaaacattttaaagatatatatacgaaccaaaaacaatgttaaatattctatatacttaacacatgctttttagatgttcttaatccaactatgttgctacatacctacgtgcaatatattaataggcagcaattcgaatttatactttctgtaaactcgttgttcccaaattagtttattaagaaaacaaaaaaaaaagtgagaagaagaaaatatgttgtaacacagttttgcaaaaacacaacatatagatgcatacacttctctatatgtttatggaatataaatataaatatcccaagtgttttgctacatatatacacgcatattttcatagggcagcaactagaatttatctagacttcaacaaatcccttgttccaaatacatatctaatgaaaaagagtagaagaagacacaatttcatatgagcacaaactaaaatgcacttttatgaatgacatgtttatattataccagctcttttggggagggaacgccaatcacaaacgccatgctcgttgatgtaagcgccgagcttctggtcttcctctgccgtccactctcctttcttcatcccgtcgacgtcgaaccatgtcgtcctccccattttctccagccaaccaaactaaaaaaccaatctaatattgccacgtttcaccacctcacgagaagacaaattttaaacaagttcaattatttatttgaaagtgtgtctctctctccagaaaaaaaagtgagtctctctctacacgttttactctgtaggatgctctcgagagaatgagtagtgggatgcgttattctaattagggttatacaattatatagcccccccctgttttggtattattatatttccgccgttggattttacttcgaattcctgccgttagatatcgaaagttttatcgagcacaaatttctactattagtctattaccataccaaatacccaaatcttgccaaaatttatgtgtaaagaggtaaaagaagaaaagaaaagatagtatctattactttttttgtttcgtattagttatactcgtgaaaaaactttaaacgacaattaattttaaatggaaggtgtactatctaacacttaaaaacttttcgtaaattattaccccagtatttatttattttttacctatcaaaatatcaaaatctaataagaacatatataaacaaaatggtgaattggtgattatatattttttgtacgtaaccatgaaatttttgataaatttgttttaataaatttcatatttatcaatatatattaatttttatagaacatttattaacaaaattttaaaattaaccacaaattattattattatatcgtatatataattcgttagtcacttagctttaacgtgatataatacaataaaatgtaagtttagccacgtataaaattttaatactatatttttattttatattcgtagacaatctagaaacaaaaaggggttagagctaaagtaagatgatcttgttataaaaaatggtaaatgatactattatttattcatatattcccgcacatgtgtggatactgaatagtgttagtacgttgaacgttttcttctttctcttcctggctattaataaaagtatgatagtctcacacctctttttttgataaacgtatatgataatcttactttatactattaattagtgacgatactagataattttttggaacggttaattagtagaagagcatgtggatgtggtaatcattatttttggggcgacgtggcactacagattgcagatgatagtatgataccattacactaggtcaatgtaaataaatggaaaaacagtaaataaacctaccagtgttcacattaatcattcctcacatattttggactttttgaatgttatagttagaagttagaaattaatatagaaaaaaggatggtccgttgactgcgtaagacctgtgattcgaattcctcacatatttcttggtcgaatgattcgaattccatctgtgatctgtgtgaaatctttttgctctctcatccttttcatatttcctcattcacacactcatgcgcctactcagaggcgtgatgtgcaattgtgcatgattgttgatgccaaacttatcattgatgtgggataccctcttctttagtgaattaaagtcgttagttcacatatcatttcatggtagacattttcatattaacgagaaataatcccaacaatcattcactttttcttgtttttaatttctttttgtatgattaaatatgtaattctctttttcttttcagtatatatatatatatatatatatatatgattctcgtttttgtactttttgtaaatgcttttttttgtgtatttgtttctcattatcaaagtcatctatcaatctctttcggacaaagattatcacttctgaaagtttttttttttttttttttttaagtagttgttttcttcttctacaatagctacaaacaaatcaagaaaaatgtgatagaggggtctcatcacaattgataatataaaaaactatatttaatttttcgaccacatggagattaaatataataagatttggtttaatttgttagtaaatagttgtgccaaacaaaacaaatagacaatcaaatataatgattatggttttgattagttacatatataaactagtagtggtaatgattgtaaggccttgtatgtaaccaatcataggaattatacaaaagtgtgcaaatagaagcattgcatagtttatattaaaagagtagtacaaatacctaatattgggttgtacaaagtgaagtggctatacaaaggtggtgaagtggagctagatttttttttcccaaattattgatacttactctatatcaaaatttttgataaatttttatttctttaaactgtcctacttttatctagtagcatttttatttgtattgctatctttcgaattgcttctatcaaaattttgtacttgtatttatattgtttttgacatgtgctcagcatctgtatagaaccatacaattactatacaagccaacatgtcaccataatatataagtgtgaaaacttcgcctcaaatattttaaaatgtaaaaggaaagaaaaatattttaaagtatgcgacttttaccgaatttaagcacgtgtcaataattggtatagttaaataaaaaaaaaacaaattcgtggatttatacatagcgtacgtgtaaatcagtgagaagttttctttgggggaaacaaaaaaacagtgagaagtgagaacaatgattaacgcggctcaactatattaagtgtgaaaccgaaacaaattataaatgattgtatcttacatatcctttaatatatattctacatgataaatgaagtttgatactttatttttgcatccatggaagtatatccgaactattaatttgatctccggtttatatatatatatatatatatatatatatatatttatttatttttaatcaattcggtcgacaaaaatttgatcaataacccaattcttattacgagtaggtagaatattgacgaaaataaaagtttttttgaaagtatcacatatgagttttttgtatatataataaacaaaagtcacatgaagactttaatttgtagaagtcccaaaacatttgagatatgatcctgaggatctccaataattgtcttaatcttgtaaatctgtggctgaaattgaaaaacaaaaacaaaataaaagatgaaaaaaaacaagataaggttgatgttgttgcgagtctttcttgggatgtcttatggttgtcccatgtggagcaacatgataggcctgaaatatagagattttaattccaaaagccattttttactctaatagatctatctttttttttgttaaactactttaatagatctgtcaatgtttttttccagattaattcgtcccaaaaatcccggacagtcaaacagagatggacaaccaatttgccaagacatgtaaaggatattgaaagtacaaaaataactgtcgtctgtgaagatgggtgagagatcgagatatccatacttgaaaaggatatgtttcaactttgtttagttttattttctttatacattttaggatgtcatgttgtgtatgatatttatattctaattctatatcggttcaagcttctttgtaaatcagtttttttttttttttttttttttttttaccgtatgtggacgcaaacaaagtactatctttgatgtcactttctacatcgtcactcacatgagatttgtaaccagggtatggctcattttcaaactaaatttgggaaaaatattcattatatcagtttttattcgtttatccgctcagaatcattcaaaatatggatctgtttttttttccttgacaacttcaaactttcattaaacgataaacagatagtactttgcacaaccaaagaggtgttgtagtgaaggtttgatacaaattgtctattagagaagctttgtgagagagtgcgtctgcgcggcggcattcttattattttcttaaataaacatatgatgatatgtaatacataaatggcatttttctaaagtcggaacaccttcatatttactagttacgttgaattgggtgacactatctattttagcatgggatatcgtctcgtctacatatatatctattttagcagtccatcacatgtcatcccattggacagtaaagtggaccaccaattccgcaacagtggtagagtttcgattctataacgttttatatatctcactcaatctagaaacaaaaatgaacatttttcttaaacacgtgatgtcagagacattttttggaggcccaaataagtctatacataccctatatgtcttcgttatatatcgtgaaatcataaatgtaacattttgattatttgatgaactttatgttcgtgtgttactttttttttttttttttttttttgtcgaagatgttcgtgagttactaagatatcagaatgcgttggataggggcataaataaagctttaaataaatcatataaatgcgacactacagtaattacataacgatcacgtgactaacgtggagtgaataaagaggcgcgttttacatgtggatcccaacgattccgtttcccatctccatacacgtatatctattatttattagtatttttttttaatgattgtttatattatttttttattttttattaaagtgtgaagtgtttataccatttttaaagttttcacggacgttacaaaaagtacaagtagtagaaaaataacaaaaatttacataaaaaacaaacaataatggataaaaacgtatgtacataacgaaaacaaaagaaaaagtatcgatttcaagatgtcaaactcctaaaatttacgtgagctaacctaagtcagtggctcgaagggccaaattaatctgcaatcaaagccatggaatgttgtcgaacacaaagatatgaattggccaaaagagttttcctttttaaaatcgtcattatattgtttcaaaggagtataaattttattttaaaaatactatgaaagtatgaaagagatgtacattttacaaaataaaaattatatgtctcttttaatcagccaaaattatatatattgccaattgctcttaagaaaaagatatagtaaaaataatctatatcaaagatagaaaagaaaattaaaatctgatgttaaatatataatgatggatacaacatagaattgtttctttgtggtaaaaaagagtgagagagattgattaatgattacttttacgcaaaaaaaaagagagagtaaaaatagtatggaccaatgtaaactacaagaaaacagtgatattagaacacgaaaaattgttaagtcaatatattgtttgcaaacacgagattgcaataaaatttctttttctactttttcttcttcttgttctcaacgttgcttcactcctttctgacaaagataataacttctcaaaagctattgttttgatcttctacgatggctacaaaaaatactggacaaaggtgttaccgttcatccaatgtcttatctcttcaataaaagaaatacaattaatattggaccacattaaaaagaatccaatcatgtggttgtgaccgcatgaaaacagatatgacaaccacgctgcaacgtaacaccttgtggtagaatgtttggatcttgagtaataaacgttggggaccaagtaattataatagaaccaaccatagttgtttattagtcgagacgagtagtctttatgttatcgttgtgtatatcagttttaagaatgattttaaacttttcagaacatcttcttaatcatttgttgttgttgttgaaaattatacgtatagtattttaagaaagcatatattttggtattttagaatatatctccttaattggacgagttactatatagtctgaacaaggaagttatcgtagcaaatattattagaaacaaaaagaaaagatatagtagtatataagagcatcatcattggagggttcttagtgtagttcttaggttaattggatgtaaaaattaatgattaaattgatttatttgctataagaactcaagctaagatcccaccattgcatattactaaaatttcaatctcttaactaaactcttaacatcaaaattttcaaaatcaattatatatatatattcttaagaactaacctaaaactacactaagcaaccatcaataatgatggtctaagacagctcacttatttcttaaaaattcttacaaaaatatcaatttgtcctttttagtttcccacttgttagttgatgatttgatgccgcgttaatcatcattgctcacgcgcttaaattacttgttcgttaaattttaacgtgcttcaaaagaaataaaaagtcttattttaggataacgatagtttgatacgaagtttcacacaaatggacgcgtagagataagccaaagccacatccgttcgttttcttatcaacgttaacaatgttaatgtatatactgtaatgaaaatagtacatgtatctgtacttcctttttttttgttatagtttaacataaaaattcgagaaagattttacacaagaaattatcgaaattttggaaagctatatttctcagcgtttcatacattgaagaaaacataacgaagaagaacataagagatcgtttgttattgctgtcgtcaatcatacgttgcaaaattcgtttcacttttgttagtatttgttgagatgtatacaatgtaccaaaagaaaacaatatatagagtgtaaaatattttttctcttattaatgttaaaaaaatatagactcatttatgcatgccactcaattaagtagatagaagtgaaaaaaaaaaaaaaaagtagatagaagtgacaagatttttttttggagaaatcacgaaataatgtttatatggagacatgatatcctgagaatcgccatcagctaatgggtctgaatctttttcctttatactctgtggttgaagtgaaactgaatcacgagataaggttggtgttgtcatagcctctggaaacctttcatggaccgcactaaagaggttgttgtcccatatggagcagcacggttggtcaggaatatatatagacagttcaatatgttaaattaaaaaaatcaagtttttaagattttaattaccaaaaatcatttaaaagaaattttccaaaaatgttgacgacaaacagatatgggcaataaagttatcaaaaaaagttttaaaaaatgaaggcccacccaaaaagttttgtcatttttcaagaaatagagcacttcatctctaaataaatccgattctggatttacccctatgatatgtcttatgtaaatttcctacttttgatctgggtttctaaattagtttatgattgttttctttaaattagaaatttttctcaaaaattttcacacacacgcatatatataatatattttattttttttggatttgagatgtttctgtagagctttcgtgtctataatcaaataatataaaagtataaacaaagagtgatacaacatatatggaaaatattggcattattgctagttttataagttgtgttttttctttcaatttaggaaatctaaaatgtggtactgtataagcaaaaggggatcgaatattttgaagtgttcaaaatgataaaggtaaattactctatttagtaacttaaaattgaaacctatgactttcacaaagaaaagaaaaaataaaaaacgtaaatgtcaaaaaaaaagaaagtcagaagaatcctaaggcttaatatattagtcagaatcggaacctgaagacagaatttggacagcatctttaggttcgttatcagtgatcgaagcaggaacctcttcttcctttgcattcctccttcgttgttctctctttctctctttcttcttcttctcctccacctgtcaaacaatcatcaatctttcttaattcgggcttatgtcaaaaattaatatttttatatgaatcatttcattgttacgttatcggctggttgatttggtgatggctgatttgtctgagcaggttgttgtgttgatgatcggcttctcatccaccaaacattgcctgcagataacaacgctcctagaagcaatgtaggccccattcttggatcagctaggtagtctttgattctgttccataagctcaacaatttctgagttgcttttacggtctttgggactcctgatctcatcggttcagcgctttctggaacaagttctggagttttagctctctgcaagttaaagtgaaagatcaaatgagatatctgataaaaggaacatgtaaatactgaattaaaacggaagttgcttacatagaaaggtaggtttctgttgtcaccatcatcaaccattttcgatagccacttaatgatctacaaaacagtaaacaagcaatgtaacaaagttaataccagaaaataaatgcagatttgttaaaaaaaggtgttaatactgtacctggggaatttcagctgttccgtcataactaacaacaagctgtgcagcaggatcaacatcgtcagcttcagattgccatacagttttgggccatttacttgatttttgctctgcattagcagtttctgtagcatttctatggtaccgaacgatcaatatcctagggacatcaatcggtgccctcctagttccacacgtgtcatagctggtttccgattgaacatagaagaaacagtatttctggatgaaaaatccagagggagtcaggatggtaggaagtaacagatctcaagacctagacgtgagatcttaagacattctaatggattccggaaacagaacagatttaaatgagataaggtgaatgtaaataatggtgttctggccagtatacttacattctgcgcttctccgtcgagccacgcaaatgagagtcgcttgcttttgtgtgcagaagctgctggcgttattgatggatccttggaagcgtcatctgaatcgtcatactttgacaaagcatcttgtaccctgcacatggtctacaaacttgtaagattagacaaaactctaatcaggaaggagacaagaacttcagataaaaatggacgatgttgaaaaaagattttactcacttccctcatcttattgagttcaacgctttgtcttccaacaaggatggcacagtaccacgtcactttatcataaccagctcgagagtatccccgtgcatcacaaccaagttccattgatgttgtgcttcttagttgaggaagcactttaagaaaaatgatcacaaaccaattaaaaaaaaaaaaaacccaattaaaaccattcatctaccagtctaaaaactcagtataaagaaaagcacatgcagaaaccgaatatactgaacatataatgagtgaaagcatagggattacgtaattgcttgttctgctccaaaatgtccaggaaccatgtacggttgccagatcctgcaagatggaatatcttaatcaatcagtttcctaatcatgcattatcagtaattcaaaacactcagttcaaggtggtgaaagaccatgataaacaacaggttttgaaccaggatccttcataatcacaatggcaggtgcagattctacctccaacctgttacaagagaagaaatacaagatgagccaaatatctaactacacggtggcagaatcaaagcgataccatcaaaccacacttattgataagaaatctttccgagaagcaatagacactaatgcagataaacagacttagaaagtgcagtgacatacgcattccaccagaaagatgcatcctcttctctccaaagcacgtgagatagagaggcaaaattccaataatctttggcagcctggcgaacaataggagtagctcgctctcctgtttgtgagaataaaatgactttcacctattgagcaaggggaagataaggaaaaggacaaaaataagggtgtaggtagtagatgtgatgcggaaaactattacatgtctgattagtatttccttaatttcataggataaaagaacgctagataaaggatattctaaagagaaatagaaaaacgctaaacaaaccttattaggtggaactttggagaggaacttagatacctgtatgcgaaaaaatatatttctaattaatacacaaaaataaataaatttagactccagaaaattttgcaacacacagcagctaaacaaatgaaattgaagaaaatatttaagtaaaacagtctcactcttacaaaccatgacatggaaataattcaggtactaaaaggcctgcaaagctctgcagctttgcagtacagctttgcagtaaaccaaatcaaattttcccaataaaaaagttcctaacatggttaaacctagatcactttccccaaaaacatggacggttatgataatcaagtactgaaaggtagtactgaaagataaattaggacatttcaatcagatatgattcctctaaaacttgtgtcatctataagaaaattgtaaattcatcatttagatctctttaaagaatgcataccagtgtttcttttgtgtgatagaatactctaggtaaacccagtacagtggtcgcgaaccaatcggtaattgcatctgctgacagctctccttcaaacctaacaaataaaaagatttgaattattattctggaataagaaaaatgaagcaagaaactcatctaaatgacaattccaagaaaattttcacgacccaataaagagtgcagaatattatgccttttccgttaaactgaagggttcagtcagtgagctacctgatgaggcagtctgcggttttacaatttggggggaaagagaagattgaaggaaggcctgcataatatgagaaaaaatccacacattttaccccaaggtataatcattacacctttctgaaatataaaccatagctataatagaacaagtgtgaaatgtatacacggaactgtattttaatgttcaagtgttcaaacctactggatgtaatatacttcctaagtacaaacacaaaattctagaaccattctgtttaagcatatcctcactacttttttcttccaatggatcctctcaacttacttcagtctacttttgattgacttttgcgtttattcttctcagttttcgtgtaggctcttagcaggatgaggaaagtgataacttaccttttctgaaaaatacttgtcctgttggttttttctcagcaaggtaggtcacaagttgaacatcgccaagctctaacatcgcatggttagcaaccccatccaacaaagcaactgcaattataaaagaaagttaagcatagcaagataattggtaaaatgatttcatacacagcaaaatatgtctatactattattaactattaagttagtgttccctcctaatttttgttaaaacatatctattgacatcaagttgcgaacttacgatcatattgttacacttgctttttacatcatagacaacatatttatttcctgaaaactaactctgtctatttcagatacttcagtttccccttgccaaatgcactgttctagctcttcaattaatcattccattgtctcatactttaacaaaggctggcaagagttttacactttaaacatgctacagaaagcaaatcataccaatccttctccaaaccgtagcgaactgggcagagctgttgctaccagaagaatacacctaaaggtatttagacgttaattaagaagtagcattgaattataccaataaattaatatttcagtacagtccaaaaggaaaatcttctatcgttaacgtgaagcacaacatgcactccctcactttgtagcataaagagattccaagagaaatatggttaaacgtatgccaacatttattaatttaataggaaacaattcgcatcttcaacatgttagattgcttgtatcttttgtaggagaggttttaaacgtacactagatattctatacttgataatccagtatcagttctgcagaaatgtgtctccacaaatttacatatctctgtgtaaacagtctagacagagtttatacctgaatgagccatggcttagaatcttggaacttggacgcaaagtcttgagatgttattgacataaaaccttcacgttcaggctctaaacaggttttatacaccaataagttggcatcggaagaaatataaaaacgaatacaagaaacagaactgaaaatgtcaaagaggtatgttggttaactgaccataagaaacaacttccagtaggggaagttttatttttgcaaaatcttccacagcatattgtttttcaagttcctctataatatgctgcaaccattaaaacaaggggttatatttgaaaaggaaaaaagagagtaaatcttccttctttttcagtttgctgcaacaaaaagagtgaagatacagaactaacaacttactactgattcatcaatggcgtataagtcatagtcccttttccatactagatttgttaacagctcataggcgtattgtatctgcatagtagcaatgatggaattagaagaaacgttacgcacataaaaaggctgaatgatttagcactaataagaagtcgacggccaaccttaacaaaatcagctggaagagaaactcctgaacccgaatccctgtcacgaccagttgttacaatgtgtcagccacacagtttctacttagaacacctaaagtctagttatcaacttcaattagaattacattccattctttacaatgccaagcctacatatactatcatctagcaattagttatatagaaaaaaacaattcatacaatactcgtgattgattgtggaggtagaatcatggggactaaatccaaattcaaggttaagaaaattccccagatcgagaaagttaccacttagaagcaacagtctgatacgcatctttcacgtcatccactgagctgtacatctttacacccaaaactaagaactcaaaaaggaaaaataagaaatcaaatcaaaagaatcaaaaccggaaggtaattgtgtagcacagtacatagtcgagagagaaagcgagcttagagaattgtgtaccgtcgtaatgagaaggaggaaaggaacgaggaagaaggaaaagctggaagaacatagcgaggacgaagaggaagataggaaccgtgtaggctttgagaccagaaggcatcgacgacgacgccggagtttccttcgccatcggggattttgggaaactccgatcaaagagtctcgatgtgataagtgtaaatctccttcggttatttttccgcgtttttcttaataaataaaaaaagggatcgactcttagcattaagtaagtaattatactcttttattatggttaaaatcgtatcttatcagatcacagcatactaaatctctctttttctaaaattaaatataattatggtttaagattaatatgttatttttaacaaaaacaaaaaaaaagattaatatgtgacgactaccaaacaatattagatagtattacgaatttacagataaaattgccaaaacctttataatttttaaataaaatacaaatgatcaactatctatttccatggtaaatacattattactaccattttgttttgtgcaaaagtttatttaatacctgaatggaacacatattgtgaaataaacaaaataaaactctcatcatttctctttacctctctctatatactttacatacaagacacgactccaaacctggtcatgccaatacctcaactggacacattacgttcctggaatgaataaccaaagacacatgcaacctctggatattttgtctaaccttttctccaaagctggttgtctaaaaggaagataccaaaagacgagtaacaagcaaaattgcagtatcaaatttctccatatattgaccaacaatgacaagaaacatctatggaataagaatttgacagttaaaacttatcttcatgagaccaaacaatgaagcacaaggaacaagtgcagggtaaacaaattgcattgtgtttgtgagagtatttgtatatcatctatatgtttcctgtaatcttgccaaactgtgattccgttcactcattgattttcctagctctatggtttggtttccatgtgcattcttcgaatatcaaacttgtctactgactccagaggagagactgtctcatttctgatccttttaatcttgggactcaacagtcccctgtggctaaacccatacagcttcagcacttgattatctgcaaaattaaaagccctctccatgctcttgaagcatctatcgactgcgtaatcagcatagctgccacacggtttgcaccctacaaaatgtgtcacaaagggccatctctcatcgcccaatcctggatgatacttctctatcatctcttcatacctgtcaaccaaaccttcccaaaacccgtgcaagtagtattgattctccacataaaccttctctatccatttttccttctgcgaaagcaagagatatatcaacgccgattgatcatcggcctcaaatgctggcctgcctttcagataagctgtcagtatcttcccagtttcgtcacggatcttcccttttggtcccattggggcccaagcatctaataaatccaatgaccactgacaatttctcaacagaaagatacccgtgttcaatgcaacccatgatttttggttgaacagcaagtctggataaccgtgtatcaccagattatgattttcgtaccgaggcaacgggatctcaaacagtatatcagtgaacaaagcatcactatccatccaccaaatccattctacttctggatgagacagcattaatgtcctaatcataggtaatttcgtccaataccctgagagttcctcatccaaattcgccatgttatacacaatctctatcccgtggagtctacagtaatcaatcttgttcttcacagctttcaatagataatagtttccaattggtttatcacagggtccgggggaagaccctgtgagaagcaatattcgagctttgccattgacaatattaggaaactcagggttctgattcagccataccttgcgttgactatcccagttggtgattttgggccctagagtatatgtcgcattgggactaatatcagctttaggcggctcaagcaagtctgtcaaatgcgaatcagatgggatctccgcgattctggggcctagagtatacgttgcattgggactaatatcagctttaggcagctcaaccaagtccgttgaatgcacatcagatgggatctccgcgattcttggctctagagtatacgttgcattgggactaacatcagctttaggaggctcagccaagtccgtcgaatgcgaatcagaggggatctccgcgagaatcggaatggtttccttgatgaaactctgattaacagagtcggcgttggagcttccaaggttcccaacacggattgtgccaagtaggatgagaatggtcacgaagcagcagagaatcatgaacttgatgttgttaaataaggtattctggatctgccaaccgcgcaaaaacccacgggttctccatccaccatttgatacagccgttgtcgacagtcctctgccacttcctgaggatcttgacccatcctgaaacatttcacttgttgcctcctgtctctagatttcactcacaggggagagacctccagatggcacttgaatccagacacggtctaacttataactataatcggtgaagactgtctttttgttactcacagaatgtgtagatcccacactctctccctctctgaactacaccgctctgaaacttcagatttttggcaggatcctgatggaagactagtagatgatggacttggacaatctgaagagcctcttttaaaaatcattaaagaatattaaattggataatggagaaacctggttgtaattaaatatatttgatgcggagcaatatgttttatatgcatgccaacattaagcatcttattaaatgaaaaataaaaacctttcgcatcttcaacatatgaatattcatgccagattgcttggatattttgccagagaggtatcaaaagcatgatgcttgatatctctacaaacttaagtgactctatgcttacatatcaaagaagagccaaccatgtatacgcaactgtaaacaatctactcagaggcttattatacctatatcagccttggtttggaaatgaaatgcatagtcttacaacgtaaaatggcatcaaacttcacgttgaaacctctacgaaatattatatgtaataacaagttggatccaaaagaaatcatatacccaaattcaggaaatggaattggagatggtaaagagctcgtttagtcaactgaccataagaaacgacttcccagcaggcgaagttatatttgcaaaatcttccacaacattttcgttttcaagctcctctataacatgctgcaaacatggaaccattaaaccaagcaattcgttttcatataaacagaataaatgttcattctttttcagtatgctgcagtaacaacttactgctgtttcatcattgccaggtgtcacagtcccttctctatatacgagatttcttaacagcttaaaggcgtagtctatctgcaaaacatttagtagcactgatgatattaacaacataaagctaacagatttagcacacaacaaactgacagacctctataaaatctgatgagcaagtatatcctgaaacagatagaaattgagagaaacagtatgaagaatgatggtgaagaagaagcatcatggaacgaattcatgtcatggtcgattttgaaaaacgttcttcaagtttgtctgcaatgtacttgaactaagaccacctaaagtatagttctaaaattcaattagcctacttatactaacagaaatagagtacgctgagtttatccaagactcttcacgaaacaccacacacagacgcacacactcacccaacagtagatactaatttcaggactatctatggagtataagttactcgaaggtggaatcatgcgattgaaacaagactcaaatgaaaacagaaagaaattcaaccgaaaatgacaaacccgcagaagagtatatacacggaggtcatggacgaagacgacggagtttctttcgccgtctgatttagcaatctccgatcaaaagatttttcaggcgtcaagagttgccaaaaagagaaggaaaatgcaaaattccggtctaatttaacaagaagccaaaattacccggttcggtctatgtttacttgaaccgaatttaatttaccttcccggttcaaaaacccaaaattctagagagagaggacggcaatgcgatggggtcatctttctccgcctcctttactaactccaccaccgccgccgccgttcctcctccgtcgccaccttcatcgccgtcacgttccaatgtaaaatctaacggagaagagagacctcgtttcttcgatggaaaggcgaagaacaagtgctgggctaatgctgacatcgtacctggtcgacatcccgagaggtggcgtaaagacgtcgccggtaacatagtctgcaaacgcttcggaaattgcaatggttgtctctgtttcgagtatgatcacattgttccttattccaaaggtttgatttttcttatcactgcttccccaaatgtgacattttgaatttaggttttgagtagttaaaattaggatcttgatatttgtttctgtgtatataggtggagagtcgatagcggagaattgtcagattcttcaaacaagagttaacagattcaaatcagctcaagaaaatgttgatgccaccactcttaagagctattcttgtggtctgcaatttacgggtatgttgccaaatgttagcttcttcttcttctaattacatgtgatgatggatcatagatttgctcatctgctataagattcaatctttccttgttgggtttgtttttcagtgttcatttctatgttattatgtagataagatgggacaatcttgattgtgatttgtagtatgttccatattctgtagagattaagatcattaatcgtatagatatagtctttcttacctctgttatgctttcgtaaagtgctgtgttgaatagcatgttcgtttagaagtaatgccaatctcatacatgtgggagatgcttttgctttagatcttctttctcttttctctgttggtttgatcatatcaagaattgctattgagccactaggaatctaaatcttctttaaacccaaaagccatgctgtgagttgtttttaggtgttgctagtttacgttttatataggagtgaagcaaagtgttaaatgctcttgggaaatgcattttcttttcaaaaagactcaaaagattatagagctcttggtacttgcaatgattatacacaagtgaactcaagtgtgtgttgtgtgtctattctctgcatatttgctttgactttcttaagatttcttctattgtaaacattgcagacaaggagttagatgttatcgagatggcggtttatggagacgtgttacgacctggaaaagaatgtcgctgcaaaaccgtagctgagctgcttggtcagtccaagtccaaagatggtaaagccgcatgcgagttaccatcatagaaagtagtaatcaaccatgtctttgtaaagctttgattcatgctcatacattggcagattcatcagaatcttttacatatactggaaaccattgtttgtaagagtagtgatgattctatatctctatatacaaatggaaataaaattcagcttacactgatacctaacttttgaagtcaacaaattgtttgttaatatatcgaccacctaattcactattatatagtcgagaaataaaagttactgttacgatagagattttatggttggtcatggagacatgaaatatcaaaaaacgggaaaggtgcgcaattatgtgtgagctattaaagaaagatgtctgccaaaaagttaaagtcaacataaatttcctttggcttttttttttaaaaaattctctctgatatttaaatgtattttttcccatctatatataaaaaaaatatagtagctttcattcattaatacctaaataaaaatttaaaaattggtagttgtatcaatgggtgttcgaatttcggctttgaacaataaatgtagctcccacgtatacacatatcggctggttgaaaaactttatctatggagagagtcacatgatatatggtatccaacaataattcaacaatttaatgtggaatatgtattgattgccgtaaggttcgaaagctcaaatcccaaagaatttatcttactctaaaaaggggctattctatttaaatctcaatatgcattttgataccactacttcggttattattaaacaaagaatttcgaatcgatcccatattatacgaataagaaaactacaacaatgtttgtgattgtatataaagtacacaaatgacaagtgtgaggttaaaaaatgttggaaacaaacaagtcaacaacaacccaccaccgtttttggccgtattagctcactctcacactggtcgccgctagtcaaactctcgttccattgcataattttttaatcctattaatttcgattttctcaacaatgttactcacttaattagaaaaaaaacactactatatcaaattgaactatacaaagaaaaaaagctgtagaaatacttaacacagaaagtaaaagagagtgatcaatcaagtcatcattattcactgtcgatccaaaaaatcttgccgtagatttcgccttaaacatttctatttttgattacacgacatttacttttgatctatctctgtttaatttttgatttcgtcttccgcaattcacgcagaaatcaaaaactctaaaagaaaaaaacaacattctctaaacttttctctctgtatatatctaacgaaaaccgcaacagcaatagtttcatcattcaccggagatccgaatcacaataaccggcgccggtttaagagatagttccggtacacatgtgttgttgacgcggaggagcgaaattctgggaatgggttgtgtcaactcgaagcagactgtttctgtaacgccagcgatcgatcactctggtgttttcagggacaatgtttgttctggttccggtagaattgtggttgaggatcttcctccggtgacggagacgaagcttttgtcgtggtggagcaagagcgggaagaagagtagtagtaaaaagagcggtagtgagttgggtagcgatttcggtgagttgagtgagtctggtcgagcgagttcgaattgtaggagtgagtcggtgagtttccgcctcggtaatttgagcaagtaccttgaagctgagcaggtcgcagctggttggcctgcgtggcttagcaacgtcgctggtgaagctattcatggttgggttccatttcgatccgacgctttcgaaaaactcgaaaaggttccttttttatatactctctttgtatattatgtaatacttttgaaatgttgttgtctctgaaaatgatttggttttgtttccttgaagattggacaagggacttatagtagtgtgttccgtgcaagagagactgaaacagggaggatagtggctttgaagaaagttagatttgacaattttgagccagagagtgttaggttcatggctagagagattttgatacttaggaaactcaatcatcccaacattatcaaactagaaggtattgttacttcaaagctatcttgcagcatacatctcgtgttcgagtatatggagcatgatctcactggtcttctttctagccctgatatcgacttcactactccacaggtcattttgatttttagtgattaaaaacgactttactcttgtaatgcaagattttgtccgggtttttctaatacaatgaatgttgctctggacttgcagattaagtgttatatgaaacaattgttgtctggacttgatcactgtcacgcacgaggtgtgatgcatcgggacattaagggctcaaatcttttggtgaataatgaaggaatattgaaggttgctgattttgggctagctaatttttgcaatgcttctgggaataagcaacctcttacaagtcgagttgtgactttgtggtaccgtccacctgaacttttgctcggggcaacggaatatggagcatctgttgatttgtggagtgttggctgtgtttttgctgaacttctaattggaaaaccggttctgcaagggagaactgaggtaacccacaaactgttgtcttgtaaatatatgttacatgtagcttcatacctctggatcctgtatattgctctgtttttacttggggaaaaaatataactcaaagagtgctgtttcttgaatgtatattacaggtcgagcagttgcacaagatattcaaactttgtggatctccacctgaagattactggaaaaagtccaaacttcctcatgcaatgcttttcaaaccacagcaacattatgatggttgtctccgagaaaccttgaagttgaaaggtttatccgatgctgacatcaatcttatagaaactcttctttctatacagccccacaaacgtgggactgcgtctactgcccttgtttctcaggtaaccattttatccttcagctattataacagcatcttgtttgaagatttggaactttgattttcaggaagatgttattttgttgtattgccacatcttttaaaacattccctttgttcttttcagtattttacttcaaagccttttgcttgtgatccctcaagtttgcctgtatactcgcctagcaaggagattgatgcaaagcatcgagaagacacaacaaggtcagaatttcattcattaccatcattgtcactatatcttacaagaaacatacagtgaaaacacagtttacccttgggagttacttggttaatctcagcaccataatttttttggacttaatttctgaagtgtcttgtcctgtaagcacttattcattatcctccaacgttattgtggaattccaggaaaaaaatcagcgggaatgggagacgtggtacagaatcgaggaagccaacacgaaagccccctgcatttgctaaactggcaccagctgaggtacaccaacacgaattccctgcatttactatctgcatctctcagaagggaattccttacgccaaaaaaaacaaaaaaaataacaaaaaccctctcctttctctacttgcaggatgtacggcaccactcccagaagtttcagaaacgtaatggtcattcagttcataattcgattgatagtgattccactttatttgagaaaatgcaaaagccatcaaatcatgaaaaggatgaagcttctcatgtgaagaacgcatcacaaggagatgtgcctttctcagggcctttgcaagtctctgtatcaagtggttttgcgtgggcaaagcgacgaaaagatgatatatgtgttagatcacataatagatctctttcaagaggtcatattcctaacctgttgggaccttctcctgctttcagtgagaatactgacgttgactctaaaaacaatgagaaagaaaaggaagaaaaacatggggaaagaacggattctcaagaccgtgaggcgtatgagatgttgaaactttcaatgctaaagaagtggaggcaacttgaacgaccagattcttttggtggttctgacgagtatcattcacaggaactgtcattggaactttatcagcgagaagaaaaggcagcaaagctgggtcatttggtacgtttgtagattatagaagcaacccttttttcagcttattatagaaattccagttgagatactagagaccaagtatacttagttttgcacatctctactgagagaaattaagaacctagctttacctttcttatgcaaatcttaacttatataaatctgaagttatgatttcttgaaatttgtgatatgctagttatgttaagctgtcttgctaatggcagcggttttgggatcacatgtaccccttataaaggagtaagatatgaatttcaaagcttcatattgatgtgtgacactgacatcataaaaatcagtagaaagagatcctgattgctatatgactgagtgtagctttgttgctttatgttttttcccactttgttacttgaggggaaaacgtagaaaatgcatgattgagttaaaatcttagaggatattttgaaaaacatactcaatgaggctaatgagttaagatcttgacagggttacgaagacaatgatgagaaaatcgaattctcagggcccttgttgtctaaatcttatggagttgatgagcttttggaacgccatgaacgccaaattcgccagttagttagaaaatcgtggttccagaaaggtaaaaccatgatgctaataactaacaagaaaaagagaatgttttatgattaactgtgatgagcaacaattgtatggcttcgtgaattgcaggtaagaaacaagggaaatgaatgactctgcataaacctttctgtgtcatgaaacaagctccccaagtggatctagaagagagctcctagaactcaaaagactatatgcattttgatggtttgagaaagacaacgttaacaagatcttcagacagaaactgtgatggtgaagcaaatatggagaaagccatgaagcattattattttctgttaatgtcaatttataatataatcttctctaataaatcaaaattttgagaatatgacaattacagcgcagttttctgatttttcatgtataggcataagcatatctataaaatattcaattgtagtataaataaaagatctggatatttgttatacagaaattattgattataatccaaagttgggacaccatctcgttttgtgatgtgtggtggtcactggtatttaatgatgtctcgtgacgatggtgtatgggagtgatgttggattatgacgtttgttgttatcatcttgtttcattatatcatcaggatgtgacacattatgttcaagttatataatccgtgcactcaccatatgtctactgatcagaatctgagaatctctaaatcttatcaaatctcaatgtaatagtgtacaaacaaagagaaacttgaattttgtaccctttttggcagtttggtttttgagaatttcagccatctcttcctaggggtgggcacaaggcgagtacttgctattttagggatacttgttactcgacttgccttgtacgagtaatcaaaataagtacttgtacttggcttgttgaaaacgagtacttgcaatttcaagtacttgctaaaatatgattgccttgcgagttacttgcctggtcctgttacttgctacttgtgagttacttacacgtacttacgagttattacttgctacttgcgagttatttacaagtatttgcgagttattacttgctacttgcgaattacttacaagttatttacaagtatttgagaaattacttgcaagtaacactttcgagttacttaaaattacttattattttatttatcatattttttacttatttaaaatttactttacttctaatatagttttaaaatgtgtctaacactaaaacaatacaatatatgtatataaaatggtaaaataatgacaagtaacgagtcaaacgagtcaagtattagtttttttttcattacttgttacttgacttgtacttgcaagtatctaaattatattacttgttacttgccttgttaacaacgagtacttgttttttcaaggcgagtacgagtcaagtagcgagtataagacgagtaacgagtacttgtgctcagccctatctcttcctctaagcttccagatttgataaaacagtgccaaaattaactaactgtgtccgaaaagggatattatcttgtcaagaatcttacatatttttgttttgttttttttgtttcttcttgctacagttgcataatgaagaatatggtaattaaataaaatacagtcgcaaacaaaatctacaacaatggatccgacaaaggatgacagcgatcctacaaggatctctatcttatgtattcctttaatcatgaataaatgttttgtcaaccttcttatgaacaggtcccaagtttatctctgtagtttaaccggcaatacaatgccatcatgctgccagttcattgcattctgcatcctctttctactgatcggagatatatcaacccgcgctttattctctgcaacaacaaagtttcaacaatcaaaagaaagggactggtgaaacaatgagatttgtcgagcaatctgtactagccgataatcaagtacctctccagtatcctgaagccgaagtagttccaatctttctgaaggtctcctatctgtcagtgtagcaagctggcgccaaaaataaactcattgagcaataatttaacacaagtggaaatatgccaatagttgtgtgttttacccagaaactgaagcgctcgggatcttgaggcgttggtatcatagattcaacatttagaagtatttcaagtcttcttctgtctgtaaaaacaaagaaaaagggaattactcgatcatgtctaaaataacatgagtatacaagtgccacaactatcaatcaattatgatcataaaacattagctggtaactattagagtatggtctaactgccgtgcatatactcaattctttgctctaaaacaaccataaagacaatagttgattcaaagatcatggccaggaaaagaaacagcacttaactaatgatctaatgaattgtttcaattgctatagcttggatggaaataccagaagtcatgagtaattcaattctctttctcagctaatgaatagttgcttacctccttgtctagctgcttcctttgctctatctagccatgaccgagcaaatgatgctgcgctggtcgtcagttcccgcagctttaagaagtcacaaagaaagatatgaaaataagagaaaggaaataaaatcactttagtaacagcagagaaaaatcgtacatctgctttcccttgctcgctttgtggtggtatatctttcacccattcaacctctgcaacacgatatctgaaaagaaaaaaatggtaataagaagctaagcgtttttgtgtctgaatatgctgaaatggagtaacgtatatgaaacaaagtcagacaatcgtgtttacaagaagacccaaaattaaatatttgatcttcacacatgttgaaaaataaaggaaaaatgtaatttggtataatgtatatcaatcacatctgacacgaaaacagagagattgtttaaaaagacatgtgaataatatcaagtaatcaaaatgacaaagcttacccatcttgatcccaagcttttacaatgcggcaccttctatggctttccagctgcagaagcatatactaagttaatcatttgacaacttacacttgaaaagtaccccaaaaatatgaactctataggttgactatgtcacggtatcagagatttagacaaatagatccaagtaatatggatttaagataaagtagtgaacatgatattcacctccaggacaaaacgtccatccgggagtggatcacacctgtgtagttccaaaacatcagcagactttgtgtgagttaatgtaatttaaaatcatcaactgaagaacaacaaatataatcagaaagaaataagtaacagactctgtgatttcaacttcgcaagcaacatccactggagaacctgtcgccgaatcaagagctacctatgaacattggaacgggcaaaccttactagttaggaaccttttacgaatgtataatgaagaaagaaagaagaaaaaggacacaatacccaccattcccatccgatgatttccttccattattcttctcacctgtttcagtcaacacacattaattaatgtactgagcgcaaacagtactactgctgtggataaagtggtcataaaagttccatctattagtgctcatttagagaccactttctcttttcctcactgcactttcttgggtttttttcttcctaaattgagtctccgtgtctttataaagagttttacaacaacttgtacagtctaagatcatttaagaattttgtgaaattgagataaacaaattttacaataaacgagtattcaatctctgcaaagagtaggctacttaagttcttaaatgtacataaccgaaaaattttgaaagaactcaccattagtcgatatcgtggttcaaatatatgaagagacaacttctgacaggggattatcacatccatgacgaaaaggggcatactttcattgcctaggtggaccagagtgtcttgctctgatttcctttcagcatactcctctggaaagtttttctctatgatgttattcagtgtcacactgccaacacaaagttgctttagtagaagaattttaaacattagctacaattacatatataatagcatggagctacaaggaaactagagagagtgaaatataatttacctgacagcgcatgttcttggagtcataaaaatgacagttcgacatagtggacatttgttgcctatattccacaaagcattaataaacaacacaatagtaaaagaataattttccaggagtaaacaacaatcaaccatataaacccaccgcgatccattgactgaaagaggcatgatcggcagaatgtatgcccacatggagttgtagcaggttcgtacagcaatttcaggcaaacagtgcaatcaaaatcatcagaccgctcagccattccatgggttttacgcatcgaattaggcatcactttctccaattcctgaagattggatcgtagaggaccgcttcatgcgatcagaaagaaaccccaaacttaaaaacgacacattcagttaggcatcaatacataacaaaagaacagtacacataaatgtacctaaagggatcaatctgtagacctgagaggatagtgtcacgggctacctcatatctttctagctgcagaatattaaaaatattgacacatgtgacatgaagtagacagagaaactcttgatagtaccttgacttaaaacaaagaatctagagacagaaggataactcagcacataccaacatgagggcacaagcctttgtaatatatgacttcactaaactgctctgaagactcattagcttatcagcatccttaagagcaagctgcaggaaatatcaagttttccaggatatgagtcgatgaagtttgcaactgctagtaacagtttaagtaagtagaatacatacttcaccaagcatcgacatatcaaaaccattcagaggtttatattcagaaattgatgcagatctctgcttcagatattggccaaatctataatcaaaaaaaggatggagatggagagaaattagaatatgtcaacacggtttaatacttatacagagagtacaaaggcaaaactagctacacaatccaatgtaatcttatatcaaaacaacatgacaactccattggaagtaaaaaggatggcatcggttttgtgaaaccataccttatataagcagcacttctattgccaagaacaatagggtcaagaggtttaatagaattggcctttgaataactgctaatagcctgggaaaaaaatgaagctatgttattagcaagaacaagagatttctccatatcatttgggtttcagcatcaaagctttaaactagcacgaatttgcagaatattctactaaaacaggttgataagcagtttcaaagccagaattaaacatgtttcatatgactaatgcaaccaaaaaactagtccacaagtaaactacaagagagagcccaaatcagttttattgaaggacctaagactatttatcatcatcatgttttgtaagaacctaattttctccctacacatacatctcagggaatccctaaagaaagaaacaaggcaaagaatgatctgaaaagagctctctcacctcttcaaagcgagactctttgaatgattggtttcccttctccacaagttgaaaaacctgattgtgtatatctaaaggtaacgaattgtctgcttcagtgacctggaaatatcaagcaaggaagagaatttagataactgagacaaataaatcaccctaacgaaaatctaaatcaacaatcggaaactagaacatgcattgctactcttcaaatcaaaacgaagtaaatccaaagagaactcaccagaccgtaattttcgacatcatccaaaccaaacaaagtgaaaggcggaagagagtcttcgttagacatgagagtgattcgatcgaagcaagagattccagaaactgaaaaagattgaaactttgggtcaaagaaatttaatgatgagaacaaagaaagaaattgaacaagggaagggagggagagtatcgtgttcacttctgggtccttcgtttgcaaccacggattagaatcctctacgtggttatcctctctccaaagcttcacccttttttttttttttccttcaatctctttctctcactcagtcactaaaggtgaatcctttttgtttgtcaatcttcttcttcttcttcctgatttttcggtcggaacacacaaattcagctcaccagaattc

SEQ ID NO: 10 - DNA, 119942 bp, Arabidopsis thaliana
gaattcattttcagatgtcgattatattcaaagaaaaaaaacaattctactaaaactcaatctctctttttttgttgttttcttttggtttcacagatttgcattcattcatattttgggagaaggtgccgaagagaaggcgttggaacttggaacttagtggaatgatgcgggaagatggaatgtattagctaaggcttcaccgtatgatgggcaattcgctgatcctcgatggtctactgtggaatccttagacttcagtcttccataacacaagtaagttgattttttcggagactggtacagtatgtgttattataagttattgaacacaaacacatattgaagagaccaaagttattataggagtaaaccataaaattttataggttgtattctaatattctttaagaaccagtaagaaataaatgatgatactttgctaaaagataataagcttctatcatcaaacatgtagtaagtagggggaatattataacagcttggtaccaaaaaataaaagattatgtacagcaaaacatatgttcaaaacaaacaaaacgacttaataggaatttggttacaaattaagacttaaatccatttgtcacaagctccttggttttatcattgtagtctccagacgagaaataaagcaatcatatgatatagttacttatctttctttaaaacttcaaggataagcttaaggagtttgtaaccaatgagtttaagtccaatatgttatcacttcatgtaagtcttttggtttgctttaaatagtatgtttagttgtatacaattttatgtgagaagccacagtagagaaggcactggaacttattagaggtgacgtgggaggatggaaatggaatattgtagatgataaggttatgccgccgccatgcacaacaataagatgttgctccccagtcaccatgtacgtaaatttgctcttgatgatttggttcaatcttatttgtaaaaaaattaaacctctcactaattttcgttgagaagtatataagatgactacggagtagattataacaaacttacaaatttgatttttccacataagattatatacagcgaaacatgtattcaaatgaccgaaaaatcttacaggaagtggtaatagattaaactaaacttaaacctatttgtcacaattttccttaaaacttcaaaaataagtttaaagagtttgtaaccaatgggttaaagtccaatctgttatctcttccatgtaagattttttgtttgctttgaatagtatgtttagttaattagttgtatattatcttatgggagaaggcactgaaactcagtatgtgtgacaaaatattatggttgttaatattatgccgccgccaggcacaataataagatgttgctcttgattcttggttctttcgttttttgtgacaaattaaaacctcttactaaactctttggtgtttaacttgtgatacaatgcaacttctatttttttaaaaaatattacttcagtttttctttcgttcttgtctacatgttaaaactaagcacaataatcatcatctgtgttcattattatccaagagtatgagccgcgtacgattcgcataaacaaagtaagctcattaatcatcatctaatcaatttcatcgatttatctggaaaccaatctcactctagaacaaacaataaactctatttggatcaacaaattgtactataatgctatgttaagtattacgaatttgtaattcaaaattaattagcaaaaagtgaacttggaatcttggcacaatttggtgtccaaatttttgtcacgtggcagataattaaaaaaaaactgccttaatgggccgaaattaagtgatctgacccattaaatccgtaactagcccgtgagtttatatgacatcacttatcactcttatcatattgaatttttctttagtcacaatcaaatacaaaatttattttcaaagactatcacaatcctagtatctagtttataatctgaatattggtatatttataggaagtaaatatctgtttcccataacaattaaataaaagacgtggttgttggagttgactaatgaatgattcgtaatgaattttacaggtaagtattacccaaaaaaggattaaacatcaccacaactaccaatagggaccttgtactctccacattgcttccttcccaggcaaggttacttccgtaattacgaaaacaccataaaagaaacagatctcgtcccgcgttggtttgattgatcagtgtcggtgtcctaatcacaatttccttatttagacaaaatctgttacttccctctcttgaatcgtcgtcattctcgaatctctagatctagccaaaacttttgccatctctaaaatgtatctccattgacattttgagatctatctagctctgtttttctttttagaacaaaatggtggcgaaaccaaggtcaagatgttgttgttgtagtgtgttcatcggcgttatcatcttaatcgctataatcatcgctgtcattttcacaatcagacatagatcaaaccactccgatgatgatggctccaatgttaaaaactacgctaatgctctcaagatcgctatgcaattcttcgatatccagaaatgtaaacgattcttcaatgagattatttgtttatgcttttgtcacaaattaatttcatgttttttgatgtagctggtaagcttgaaaacaacgagatatcatggagaggagattcaggtcttaaagatggaagcgaagcaagtatcgatctttcgaaaggtttgtacgatgctggagatcacatgaagtttggtttcccaatggctttcactgctacagttctctcatggtccattcttgaatacggtgatcaaatggcttctctgaacttactggatcatgctaaagactctctcaaatggactactgattttctcatcaatgctcatccttctccaaatgtcctctatattcaggtacacggtagtgatcaaacacacaaatctttcataagttctcaagttatattactgactttaacattgtaggtgggagatccagtgacggatcataaatgttgggatagaccagaaacaatgactagaaagagaactcttactaagattgatacaaagactccagggactgaggttgctgcagagacagcagcagctatggctgcagcatctttagtctttaaagaaagtgataccaagtattcaagcacgcttttgaaacatgcgaagcagttgttcgattttgcggataataacagaggatcttacagtgttaatatacctgaggttcagtcttattataactcaactggttatggagatgagcttctttgggcagcttcatggttgtaccatgcaacagaggatcaaacatatcttgactttgtgtcggaaaatggtgaagagtttggtaattttggaagtccatcatggtttagttgggacaacaagcttccaggaacacatgtataaagaacaagacacttctttacaaatcatgattcatgtttgtttgattataacattttgtgacttatctaatacatttgcagatactattatcaagattaacctttttcaaaaaagggttatcaggaagcaaaggacttcaaggttttaaagaaacagcagaagctgtcatgtgtgggcttataccaagctcaccaactgctacatctagtagaaccgatggtactttccttacatctcacgttacaccattcactgaatcattgttaattatctcatttgattttgttttgatattaaaggtggtctaatatgggtaagtgaatggaatgccctgcaacaccctgtgtcctctgcatttctagctacactctacagtgactatatgctcacctctggtgttaaggaactatcttgcagtgaccaatcctttaaaccttcagatctcagaaaattcgctagatctcaggtccatatgcatattaatttggtttcttatttttcctcttaattaaacgtataatactgtaacttgatatatgcatatataatgtgcaggctgattacatgttagggaaaaatccggagaaaatgagctatttggtgggatatggtgagaaatatccagaatttgtgcatcatagaggagcttcaataccagctgatgcaaccacaggatgcaaagatgggtttaagtggcttaactcggatgaaccaaatccgaatgtagcttatggagcacttgttggtggaccgtttttgaatgacacgtttatagacgcaaggaacaattctatgcaaaatgagccaagcacttataacagtgctcttgttgttggtcttttgtcgagtttggttactacttcttcctcggtagaatctttttaaatgagatttttattaattagaatcacacaccttattcgcttggtcattctattaatgtatgaacctgctttcatgtatatggttttgtattgcatatagtaatatatgttagatgtgctagaaagtttccacatgtatcatactaaagattcaccacattcaagtgtatctcttatgccattcatcaaacgttgacagcaacaacatactcacatacataggccataggaacttgatgcggaagcactgcatcagaccactcgacattcccccaaatctcttcattattgcgtctttcaagagcaataatcgcacaccaaatcatcctattctgattgccacaaccagtaaacttgtcccaaaaaagtgccattttcccaccataatctgccaacctaacattggcataacgagcaaacctaggtagtgttttcaaaccattcaaagttctccaggatcttaccttagtgtcataccatttgatattttcattgtgataataatagtaaatcacgttctctatcacacaagatgaagaccatttcagacccaaattcatctctgatcctaaactatcccatctaccatcattggggttgtaagccacacccttatacccaccacaactgtgtagctttccatcaaccactacgttatcagtttgatcaccacagccatgaaacgtcaacctacctgcacggctcaacacaggctccgaagtttcggtttatagatcgaaaacctccatccagtttgatggattgtagtgtttataacagcctcctgttacgtatatctttccatcaagtaaactggctgatgggtactcccgctccacctgcatgcttggaccttcgagccacgtgtgagaccagcagtctaggattgagacactagatgactgggattgggagatggatccgccaatgttatagatattagaaccaaccgccacgagacttgacctgtgcaaaggaggagaatgtggaattggtattgttgccaaaacatacccacttgacttcctagtgtcactggctaggataggtctccgacaaagcttgaaccagctagggatacggtcagcacgagaggacagtaagcacacataaagacaattctcggtaagacctactagtgaccgggtctggtaaagctccggtaaagtaaggaccgagctgaaacgcttggagactaaggagagaattggataatccaacctcgagacacgggctaagatgttcactaacaaatcatttggaagtgaaaaaatcaattctgttggcaccttattcttcttcattggtggctcaaaaactttagggttttgaattgaactttcccaagttacctttcttccacgaaaagttgtacaaatatcgattgatgggccgaatcaaatgattaaaccttaatggtccctaagggcccatcttgagaaaaacaaagggtgaaaaagacatttcacagaaaaggcaataataatcacatccacaaacaaaaaagttcctgcaactaaaaaagcaaaggagccaaaagtggaataacgtgtggatcttcttcttcctcctccaacatgttcctcctaatctcaccttcactgttcactctctactctccacttctctcgcttttgtcccaaagtagctatcttcaacaagattcatgtctcttatgatcagatcctcttacgtttctcacatcactctcttccaacctagaaactcaaaaccatcctctttcaccaaccaaatctccttcctttcctcttctaataacaacccttttctcaatttggtctataaacgaaacctaacaatgcaatctgtttcgaaaatgactgttaagagctcgttgattgatcccgacggtggtgaattggtggaattgattgtaccggaaactgagattggagtgaagaaagctgaatcagagacgatgcctaaagtgaagctgaatcagattgatcttgagtgggttcatgtgattagtgaaggttgggctagtcctttaaaagggttcatgagagaagatgagtatttgcaaagtttgcattttaattctcttaggttaaaaaatgggacttttgtgaacatgtctcttcctattgttcttgctattgatgatgatactaaggaacagatcggatcatctgagaatgttgctcttgtttgccctcaaggagatatcattggttctctccgaaggtatatgtgtataaaaatttgaactttgttaggtgctttatatgtaatgttgttgatttgtgtagtctttgtttgtaatttgtagtgtggagatttacaaacacaataaggaagaaaggatagctagaacttggggaactacttctccaggattgccttatgtggaagaatatattactccatctggaaactggctgattggtggtgatttagaagtttttgaaccgattaagtataacgatgggcttgatcattacaggctctctcctaaacagcttagggaagagtttgataatcgtcaagcagatgctgtttttgcgtttcagttaaggaatcctgtgcacaatggacatgctctgttgatgaatgatacacggaaaaggcttttggaaatggggtacaagaaccctgttctcttgcttcatcctttaggaggtttcactaaagctgatgatgttcctcttgatgttagaatggaacaacatagcaaggtgcatatttgctgttgtttccgagttcgttttcctcataaagaatttgttgtaaagagagattatgatttgatttgcttatgatgtgtaggttctagaagatggagttcttgacccgaagactactattgtctcgatctttccgtcaccgatgcactatgctggtccaactgaagttcaatggcacgccaaggcaaggattaacgctggtgctaatttctacattgtaggtcgtgatcctgcaggaatgggccaccctactgagaagagagatctatatgatcctgatcatggaaagagagtcttaagcatggcccctggacttgagaaactcaatattcttccatttagggtaacacaaatcgattctgactgcaaaaccaaagtttcttgattatttgattatcggaatatgctgcttcaattcccaatcatgtgttctttgtatctttcaggttgcagcttacgatacaatcgagaagaagatggcgtttttcgatccttctcgtgcaaaagagtttcttttcatttctggaacaaaggtaagagacagttttgagacttaagattcttattgaaggctccaagtttcgaggttctgcttatgtgcgattacacctgagtttttattcggtgttttttgttgtgcttacagatgcgaacttatgcaagaacaggggagaatcctccagatggatttatgtgtccgagtggatggaatgttcttgtcaaatactatgagagcttgcaagagagcgaagcaaaacaacaagccgttgtttcagcctaaagaatccagttgcatctctttcagaattgaaactccttagtgatctatatgaggcttttgtttcacctttcattgttttgtttaaattactacccttggatccatgtttttgtctcatggaaaaaactcagatgtttcgaaactctgaaaccaaataatgttctgattgacgagagaagtttgttaataatgtcaggtacactattcaaatctttttaccatacatccaaaatcatgattcaacaacacaatactcaaatcattgcttctgagaagttacaaaggctacagaatcattgaatcgtcatattttattacttattgatgtatccatatatagtgtgcaaatgaaaaagaaaagaaatgggttttgaaacaaaagtcaaataaatttcacccatgttgcttgttttcatgagaaactcaaaaacataccacaaaagaaaacagagtaaaatataccaaaacattacaaggactgtagccgataagagagagagatactctggatttcactcggctctagactgaccagctcgagaagagaggatgataccaacaatgagaccgtacagggcaagtgcttcagcaaagatgagaatcagaatcattcccacaaacaacttaggttgttgtgcattcgctctgcaacacaaaaacacacaccagaattacaaacacataacacctttcaaaactcgagttccatacaaaaacttacaacaatatcaggagctgcgactatcatataatcgtaatctcacatacagcaacaacaactaacaccaaagtaagagactttaacatagcaaatcaacaacggtatgaaaagaactaagctcgcacatataaagctctgatgatttagaatcaatcatcagttaaacttcatcacatgatcataacaatttgaatcaaagtatgaacaaagaaccgatattttacacagaatcaaaccaagcctaagatattttctgaaaagtttccaacgtattcgaccaattgaattaggttatacatcatatagagaaatttaatcgagaattacctaacaccggcatcgccgacaattccaatagccataccggcggagagaccagcgagaccacaagcaagaccggaagagagatgagcatagccatcgaatagatagtaagacttggccttagggttgattccggtactgatgataacagcaatgatcaaaccataaatacctaaaactccagccataacaacaggaacaatcgatttcatcacaagctctggtctcatcacacccatcgacgctacaccaaccccgctcttcgctgtcccgtacgctgctcccatacctgaaacataatccgatcgaatcggatcagatcagatttggatcaaaatcaattctgggaaaaaaagagataagagatcgggggaatggagaaatcagatggtacaggagaaaacgagagcggcggcagcgccaaggaatccgaagaaaggagcagtttcatcgccgctgaaagttgaagccatggctcgtcgtcgttgagatctgatcgggaatgagacaaaaactgttggcagattttgtgagagaaaccaatttttttgtcaatgatatgattttgattgattagtaattgccggccatgagtcggcgcgtgaatctaaaccgggcttaaaattagctaacccaatctcaatcgaaccggaccaaattagaatgaaatggttttagtgagttacatggttcttaatttgactggatgaaattaattaaaggcactatatagatgaaactaaaactacaagaacattgctctaacttttacacaactttaaaaaaaaaaaaaaaaaaaatcgtggaatgttgattcatttgacctttattctggattgaaagtgatgcaaaaatgactttatctaataaataaaaaaaagaagactttatctgatgtagtgaaattcttgtatttgttgatgcaatgatgctatggattgttttcaaatgtttcaattacgtatcaaattattttatttgtaccaacacatgcaagtatgcaaccatggcctcgtcgtaaagaactttgggcaacatacaaatttgggcaaacatctataacacattggatttttttgatcgatttaatttgattcttggaattactattaccttcttcttttaaaaattcagtaagatatgtgttaccgtgtgaaagtctatatgtgtgggaacgaaaggtttgaagacgagtaagaaagtagaagagcacaatgcgaaactttattggtatacgtaactgtttattgacgacatttgtaggaacaaaaattgcaagataacacattttttagtgtttgctttgcttgtttatagtaaccggtaggcagtggcggaggcagaataattagatacaggggtcactctttttgtaagccaaataccaaaaaaaaaaaattaagaaaaatgataatatcctcataaatgataatttcaaaaaaaaatatatatatgagaaagaaaaaaactgttctagtaaagtaaacattaaatctaaagtaatttatactgtgttaaacaataataatgagattaacttagtttaatagacttatttttttatttataaaattaattgggttaatttgttgtaggtttaatattttttgttagactatatttgaatatatattgatgggggtcaataatattttgggaaagggtcaatttataaaaattaacaaaacctaaagtaattttctaaaatccataggggtcaattgacccccatgattatacactccctccgccactgccggtagggtttgatgtcttggattgttaagttttaaagttttgtctcatgatctatgtaagtgcttaagccggcgctagcataaattgaacctttaatcagaatgtagtagttgacctggatggatgacacttttatgcgagatgggtcgagcgacgctaaccattaggccctcgatcggcagtcggcagatataacttagatacagtggatagtgacatatcctcttaataaatatgttttaaatgttagattaacttatgacctaaagaaaagaagttagattaacattttttagaaattattatttcggataggtttaataagcataagtcagcgaaacttataaggtatttatttacaattataaaatcaacagcttccaaacaaaatcttttttctttttgacttcttaaaacaaaatctcatactaaccgatttaacattatgtttgtgaataatatggtaacgcgaatgattagcaacataaaaaacaaagagtcaactaaccgcattcatgaatggaatggaatgtcacggtcaatcattagatttggtgttacggaatacatatttattaaatgtatatgaagaaaaaagcatggccaataataatgtaaataaattggctcaacatgcgatgtatgtacataatttagagtggaaaatgaaaagatatatacaatgtgtattaatatagatgtacgcagttgtataaaattgatggacatgatttaggtttttttttaaaaaattgatggacatttttcaaatatcaaaatgtttaatttatattttctacatataattgaaattaaacaaaggagatataagttctacataattttactttgtatcgttggaacaaacacgtacagtagtattattttatatatgtgcatgtatgttttgcgttcctttaaaaatcaaatacatgggaagataacatgcaacgaaccagatgatacagcgcctgatgagaggtcaaaaacgtaacgagtttgacttgtataatattaatatgtagttgcatgtttgatgttgacacagcatcgccatcattaattcgttctctgcagtctaccgaactaattaatctcaaataatcgatgagtacatatatgttaagtccgtcgaggctaatgtataattcaataatataaatatgttcattcgaggatatagttcatattattatatatctgtttaaaattattgactccaatcatcctataaactaagagggttgacaccgcagcaaagaaaaaaataaaatataccataattcatatatttgcacaatctgaattataatggaaattaagtttgctcaaacaaaaaaaaagggttggctccatatacgaaattgttaatttgtaattttgtaggacttctaattaaaaaaatatatatcaataaatgattattttatatatgtcaattatatctgatcattaattaattaattgtttcgaaaataattaattaattttgaaatttaaattaaagcaatattaaatgtaaaaattttaaattatattaaactagaaatttattgtgagcatttttgtgtatagatcaagatatgatgaatcttgtgggattttttttattctataacaggtgttgtttcatatgctacgcatttttatatatttaaccaaacataatgacaagttgacaacgactagtatttcttcccatttagatgataagattagtccaaatactccaaaccgtctgttggattaagaatgaccggaatacgattactccaaaacgcatatgggtttactggtcgagaatatacctttggattaagatcatgtagagttatttcattacgattttgatttcttttggttattgtgaatatgttttttactttcttttttctgttagagatcatttgtgaatatgttaagtggtaagtgtacaatttttcatattttgaatcgagtatcataaatatcattgtacacataccagtttatttatttcgtcctgatattaacaagtaacaacgtcaattttgagatcaattatttgaaaatatagaaaactgaaagtattaaccaatttagtttgattctaattagagtcatcgtattgtgctagtaatcggtgacgggaaccacataaaacgacagtttatcaacataaaaaaaaatcacaaacacatagaagactctagttttgttataaacttgtgctaaataattaacacgatacataatactcttcattattatatatacttttcatgtataataatgcatggacattacacaaatggaatgaatagtacaattgtatgtgcatgaatgtttttctaaaaactgacatccgtttgtatgctattttatccttgtttgttatttaatagtagaaaacttgcgaggaccaaaataattagcatgcaaagaaccagaagaaatcgtgagaactaaaacgtaaagaactcttgtgacttgtataatatatagtttgtatgcatgtttgatgttgacacaacatatctccatcattaattcgtcccttgcagtctctcaaacttattaatctcaaataatcgatgtttatagattaagtccctcgagactaataatgtaaatccaatgatacaatgtggttccttcgacgacgaatcatattctgatttctgtatatctgtaatataaagtacgattattattatatttgaatacaatcatacttaataaaatattgtgtcatatatatttatctccataaatgtttctcttgactgaaatgtgaatacccaaacataaaaacatatacagtaaatactttgttcaattcccattaaatttctctttgaatctaaaatcagacatagaaatactgttgtttagagaaagattttgaatatatagaacattaaatcgccgcagaactttgttgtttagagaaagattttaaatatgataagaactcaactaaagaaaaagaaaaaaaattatgacgtctcaatttagagttttattggttcttttgtacagttctgtaatgttaggaatcgttttatacacaaaggtaacttaaatctttcaaacgtctacggtagtggacggtcattaaaatcagagttaagaaaacgaacaaaccaaatttaatcatatcttatacactcgagaccttgattatatattactcttttatatattaacagaactagaaataaaaactatacattattagaatatcgtaacgtatactaatatcccatcgaccagtatataaacgacacaagtcacagtacattctcatcacataccacaaaatatctcataaagatcaaataaacactaaacctgaaagcaaaaaaatggcagcacgagcaacattcatattctatgctctcttcctaaccacactccaattccttctaacacaccatgtgtcatccgccgcccgaggattatggaaatacatcgcccccaacgtcggaatctccgcgatgcatatgcaacttctccataacgaccgtgtcgtaatgtacgaccgaaccaacttcggaccatcaaacatctctctacctaacggtaactgccgtgacaacccccaagacgccgtctccaaaatcgactgcacagctcactcgatcgaatacgacgtcgcaacgaacaccatccgacctttaacggtacaatccaacacatggtgctcatccggttcggttcgaccggacggtgttcttgtccaaaccggtggagaccgagacggagaacttaagacaagaaccttttctccttgtaataacaatcaatgtgattgggtcgaaatgaacaacggtttaaaaaagagaagatggtacgcttccaaccatattcttcccgacggtaaacaaatcgtcatgggaggtcaaggacaattcaactacgagttctttcccaaaacgacaaaccctaacgtagtcgcgttaccgtttttggccgagactcatgatcaaggacaagagaataatctttatccttttgtgtttatgaataccgatgggaatctatttatgttcgctaataacagagcgatattactcgactatgttaagaacacggtggtgaaaacttttccggcgattcccggtggtgatccgagaaactatccgagcactggctcagccgtgttattaccgttaaagaatcttgaagcggataatgtcgagacggaggttctagtgtgtggaggtgcaccaaaaggatcatacaacctcgctagaaagaaaactttcgtgaaagcgcttgacacgtgtgcaaggatcaagattaacgatgccaaacctgaatgggcggttgagaagatgccacatgctagagttatgggagatatgattcctttgccaaacggagatgttttgctaatcaacggtggatcttttggtactgctgcatgggagcttggtcgtacaccggttttagcaccagacctataccatcccgagaatccggttggctctaggtttgaatcgctaaggccgactacaatcccgagaatgtatcactccgcggctattcttctacgtgacggtagggttttagtcggaggaagcaatcctcatgcgttttataactacaccggagtgcttttcccgacggagttgagcttagaagctttctctccggtttacctacaacgggagttttcgaatcttcgtcccaagattatatctcctgaacctcagtcgatgattaaatatgggacgaatttgaagttgaaattttcggtcaccggagaagttacgactccggcgaaagtgactatggtatttccgacgttcacgacgcatagcttcgcgatgaatcagagggttttggttttggacaatgttaagtttacgaggaaaggcaaatcgccgatgtatgaggttcaagtgaggactccgaggtcggcgaatattgcatggcctggttattatatgatttttgtggtgaatcaagacataccaagcgaaggtgtttgggtaaagttagaatgattcattgacttttatttaatatctttatttttgtgtgtaattgtgttatattactgatatcaattgtatatgaatgtaataagaatatgtcttctcaacttgatgataataaattaattaactactctttttctatgtcgatcggttgatcattgataatttgctgtattaagaaaatgcaagactaatgcatgaaggagaccaatcaaggaagtaagcctacgaaaaattacaaaaattaattcatgatttaaaataacaaaaaatattaacttatgtttttgattaaattttatttcatgaattaattaaatgaaacatggtctttatttattatatacaacgacaaagaacgacataagatagaaagcgatttggtactgcttgcatgattaaataaagaggttagctaattaactctttagtgtcaacttggattctaatcatgaagttgattgatactcaaatttgtaaaagtttacaaaagtcgaataatattattcttccttctccagatctgatggtatatattaaggagtactatgtttgtatttggtacgtttattataagggttaatttgcaaactagtcacttttttaaacttcattggaaaagtagtcactttactattcataatttgcaaaatagtcacttttcactgtttgatacttttcactgtttgatacgtacacttagattgtacaccacttttaatgtacaaatatatataaaaatacacagcgtacactttacatttgtataagaaaagtgatgtacaatccaagtgtacgaatcaaacagtgaaaagtgactattttgcaaattatgaatagtaaagtgactactttcctaattaagtttgaaaaagtgactattttgtcaacacacccttattataatttggtacgtttttcttattcttctctggtgcatatcattgtagttgaatgtaaattattttattggcaaaatttagactggtgttcctagcaaaacaaacatgaacgcatgtaacaaatatatgaaatactacatttcacttaacattcacgaaacagattattttacaaacaagacacaaagagatcctaataaataccaaagaaagaaaataaacacacggaagggttttatcagagtaggaatcagaaacctatatacacgattctatctcacccatcaaagaacaaaacgaaaacactaaaaatacataaaatacaaattcacagaaccatcatgatgattcaagcacgttccccacgaatgcgtctggccaactgaatgtccttggacatgatcgtaacccttttggcgtgaatcgcacacaaattcgtgtcttcgaacaaccccaccaagtatgcttcggctgcctcttgaagtgcgagcaccgcatggctttggaaccttaaatccacctatgtaaaatcgaaatcacttaatatctttctccaaattaaacgaactccagtgatcacaacaacaagtaaaatatcacacgaaatcactaaaactagtaaacgaacttgatcgagagaagttagaataaaccttaaaatcttgggcgatttcacgaacaagtcgttggaaaggcaatttgcggatcaacaagtcggtactcttctggtatttgcggatctcactgttatcctccacatcaacaagacagcaaccatttttgagaacatgagagaaaagattattcgggtaaaaaaacagaaagagaaaagagaatctgaccgaagagcgacggttccaggacggaaacggtgagccctcttgactccaccacggtacggtcgtctagttttcctcgccgcctgataaaaacagaatcgtaaaccttagaaacccattctcaaaatattcaacaacgtaacataatcttaatatcactgatacaaaagttagaaaatcaaagatatataaagaaccttggtagcgagttccttccttggaccttttccaccagtagatttcctcgcagtttgcttcgtacgtgccatttcttcgagagaacgatgatgatgatgataaccgtcaataacttgcgacagtttcttttgtttgcgagagtaatgggtacaatgtactagagatttcacttatatagtgtctctcatgttatagcggttttttaattattcaaaagacggttatttggttttggtattcaattttggaatttttgaaatagaaggctgacgtggagatcctcaaagtcaattttaattggttgactaatgcgttggatagatgacgtggttactaatgggtttttgtctcgctctgggccagtgggcctaatatatccatagggtttatcaaattttctcaggtgaattttgtaaaatgataaaaggcctaaaatgtaatattcttgccttaattaggaattaaaactggtcaactctatagtatattggtttattaatttctctattgttttccatacttgtctttttcagtttgaatataacattttctatctcaatctcctgaatttttgcatttatattatgagtaaaatattttatttatttatgcaatgtttattattttttcatgtataaaaacatcaaaaactatttctattcactaacatatagtaaaacaataaactgacaaacaatttcactttaacacattagcaaaaaaaagaaaaaaagaaaacagggagagaaaaatatcttttaattcattttcttaggaagacaaactttgtattttaataacaacaagaaaaaaacacattaagctaaaacaaatttccacgagtgcacaaaacaaaagatagtgacaaaaaaagtagagacaaaacgttacacaaaaaaaaagcaaaagacccaatgaagagccgaagaaattaaaataaaagaaatatgtatattcttggtaatagagaaaatccccaaatctcttcaattaatccctctttttatattttcctctcactttatctctctctcttttttttacttctttcgtagtttttctctgtactattttgttttgtgtttagggtttctgaatttggttttctcccttttcttcaatcaatctttgtcgtctcttccgatctgctcaatcacactactagccgttgttttcccgccactttctagcttcaacacgattcgccgcgtatccgaattcctataatcgtctttggatctgctttttgaaatttgaaattttgaaagtttttggtcggagaagtaatggcggaagcgatgaattcgtcggagaagaaagatgagagctcggaggagaagggaggtgagcttttgttctgtggtgctacggcttgggatatcattggaaaacgaaaaggtgcgatggaaggtaacttggtctctcctactcggctaaggccactcgtcggcgttaacattcgattcgtcgccactggttgcggtaactctcgctaatctctctgtgagtatctttgataatggaggatttaaatactgtttacttacttaacactgtttatcttttatagcttcgtttcattgtgtggcattggacgttgaaggtcgttgttacacttggggacgtaatgaggtatgttttgatttgattacttctatttgtcttctctgaaatggaaactgtgaatgattttggtttatgggaattgtttgatgtttgttcagaaaggtcaattaggtcatggtgatatgattcaacgtgataggccaacagttgtgtcaggactctctaagtgagtttggtggagactgatactaactctttgtttgaacatttacatggctgctaaagctttgaattggttatagttaggcattgagcttctatgtttattgaaggcacaaaattgtgaaagcggcagcaggaaggaaccacacggtagtggttagtgatgatggacagtctcttggttttggctggaataagtatgggcagttgggtttgggttcagccaaaaacggtatgaaatgctttacatacttctgcttgtgtctaactgttctaatggtgtgaaatttgtatcttacaggttttgtttctgtagaagttgaatcgacgcctcttccctgtgttgtgtctgatgaggtcacaaacgttgcctgtggggctgacttcacagtgtggttatcgtctactgaaggagcctctatactgtatggtttcttagtctggtctagtctgttattttgggttttctttcacctttaacgggtctcactttagtaagacttcttgctcaaattcagagtgtttgtttgtttataggactgccggtctcccacagtatggtcaacttggtcatggaactgataatgaggtaacttagttatctgcgcgtagatgtgcaaccaatgcagtcttcaactattatctcttacttgtagttattatcatgattggaggtgtatggagcgtgaattgtttgtgtttatttgaaacttccaaacaagttttgagctcttgtttcttgaattgttatgtaaagtctgctatgcataatttagttactttagtctctctgaattgtacttgatgaatagattaggtaaatatgtctccatcatttactttgaaccaggttacattgtttgtgtattatttcagttcaatatgaaggatagttcagttagactcgcctacgaagctcagccacgtcctaaagccatcgcctctcttgcaggggaaaccattgtcaaagttgcatgtggaacaaatcatactggtagaaaccatatttctttctctctctatcctcaatctttacctttcaggggagctaattactcattctgataattaaaatttctcgtaatcagtggccgtagataagaatggatatgtttacacgtaagtaacttatctgttcaaaattttggttaatttgaactggtccttctatgtgtgttatctctgatgcatcattttttgaaacatatcacaggtggggatttggtggatatggaaggttggtactagctcatgtttaatatttgtaaatggaaactaacttcctcttcctcatgagatgtttggttgccaatttcaggcttggacatagggagcagaaagatgagtgggctccacgccgtattgatgtgtttcagaggaataatgttttgcctcctaatgccattctttctgctggttctgcaaactccgcttgtacagctggcaagtgactttaacctgaactgtctttttgcttcttgtgttagtcttctggtcctatattaaaacgaaatttaacttgtttgggttgtcaggtggtggacagttatatatgtggggaaagataaagaacaatggtgatgattggatgtaccctaaaccgatgatggatttaaggtttgtttaaaacagattccaccgattgatatattgcttttgatttgatgattaatgtaaaattattctttcctcatacagtggttggaacttgcgttggatggattcaggaagcatgcatcattttgttggtgccgacagttcttgcataagttggggtcatgctcagtatggagaacttggttatggccccaacggtcaaaagtatgccacaccataagtaacttttagttttataaccacatacgactatcattataaaccatgcttctttctcgtttcagatcctctgcagcacctaagaaggtggatatgctcgagggaatgcatgtaatggggtgagttctcacttctcaagtgttcgcctcagagaataataattggatgtttttctaaattccctgtgaatgtttttctgtagtgtggcatgcggtttttgccattcaatggtcattgttgacagaacagatatcgctgataggcttgagcaggtaactaaagcaagagagcctttttttattcgagccctcaatagaaagctgaagagatatatttcttcaaggtttggtatctcctcatctgtttccttacactgtttactttgtctgcagctcgaggtctatgacgggaaaggatcattagaaggtacagtatattcgtaataataataatcactacagagtttaaacatttcttgatgtatttgattgttttaagcagagagtgtagaagaagtcaaggaagaaactttggcaccaaagcaacaagcagttaccaaaagaggtgcttctaaaaagaggaaagcatcaaaagcttcctctgattctgaacaagacagtgatgaagataacagcgacaaggagaaggaagttcaaggtagtgacgcagacagtgactacagtgaagatggagaagaggccaatggcaagaaacagagtgctcgtggtagaggacgtggtcgtggagcacgtggacgcggcggccgcaccagtaacggaaaggctccacccgtgaagaccggtggaagaagaggaaggccacgtaagtcttagaactactctgactctaaacctcgatgtggtttctttttaacagtttttgtttcttccttcacacaatgagaggctaaaaatcacttctttttttcttttctattgaacatttgttttaagcataattccctggagaattactatcggcctctgtattttaatgtaaaccacatcgactgatttatttctagtgataacattttcgatattcagaattcagaaattttttcaggaaaagaaagaaggtggtttgtccttgactgatttgtgatgacatgaagcatgtgttatgttgcttttttgtctgaagcatgtgtatttttgtaattattatgtttatgcataagattcataatcctctcctatagttagttacttactgaattaataatgatttatattcagttttgaaattttttgatgtggtgaagttgcaatttctgtcggtgagtgcgatgaaaacagtaaatgagtttgcacgattgataaatttgacttaagatggaagcaattagtgatgcttcttctgatttataatattaatataaccatactttatgtttggtcttgagattaatcatatttggttaaggtcgtgaaaggtttgtttcatcttcacacgcaatctctgagtttatcgctcaaactttctaacattttccacctttggcttttagttgccgactacggcttcgtttgtttgcgtcatcgtctgtatttagtatttgcattaacaaattgcaaaaatatgtatattctaagagcatatgaggcagtggctatatgtgactcaatcacaacgttagaataaaatcattcactatcaatttcgcagagaggtccacagcttttcctttgtaacttttgtcgtaatgctacaaaacaaaacaattacacatgtcgcctacctggcagtactatggataggacacgtggcacaaattgtacaaaagaataggcattgtcaatattacgatgagtagtggttatgactttgatcagtttggtaacagagagataccctacaccttccatttcctctttcgaatccacggcttttcttttttctatcttgggctggcccactatgggcctacaaagcccatctgttccaatatccatttttcttcttcaaatcgaatataaaaagctctagttttctaaaatatggaaattttgtaacctgtaaagacatgaagtagtttacctgccaaattcaggatgaatacgacgaagatgagtaatggaaagaaaagcttaaagaaacaaccatttttttcgttagtcttgatactttttacttacaacacatatcattgtcactattgcttacactgcaacaaaatagatttatcaaacatatttacgtctttagcgaaatgggtttgtgcttgagacaatttaataaataaagttaataaaccccacatataaagaaaaaagctaataaacctcaaagcgatcagagagaaaagaaaaaaaagacatgaagcacatgacagtcacatgcgtcttattatttttataggtgagccaacattatcgactagccataattgaataattccccactaattcataattcattatttcaaccaatccaaccgttattttagtataatcagaaaatacaagtgttaatacggtcgataacatgtagtttatagaatcgttgatgtttcatcatcataagttttacttgttgttgttacatgaacttttttaaccgatgtatatgaattcgaaagcatatacatctatctgaatttgttactttagctatatagtaattaatactcatcggttagtaaaaaaaggaaggaatgaataagaaaatgtgagtcatcacgagagagatctgacagtgacagcgttatttcgcttttaatttggacagaagagaaaggagactggcggattccaaatctcagacttaaccgtattttaatgccttccctttgagttccgctttccccttttgctccattttccaacgacactagttagtactactggtctctctctttgtgtttattttactgatccaataagaagataaaacggtcttcttcttcttcttcttcttcttcttcttgtaagaaccagtcatgggaagatctccagcttcttcttgtctccgtctcatctcttgctccggcggtgatgatacctccgccgatcctaactccaccgccctcgaggttttgacattttctctccctctttgtaatgttctcgcgatcttcaatttctgtttcggatttgtctctgctcgaagtttctattttaagatctgatattagtgtcttgtcggattttggcattacttagtttctaattttgtctaaatcttagggtttttaattgtttggtttggaaattacttagggcttttgttttgtctggtactgtatacgagatctgttaggtttgatggttttgtgtctttaggcctctctattaagaaatgtgaatattttggtggaatcgattttgttttttggatgtagaacaagagctctggggataagcgtggatggagtttcaggaagaaatctgggaaacagcgagggttgattactagtgtagtttctgaaactactcctgcttctaggactagagagactcttgaatctgctctccttaaatctccgtctcctgataataacaatgtttctgaaaaacagcagcagtctttctctgttgatgaaaagaagagtcagttacctgttgttacctatgtggctgagcctgtggatgagaaaaaaacacagtctgttattgaggagaagacggagttgttgtcagtggaggaacagattgaccatagaactgaggtgtcgcctgttattgtggaatcaaaagggactgaaactgaggaagatgatttgattggaactgaattgcaaggaccaagtgctgctgatgcagccaagatagaggaagatgttacttccgaggttgaaatggctagtaaggttgagccggaagaatctgaatccgatgatgtgattatagttagaaaagaaagtgatgaaaaagttgatgagaagctggatgagtctgttatcgttgtcatccaagctgctgttcgtggttttttggtatgttcttctgtctcttcttatatagtaagattatttaggatgtgaagaagctttctttaactctgtgaacttgttaaagatcttaacattttcccaacctgttgctgaggatctgtcttgaaaactattcttactggagtgttgttaaactgcaggcgcgaagagaacttttaaggagcaagaaagttattaaactccaagctgcagttcgtggccacctggttaggagtcaggccatgggatcactgcgttgtgtccaagctattgtcaagatgcaggcgatggttcgtgctcgtcattccacaaaagatggtagccgtgtttcagcaacctcggtaacgtttcgctgaattatgtttcggtatcatcttgtttcccctataaaatctgcggactgaaactgtttcttgtttcaggataagtcggaaccaaatgcagctgcacaaaaacttctagaaaacaagtttgctaagcatgtaagttttcaaacttgtttctagtgcatcactactggctattcaagatatttactgtgacatctaaactcagtttcttgtttatacttattttcttgtatatttggattatagctaatggagtcaactcccaagacaaaacctatcaacattaaatgtgatcctacaaaacctagttctgcttggaactggttggagaggtggatgtctgttccaaaacctgagaagacttctaaagcaaatttgacaacggaagagcaaaatttggaagaaacacagaatgttaaaatatcacctcaagctgactttgtgaattctgactcaacggtagagaacaaaactgaaactgatatgccaagctatgaagcaagtaaggtagaaggtcagaatgtggagctatctgagacagagaaaatgagccaatatgattcaccagaagcatcagcggaggtttattatgactcaatccagtctcagccacttgctgctaaaccagattctttgctcgaagagcctgaatatgtggatggacagattaaacattctttgaagcgtaaggttagcaatccttctttcattgccgcacagtcgaagtttgaggaactaacttcatctactggttcaaacaaagcaatgacgctgtcttctaaagatgatgttttgggtgaagaaggcaaaacagatatagattcaccagacactacaaacactataaaggatcactctttggaagatgttactccagctgagcttagtggatccgagtgtggcaccgaactctctgtaacttcttctcttgacacacttgagaagaagtcagacgctgagggtgcagagcccagggtagaagctaagcttttagaggatgacacttttaaaacagaccaagcagagttgatagaaattgatgttaaagacgcaacgtcaatgggtactgtagaggaccctaaggagaaagttgagaatgctaaggacgaagttgaaatttcagcgacacatcatgaaccggtcattagtacaccagattccaaaaagagacgggctgaagatgaatcagggcctcaagcttacgccttatctgagggagctttaactccgatgacaatcactgaatctcaggcaacaccggcaagccaagcatcttcttcagtgaaagcaagaaagggaaaatccgaaaagagtggttcaagccaaaagaggaaagttagcaagaaaataacatcaagcccgaaacaggaaattggtaccggtgaggctacagaacaagaggaagggaaagaacagaaaagcgggagaagaacttctttcgggtatgatcaagaagcaagagaaagcagcggaggcaagaactctcttcctcggttcatgcagccaacacagtcagcgaaagccaaggttcaagaacataactcaccaagatcaagccctgatcttcaagaaagagatgttgtttcggctaagaagagacattcgttgcctggtgttaccaatgggaaacaagtttctcctagaatccaacggtctgcgtctcaagcacaacagggaacaaagggtaaaaacaatctcctccaaagttttctctgcaatcattcatcgcagttttaaacaactgaacaatgtttgattttggttttacttattacagatagaaaatggcagaggtgaaagtcgacccgattgcgacagaaactgaagaagacaaaaagcttaggagactttcggtgttttcgctaaatttgattattggtatgtttttttcaagacaacaatccttaactctagtttcaaacgaccaaagtgacagaagtgcagaggaagaacgaagagtggaggatagtctctcttgtataggatcgttttttcttctttctttataaaaaaaattgtttgatttttgtgactaaaggattatttgatttggtttggtgttggttttttcggacaaaacctcctcaacttaatatgaagcttgtcgtgaacaatggattatgacttcacttttaaaagtcgtgtaataattaatatctttggttattgttacttttctaccaaaaaattctccttgtggtgtacaattcttcgaacggctcagaaatagaacatggtctacaaaaaaacaagttcgtgggattgttggatgataactaatgagtcaacgaaactggctgctattgactttgttttccaatcagaaatcaaaactttctttaggggtcgttatagaaatagactaaagtaatggattatctgggaaaatatagaaacatgaagggggtacggctgtgaagacacgtgtatataggagaaggaaagaaaaaatctgaggacagataaaatgacgatggtgaccataagaagaagaacccagaggatctagggcttcacaatcgattccttctctctatctcgacggatttagcttgcagatgtttcgtctcctctctggattcattaattcatcatcttctcttcttaaattctctatcttttcctgacaaagttagggtttttcgataactcgggatgagaataattggttcaatctaaagagctggctttgataaattattgagatttaaaagggtaattggaccttcctgaatcaattttcctggaaaaagaattgatttttagattgaaaaagaagtgagagtttctgtaactatgagggcattgcacaaaagggtatcgtggccaccagattttaaactttgtcaggtaaaatgacattgtagttcattagattgaagctttcctggaatatgattgatgtttgttttagtaccatttctatatcttccttaaattggctgattgcaaatgatataatgactgaaactttaggacaatgtcttagtgttgttgaattttttatgctctctatgattgattagtttttgtattctataatgtccgtttagttgtttgatatattcagttatcttgctttgtcatgatttgaggactatgagactttgattgtttactgtttatcatgctctgtttttgaatttatatttacttgcaactttactagttattgggaatccgtgtggaaccatggtgacaaacctgccaatcagttgtctcgagctcttggacttgcttgatatttttttgcatcatagtctaaaattgtttgcccatttttggttctttggataaggggctaatcctgagatacatccagttttatcatggaatggtcagccttaaaccccttactcatgagatcaatgtagtcaagtagtcagtggtgatgcaagagaacgcaccaagaacaatgagtgatgtccagagggttttggctatctccaacaaagtattcgacatggtgaaaccttatacatttacacactcttgaatgctgacattgcaaccattttgctgatggaaaatgctttggtaagatagcttggagatggttcattgtccagctaagttgcttatttggaagggagtggaggaggaggatggtacagagaggagaggaatgtcaccattttcatttgaaaaagtagttgattagttaggctgttctggagtatgaggtcattgtcttatacgttaccacattgattgtttctttctttagttaagctttttcaagcaaccaggattcttgtaatacgttaatgctgacaagcccttgtttactttctttggactgtatgtttgagataactgggccaatggtaaatgttcatgtttgctgtatattcatattttgtgtgtagtgattcctgactcttaactagcgtatttgatcaagatctctaaggattttgtttacatgtcaactgataatgtgtttctcatgttgaacaggtacggctattcatatcagaggattcaccttcacaagttggatcagagtctcaagatcacctgcaagcaaagtcaccattggcttcacatccaagtgatgataatctgccacctggttttggtggacccttttctgcgaatgagtcccagattaagttatcagatatcccactaataaagtggaaatgctccgtccaggtgagttctcgggtcgcactccttaagcctttttagttagaatcatcaactttttaaagtactaattacaattcccccaaaatgccaagatatttacagttatagtttacatatatacatatgttttcctctagtcctttaagttggataagggtatgggtcacatttggtaaatatggtggtaaggtgctcttggttgggttacccatgtaggattgtatttcctgttaatctagttgaggatgttcaacccttacgatagtggcactaatactgtagataacatgtgcttttgcagattctgctagatcgggaatggaaagtggttgcaggggacgaaagcaaagaagtggaggcccaaaatgagagggaattgagagttcttgaagcattttatcctggcgcatcatctattcctccaaagtccgtatctaacccctacatattcttccaacacacatttgcatacccttttacttttttttttgacttgggccttttcttaaactccaatctgcagcccttcggttccagctgatgttgaggactcacatcatgatgatcagcaaaccattgtcatacccatcctacctgtagaagatgatgacatagcgatggattcagcatctgatttcccaacccaatctggcgtggatgtgggaacagagccatcaataaccgatgagaacacatcaacttcttcaaccctccctgcagggccagatataatggctgcgttatctgcaatctcaaacagcaaagaacaaggcagtatgatcgaccaagatctgcttattaaaatcctaagcaaccctaagttggtcgagaatcttgttgcaaatcgtggcagtgcaggttcagtctcctccaacacaagtagcctctactcatcttcaacacatgaagccaacggagtagtaaccacggcacctatttcctcaaatggacaattttacgctcagccacccataactcatattcctcccatggcgtatactcctcacgctcctcaagaccaaccgaactatggagcaccgccagcaagagatgctagttattacaagaacctgattcagcaacatggcggggatagacaagagacgccgccagttcaacatctcggttatcgatacaacctccaacctggaggaggacctaacccggagatggtaaatagcagtaataataaccagaggccaagggattcaaaacccaagataatgaaggcttgcatgtacttcaacagcgcaaggggttgtcgccatggagctaattgtatgtaccagcacgatgctacaccctaccagccgaggaatctaaacaatggtaatatcaacacttctgatatgcagaatgcaaaaagaatgagatttgacagagactgatgcagaattagcataccacacatgctctctgcctcttgctgttagcagcagagcaatttttctattttctcttgcctggctttactgcaatataagttttatatacatttgaaattatttcttggttttatgccacaaatgtagaattaattagcgagtattatttggctcaccatcacagtagtacttatactatccctagtgtttttaagatgattttctacacttttatctttaacattgtgcagaaaaaagagtaaaataatcacaagatttctaagactgtctcaactactgattcattcatcactctactacataatatgaatatagtttcaggtctcaaatcggaacaacacatcaaatgcttacaacaagatggtttctcctctaccagttggagaaaagaacatttcttactctcttttttttcttacaaatcagcatgagatcatttttatattgttacatttatgaaacagaagtcttaagatcgttaatgcctgcgctgttcaaaagcttcatcccttcttcactcatctgctggacctcagttggcgacaatatccttatgcaccttacgcatcccacaaactctctgcaccagtttatgtagttatgtaaggaaaactattgtaagactgatagtcagatgaagttaatggattcacagaacagtgagagagagacttactcccatggatcatctcctacaagcagaacatcactctcataatcaacatatacaagcttccaacccgagctttgtgggtgagttagtagtccttccaatccaaacatgcattcgatagcagattttagctcctcgtagtctttaaagcttgtgacatcaattgatctcccgactgacccggttttttgaacctgccaagtcaaaacattacccaaaccccaaagtttcatgtcagattgtgacacaagaaatttgtggaatgaatgagagataatctttttaccttagtgtaggttcggacgcggggtgtcgcaattttctgccatgatgagcctttactattttgccgcagactacaatcatcaaaatcaacattgcttgaagatgtaccagtgcctccagaattatctggaaaatcttggcgagagaaggcctgtgagtctgcaaagctagctgatgtgatctgcgactggacatcttgagcaaagctagtgttgttgtttccaaccaaacaaccagaagggtggttctggaaatcagtgtctttgatggcacagaagtcatcaaggactgtgtttgagagtggaggatctagaatgttactggttgtgctattactcatacagatattctgactagcataaaggtcctgctgcatcaagggactgaactggtcaaacttgagaccgttcaactgagtgtcccacacatcatgaaacagcggtgagtttgtggaatccggtaacacaacagctgaagaatcctgggaggatagaatgaatggttgcttgtatgatccggcaagagactggaaggaagagacttgtgatgtcagctcatcagtttccaggaaagagaatccatttattggatcagactgtggttggtaaatctgatgagtaatgtcaagacattgatcagcttgtacaggcgacgaagcacccggtttctgaagtagctgattaaccttttcctcattacacactgtggatgtagtaacctggcttgcctgttccattgactgctcaagtccatgttggactctaccagagctgcaaccagagagtgtagagttctcaggtttagcaggagcactcatactctgtgaaagattctgttcttggccactcgtattagaagcagatgggttcactgttagcttgttttgtggctgcaccatctcagatttctggttcatcatcaggggttgctgcatcttcatatctcctagcaaacctccattccccattacaatattctgctgcatctcagacatgaaagatggtacattttggttgttgtgaggcctcatcatcattttcataagctgctccgaagccatactagggaaagatgcatatggcataatcccattcgcggaatcaggaacacgtataagtggccgttttatcaagctaccccattcagtttcaccagctgcatatttcataacaaaactttaaggcagcaaatctcatgtaaagttcacaacaaggcacacttatattttactcaccaaagtaagatggatggagctgacgtttgagtcctgaggtcagagaaggaaaaatgaagagactttcaggtgtttcgatatcccatggactgacccgagtaggtttatcattacatccaggctcatcccattctacctgaaggttacgccacttagaaccaggccatctcaacggatccaaatcgctgattccaacaatagttcccatgtacctaaatacacaaccaaaacgtgtataagtgaacaaccaaatttgataaacaaaaacagaaagattgcagtttacggataacttaccttcgtttcccggaatcttcagtttcaaacatcattccaaatctcataccaactgagagctgagacccgcatatcgccttacggtacttagctagagggatcacgaactctgctggacaagctctgagaacaaacaccataagttacgttacaactaagaaaatagttttatatcattgaggattgaagaagcttttgagctaaccttggattatagaatatcaaaaaaggagtacggttggcggttgcgtgagcagcagcagcaagaacaccgatgtgcatactatccgctgagagaactgatgaaggaagtgctgtttgttggcgattggcacgcctaacaccgaccataagttgtgacttctcatcccttttggcacattttcaaaggacaaatgacagtcagaagataagcaacaccaaaatgagtcagagccaaaatatctcaatagccaaggtttttcacctgatgaacaaaacagaatccccagctctcaatctcttcgatccaacgaacaaactccatcctgtagttaggagatgtctctttggttgccctgagaatgtaagcaggaactgagctcaataccaactcaatctaaacagagaaagagacaaatctagtggttatacctcggtagatatggcgaaatgtccaagtattctcatgaagatctcgaactacaagctcttgcgttggcggctgtgctgagtagtcctgcaatgtatttaacataacattagcaggctagcagcagttaaagcaataggaacatatgaggaaaagagaagctcaccaatggtggaaatagcttctctgcagctctacgtggcactgagaaacctccatgtgtgcttgtgtcacttgcagtaagtgttttgcagaaaaactcagtcgggtgcttacttcctctcagcattccaaagtctggtacagggaacacatctctctcctgatgcacacaaaccattcaaactcattcaacttcaacatgagttcttaaatgaaacaaaaggaagttgcaagaatccaaaacttacagagtgaacaggttgaagactcatctgagcatagatttcgtcactgtctttgtcagcctatcaaaggggaacaaaaccattgtcaagaaatatcaaacttggttgcaatttgtttggatacgaagcaaatgagaaagattggcgtacatgaagagtaacattatggacttgacacatcaactgagatggaaggttcggataattaggaacttgtgttgttgctgatcttctggttgaaacagcaacctaataagtcaaaaagtgaacaaaaaaaatcaaaccttttgaacaggagctaacaagatctagagaagtacaatgtgtttgtttgttctttaagacacacaaagttacctgctcgctatgaccttgtgagaagtaatacactaagctcccaacttgagggagacacaccaaagggcctgcacaagcgtgccatagctccgagtttattaccggctttcttgtacctgaaaaatgttcaaaatcgcatttttaggggaaagtaacaaaatttctaaatgtcattagcataaattatgaaaccttttgttatcacagtttattcttaaaaaggtaacttttttaataaaaatcttgagaaagaagaagatgaaaacctgactggtctttcaacagcttcatctcttcaagcaaggtagattgagatgttgttgttgttatagttcctccaccattaaccaaacaacttgttttcatcttgtcttcaacacaagacaatgaagccatcatacagagagatttttcaatgttctgttttgtctctcccacactcaacactaactaggctttagcaagactcaagagtttttctttttctttactaagtcttcattttattttatttaatacaagaagagacaaaaagagctctattgagcaaagaggctacaagaagataaatccaggacaaaccagaggaattaaagacaaagccatttcatggaatctgtttttttttggttaaagaagactccaaaatcgaaggacaaaacccttacacatgacaaaaacagagtgggagagattaaagaacatacaaaatagggactacacagacaagcatgtctctcttgtggggctcttgcctcttctctttctctctctccactcttcttttctcagaccaaattcgacccttcaatgaagaagagaaaccaaaggtgccatcatgaaaccacacagtttctttctttggttccggatgcaaacaagaacaagaagcaattgagagagagacaaaagcttttaagaaaaaaaaaacttttgctttcttttaattatttctctgaaaaatcccacattttttcttcttctctctctaatgtatatgagtattagtataaatgtgtatgtataggttttattttgcttggaaatgggaaagagtgtgcatgctcttatcctgcgcttaaaactttctgtatatggcgatgccgttgcagctttagactctttaaacgaataatattatattttattgtttcccattaattataaaataaagttttggtatttcaatagatacatctatattattatttaatgttttagaacagtttacgtcaaaaatttaataaagtagagtaagcacacgtaatctctgatacgcacagaaacgtagttgaatgtacaagtactttcaatgcttatgttataaggcagataataaagcttaaaataagtaccatgagtgaatattattttaaaaagtgtcctactttttcaagaactttgtaaaatataaaatgttttttgattatggcaataaattaaaattgattaagaactttatgacaaaggaggaggcttcttttttcgttgcaataatatatacttttctcaaaatgttaatcttttcttgctgagatttcgtaaaagggatgtgagtggtgagactttgggagatctctaatacaaggtgcgtatgataggagagaatgtcaaaatagcgtatattagcacgaagcctaaagaggttacgggaggaagtgtatcttccaatcttttttgcccgggtgttcttttcctttccaagttaaggacttcaaaaatgttttctttctttggttagaaaaagttattttgatatttgcaagatttggtatagagattaaaaaagatttaagtatggtttagttaaaacttaaaagttataaggtggtattgtttatatatacttaagagttaagaccacctccaaataaattgaaaggactgttgtttgtggttcttgcatttgtattgaaattgagctttgtaaaatatatttgtatctacaacaaccaaaagaaaggaatatcttggttctctgcacctgtaaacatagcttgttctgctcattattaatatctaatactctaaaccacatgtgtaattatgtctaattgtgtatagtgtgtaccattacatctttagacctttttagttacatacattttttttttttacgcacacatctctagtttgacctttccattgttttcttgcgacgaaataattgacatgcggtcattgtattatattgtatgatatgaaaccatatcactttccatatcattacttatcaatcatacgtaaataaaaatcgctttccttcatgtaatattactcataaacaaaatacaaatgagcatagttaagttatatataggattagtacacaatccacattatcacatattagagaaaaataatcaaacatattataatttataagtggatatatagtagcatcattatgatagaatatctatataaacataactacttattcggatacgcgtttgtcactaagatatatttgaatcaaaggatctccaatcaagtatataatgtgtggaatttgctgttggcagcacattttaatatacagttcaaatttagcaaggagtgaaacatgcttttgatgataatggaaaaactctcatttccggtgccaagattgtgtgccatcagcaaaatctttggaacaaatagtcattacgtataacgaggaataacatcccacgatgaggtttactagatataattttatcattcttatcaattgttttctcttgtatcgtttttttttttctctactgtatatcatttgtgacaatgccttcaataatcctaaattcataaaaataaaaactcttaccataccaaattttaaccacatgcaaagaaaaggataccaatcaaaatcaagtgtatgcagattatcaatccgaatccttcctaaacgttagtttgtcttatgtagattggaaacttgtaaaaaaacaagaataagaaatgaagaaagaaaaaaagaaagtgaaaagcattatttggtgcttttgcgtctgaaaattttgaccgctaggcacgcgtgaagtggacggcaaatcaatggttgagtaagagaggaagaggaggcgtacattagcatactcgacacgtgtattttaatgttattttgaaaatgatttttggaccgacacggcgccgtttctgcgcttcacagttcacatccttacctacctctctctcctgccaaactaacaaagcaaagaccgattcctattaatcccataagaaaacagtttcattataattttacttactgccactagatttactttcttaaatcatcacaaaaagtatacttccatattggtgtaacataatatagtacaaatcttataaatcgtagtaattgaaaaaaaaacataaaatagtggtggcttttaacagtgacagtggaccaagtaatgtaaaatggagatataacatgtagaataattggaaagaataaaaatgtagtggaacaataagtgattagcaacctaaaaatgtataatacgtagtgaaattttaactaacttttggctaaccaaaaacatttatgttggtttaaaattttacgttaagttgatgaagatactttgaagaaactttttgaaggtaattggtgtcgtacacatgggcaagtgcaacctaatttttggttagaataatgaaagtaataatactgattaacccgggtaagtgtcgattaccgttcaagatgatctgtgcaatagtaatacttagcacgtaatagtatgttatagaacagtgaacgagatattgtaatttacaagtgaaatagaaacgattgaccatatgggatacgaagatcacgaatccgtaataataatacgaaaatcaggtaacgcttggagaaataagtacacgtcacattccaaatttatgaaaattctatttgattctttcgccaagtaacccactccaactataatatcatgccatcttcgtgattatcatattcttaaccgttcaaattcttttctttattttctcattccattttttaaaaaatcacttatatgtgtttgtgaatcttgttattaaaatcgatcaaaaagtaaacaattcaaagaacggatttcgataagaaaaggtcgcaaataactgtttggggtttattaggatttgtgtcctttaaattaattagctttggagtttggactattaaattaagtgcctacctgctattgctaaggcacctttaataacctcattaattaattaataaacaaacgaaataaaaatgtttttattaccaaatagataaaaattaaaaaggttaaattgtctttttgcctcataaaacggagtttgcaataatagccaatccctagaggacacgtgatgttcatcgagaacccttcataacggcatgtgccttcgcgcacgcatctatgtggatcgatgagttttgatccgacggtcaatattcaacgacgtaagaatcgagccgcacgcgctctttcacgtcgttcaacgccttggtaattcacacacgtcctctctctacttccctaggatctctcctgaccgtcgattacgtacacgtgtcattcatgcgaacgattacttttttgcatcacgacgtcgttctaatagtcacggccacgagtcgccacaaaccacccaatgttcatatgctgctctgtgtgattttgatggtccaaatttcatagtagttctaatatattgtactatccagtagtaaaaaaaattaacagtaggattgttgggagcagcatcatacaactgtagaataaaaaattactggtgatagaataattatgccgcatgttttttggcacttgaaattttaaagctgcaaaaaactgttttaggttttacagaagctattgtttcaccagggtgaaattaacgttaataacgtttttacctcacctacttactattcataaatcataacaaaattttaatttaatataaaaatatataaaattgtgatcgttggtatgttctgttcgatccataaatccacaaaatattttggtgtatatgttttactcgatttgttttattcataaattaattaaaaaatgagatatggattattcgagtttatacttgcgcctatattaataaaaaatagattatttacgaagaaaaagacgaaagaataaaaatggaataaaaagatggaccccagaatcataaaagtaaagccaaaataatgggagtgacgggacatctcttacgagctattggtacgtagagagtagaggatacagttatggaccagtgtgtcttattacagaatctattaacattttagattcatgtttagtcaatctatggatcttgacccaccgccaatttttaataataataatctctttaaaaaaaaaaaaaaaatactactactttttctattagctataacaaaaacatagtagattttacattgcaaaaaacggatcctagtttgtgaaatagagtgataaattaactaagctctcaaaccacattcctttcaaagtttcaatctggcattcatattctaaaatgataacgaaattaaaacatgatacacaattatactatgtatcaaaatcaatggttaaccataagtttattagaacaagtatgataaagaaggatcttttagcatgtgtatattatagttctgtatgatttaaaaagtcctgaaaaaagcgatgaagatttttaaaaagaaaataaaagggaccaagaaaggagggcttgtattattacattgagaatgcgtaataatgccatcaggatagaaaaggtaactaaataagtcataataatcagcaggagagactaggaacaatcataacttattatgcacattccatatttccatttacacatacacatacatactcaacacatcgacagatatacacaatcatcatcataacatagtaacatataaaatgtctataatacaaatgccctcttcttcttctttagatattcataaacatcaaatccggttacaatgtataacagtttatgttcgattatcagacgagtggaggcaaaaacgaattaatgatcgtatgttagttgacacatggatgatgagcatgtgaatgtatacaaaatacatttatccgtacgtatacaatatgacgtatacgatcatctatatacgtatgtacgtacaaatgaaagagacaagagagggagagaggcgtggtgtgagggaaacatggaagctgtgggagctttgtagggtttgaagccgacattttttaatgcatttttttttcaatcgagatatgtaaaaaggagggtccttttttcttttgtctgttctgttacttttattccttcttcttcttcttcttcattattgtaattttctttaaaagcaacaatattccttatcatcataggttaatatatggataatgtcgatacgaataatgagactccaagttaaagtatattacatttgaacaatcttaggatttaatatgagaattttaactatcatatagcaatttgaatttatcgtaaactaaatctgtcacaatggttcaattcttgtatcgttttaatgttaaacattgtggagatacttttggtctaatagttggccaaatgattaaaaggctaccctccaagtaataaaattcaagttcaggagaatagacacacagagatatacattatatatatgtatgtcaatatgatggatgttgaatatctgtccactatgattaatagattattatactcaatcatatgggagggtagtagatatatttaattacgtgaataatggtatattaaactttattatttgtttcataaaacttgatgtttcgatagtttttaatgcaaaacatctgcatattattactaaatacacaaatgttttgtttcatacagaatatttttcagagttttattaaaaaatatctttccaacaataaaagtgatatattttcgtataaattcatccaatgtccatcactaaactcaaattgtctgtatactcaacaataaaatctgatggattgtaaatttcacggtatgctttgggtaattagaggctattattggatacatggttagatccggttaacaccggttattgaggtgttggtttaatgttagttattgtgttgtttatataagtttaagatcacattagatcattgattaagttgtaacaaacacttttcagctgttaataagaagtcgttatatctccgttcttcttctccgttacaccggaacttcaccggtgttaatagctattacttaaaacagacagaaacacacatgtaaagaaatcataatcataataatagtaataagtgtacaagatgcattttttgtctgtggtttgagtaaagtaagctagtggtgtgaggggtgaattagttgcaagaaataggcatttttgtagaaattattggtaggctaatttatgtttcttgaccacattattgagtattttagtcaaaatcaaaatcctcaaagatctgtccgattctctttatttccatgcttttactaattataaaacctatatttcattatttcctatgtccactaactattgtcttttcagtttctacattaagcaattacgtagagtcgtaaacttctaaattactagacctagatttggcagtaaaaaacaaaactataggacgtccttcaatgattttgtttgtattaatttttaaaaaaaaaatcttcttggtttaggctatagtatttatttacggtctctaataacttgactgataaaaaagcaaataaaggactggaccaaaaggtaagcccatttatctgttgatggacttaatatacactactagactcatttaaagcccataaagctattatctcttctcttccaattcgttattttcttatcatttttggttctaaagttttcattttcttttctcttgattaaaataattgtttatttccatttttttgtctaaagaaaccttaatattatgccctaagagcaaatctaaatgaatttttcgtttttggggttgtaattaggactcccgtgaagaatgtcacaatgctaattaaattaaatttccgttttttgtattgatgttagtttggaaagcataattgaaacctctaaagatgttcttttataattattagcttatgatgcggagtccataattaagcctcacacaatgttacactaacaactgaaaatatgaaaaagcttcacataaatatcgcttattaagccataacgtagttaagaatctgtaagttcaaaatatttagcctttttttagtgcgtggttcagttacattttcatctgaaatcatttgggggaatcagagatagtaagatacaatgtgatatacttttttaaaataaaaaataaaagtttagaaactttttggtataagtaatctttgtaatagtttattagccagttttgtctcgtgtgtttaacaattctgacatctaacgtgtctatctctttatgcatgttatggcgccggatttagaagatcttttacgcagacatatttgatatgatatgatattaaaattaagactttcgaggtttttttatatgatatcaagattaatctggaagatcttaacattttctaatggtttttttgaatttgcttataacggtatggaatacgaatatatggttagtgagaagtgggtattctcttctattcattgcctaaaatgattcctcaaagaagatctattgacaatgacaaatttatcatcatttgataatctaactctcgcttgagtattctacaagggaaacaaatatatttcaaatctgaaatcaaggaaatagtattgcatggagagacatgtaaaaagatttatttgattacatatatcttgaaacgtgtttgaggtagaacaatttaaagatatgcgacacactgatattagaagctaagtgattttcagtacatgagaacaaatcacggggatacgtaagactagtcaaacgcatgactaattgggctaacaagcttcctataatcgatcggctgaccaaattttgattcatatatttactttgtgccctatattcaaatcatattttgattaagggagaagttgaagagagaagggagggaataaggattagttaatatagttggtgccaaatgccaaaagaaaacttcaacagtcaatcattactaatcattatgatacaatgattgggttaagacttaaaaaccaacatgattaacaagattttaatcaccccctcatacatatacaactttgacttctcatgcacagcatacaaacacagagtaccaaccaaaaatgttagaaaacatatctgtaaatgtgatttggttgtgaaattagattctcatgatttgctcgcccaaattgattcatcattaaaactttccctttgcgatacaaggatatcaaatggggatttctgattctatcttgtttagatcacattcgtacgtacttatgtcaaatcattaatctggtatctatatgttagttatatattttatcaaatgactacaatttttggttaaaccatcgcttgatattaggaaacgaccattcgtacaaataatatgcatttgtactttaatcgtaatctatatatgtatgattgatccttccaatatatgttttacattaaacactttttagtttttaaacgttcctaaaatttaaaatggtttattaaaaaagcccatggatgtatatatatatataaaggtgagagcatagttttgaagtcctgccatgagacggacttgagaagaaggactgtgcatacacaatcatcgcgaagaaatttcctaaagactggccagagttttttttaattgagttgacatagtttacaaaaaagaatcattgatacatacgtagatcgcatgcggaaatgttaactcatttagcttgcatccgcgatttacaaatttattctgtactacgttatactacttcggattgggtcaccagtcccacttgatgttattaatttaaaataaattttcgattgagtaacgtcaaactgctttgcaattgcaatctcaactaagcatttgagcccccaaagaaaaaaacattcaattggtgccaatgtgggtaatatcggtatcattcaattccacaattccaatcatatgagatccaatcatattcgtccacaataaaaacataagtttttttttttttcaaataatcacaatgctacattattttaattaaaaaaaaaaaaactgaaagtgtataattgagggcagaatttgtagttacataaagatggaaagaggtcttaatactatggctcttatgggcgctcacacttttacctttcttggaactcatcatttttctctcctcttcacatttgatatttttaaaaaaaaaattgcatgatgcttaaactacattgtgtcattgttgttatatatttattggttgtatatcttttcgttacttctggtaaatcatatagttcagcttcattgtttggttatcttggaatacgaaactacttttttattattattgagaaattcatataagtataactgtaaaagcacattaatgaattgcatgtctgccggctacgcacccagccgagcacgtatgcgatttttttttttatgtctgtatagtcaatgtcatatacatatatacgtatatatacttgatttatgggataatttttaaaaatccacaaaacacgctttttccttcaaaattaacggctttttgcaaacaaataaaacgaaatcataaatggcaatttgtgtttcgtttgttgtcatttacaatatttacgtgttgtgtatgtatttgattgtatggtatttttttttgtattgcataaattatacgatagttccttttatcgatacatgtaagacatactactcaatcctaattcgtttcttatgataaaaaaattgaccaggtggattacacccttataaaatattaaacgctaagggataatggacagctttattattgattgttgattgaagtctgattcaaatagagcgttgtgaaaactattactattatagttttccatggactaaattttggtgagctggtctatgaactggattggccattgacgtacttcacgactcaatcaaaacctctaatcactcccctgataaaattttgaattctgattatttattctttctaaattttctatttcttcgaatctttgattttttttatagcaagtttgtttcttattattgcggaagtttttttttttttgtcgtttgcggaagttaagtaggcaaaagaaagaaaggcgattattcttacatatgtggccaaaacaaaagatgagtattttacacttgctcgcatttaccaaaagcatcacaagattaaatattagcagagaaactatgtgacaaagtccataattcctggttatatatactataatatagcttatatttattccttcactaagcaatcaattacacctaaacctaattataaacgaaaagtttaaaattatgtgtatattgaaaaccctttatcaaaaaaaaaaaaaaacaagactgattgcattacgaaaacttaaagagatctagtttgctccaccaggcaccaggggaggatccatctagagaaactagagaggcgcttcagcaatagactcaggcagtcagccaacacatttgctgctctaggaatgtaagaaaaagagattgtagagaaagaataagccagggatcataatgtcatgaataagacccactagttcatttactaccgcattagcgttgaggagatcaataaggaatgcaaggctggtcctctgccttttattatttccttcttttacaacgtaaattgtccttttaaactttttggactgttttgtttcctttctatatcccgtgatgtaatcaaatctagtgttacacaaataatgaattaataaaaacaaaaataagttttatattttagacaaataattaggggttgagatgtatacgtggcgaaaccttagaagttgtcagaagacgccgaaaagacatttgcctaaatacaaagcataatcctgattagtgtcttagtgattagtatgcctcctaatgactttaacttaacccaaacatagcatgtgccagctatgaccacacacacgaccacttaattagtactaaataatgacgcttttaatcctgagtaggcattaaggtttaatgaattacagctgcaaactgttaaaagtgaaagtctatctttttctttacataataaagtattaaaactcattagttcttgggctagtcacttttacaaacgtttttctttttcctacaaattctaatatatatcgtattgaaaaagaactagattctatttttataaatgaaactaatcaatggtcaattgaaagctataattagttttcttagcttggaatatatagaggaagactaaacttttaatttggttcatcccctctgtttttggctaatcacctgctcataatgcaaacaaattagaatacttgaggcgataattgtttttaaggaaaaccaaaacataaaaagaatagatattaaaaagtttgccccaagaaaaatagaaaagaatagatattacaaaaaagaatgacgtcgacgttccgtgggttcgtaggtctaagctcagtgtttccttctttgtgcccaaaccctcggacggagtcggagggttctttttaagagatgaaaaatttatgttgaacaaagcaccaatttccggatcctcagtagttgagttacatctccttgcgtacaatcttgaccgtgatttaatatacatcaaagcgcagttggactcattcgagatcagtataatttggtagaaatcaaattagtgataagatgatacatgcaatatatagtgacgaaggggagaaaaagacagtagtacaatgccgatgcatagcatttcgatggttagtctggtcatgcaattattgaaattgttaagtaaataatgaaataccgcgcgagaagcgaagaagatttgattgtaggatggaaaaaatgtaaagaagttggaagatccttaaatccaacaagtggggtatgtacgtaacgcatgagggagatgcaccctaccctccatatcatgcacttattgacccaccaacaaattctttttttttttttaataagacctacaaatatttactactaatttgcctataattgatttccacaaatttaccattatatagatagttaaacccttcaagcatttattttcgttgcaaaatatttactaatgtattcacaaaatatgtaattcctgtacgtaaatcggtaacagcagagtgtatatgtgtattagtcaacagttattaggtttcacgaactagatgaatcatatatgtgtagaactttttctctaaatatagttgtgtcattaagtataatcttgactagactgaatttggagagagatgcacatcatattagaccaagagtaacaattgcatatggaattcactgttttatgtcattcacattaattttttcaagatgtttaatgattaactttttacataatgttttggctgctttatttttgataaaatttctattttggctgcttgttgttgtgagaatattttttcaaaagccagataaaaaatggagatggggcatcgtcgcacatggtggcatggacacatttccaaaactacaaaaaaataagtgttttggtaagtcgaaacatatatttatggaaaataaaatgaagttgttcgggattcaaaagcatcttcggttaacatttaactgctagtggtgagagaagcttatacaatttggttatatgttttgtttatcataaaaagttaatcttactaaagaaaattgatttccatttctctttattatagccacccatgtggtggttactattttaactgaagccaaactttgaaacttactaaaagttataaagttaagaacttaaatttggttttctcttggcattttttttagtaatgactaatccaaatttaaatatcttgttttgtcaacaaatttaaatggctttagttctgtcaacaaatatatcttgtcagttttactgtttaaatttataacatggtgtgtgtagtcaatagaaagtgaatgcaaacgtcaaaatacgaatcttataacctgaggtccaagtttttcttttccataatgcgttcattaacgcaattataaaaaccaagactttaaatacgaaccatgataaataaatataccataatcaaaaaaattcaatcaataataattcatagaaagacagagaaagacaatttcgtaattaactataaaatctggtggcattgttattttctcttcactatataaacttggtctctcccaaacctcacaaatccctcctccacctgaaacattttctctcactttctcgagaaaatataacttcagaacttttcagagttagtttgacttcaaacgtgggaaaaaatggccggaagtcttgtaaaatgcagcaagatccgtcacattgtgagactcagacaaatgctccggcgatggcgtaacaaagcgcggttatcttcggtcagccgttgtgtaccgtcggatgttccatctggacacgtggcagtttgtgtgggtagcggttgcaggagatttgtggtgcgtgcgtcgtacctgaaccatcctatcataagcaatcttctggttcaagctgaggaagagtttggttttgctaaccaaggaccgttggttattccttgcgaagaatcggttttcgaagaagcgatccggtttatatcccggtctgattcttctcggtctagccggtttacttgtcctgatgatcttcagaaatgtaacggagggatcaaaatcaaaagcaagctagatctgatgattgaatctcgaccgttgcttcatggcgtcgctgagaaagctatctggtgatccgacggtgcagattgttgtcagttcgtatgattctgacccggtttgactcggtacgagtttaatcgccatggaaggaagtacagaagaaggcgagtttttgaataaatcgtcattgactcggctgagttttaccaccgagtcgggtgggtactaactttttaatcgggttcgggtctttttaatttttgatttatatatttaattatattgggtactcactgagtcgagtcagacgatcgaaggagatggcggttaaaggtgggtgagtcgtacgtacgtaccaccgagtcatccctggttcgaatccgagtttcaaaatggtaaatgtaaataagacaaatgtactgaaatgggttcatggaaaagaagagagaaagtgattttgattcagtgctttagattcgaatattgtcacttttctctgtaaattttataatcgaaatttatgctaagtacttttcataatctctgttttcttaaagaagttgatgtgctgaatttattacagtcaaaatatttgtaacaaaagtacaaatatttcccattaacttacaacagttaataggatttaaatacttatatattatataataggggattcaaagtacaaatcttttaatacacacaaaaaaagtacaaatatttatttaccaagacaaaaaatgaaagaaagaagtacaaatctttgtccataatagggttatttggtttaacgaatatatttaagatttctaatggttgttcctttgtgatattttttttactcatgcgacttagtttttacttgtggaaaagtcatcatccattgtcaagtgttttagtcacctgattagcagataaataatgcagaaatacgaagaatgaaatatactttttgagttttggaatataagtaagattgataaattttgatgaaataaaaatattcgatccgaccaaggccatgtgatggaaggactattagcccattttatctgtttcgcctgtgtttcgactttttttcctttttgtcttcactttctctatacagtaaaaagtacagtccacggtactcacaatcatttacatttattttaattaatcttgattgttttcttacggattttttggtgtacttttgagatttgtttatataactaaccctaaattattgctacaacttaaaggtagtttacattattgccttgctctctcccgatctctaattctatggtctatagtatattagtaaaactatgccttttagtactaaacacaataaatatgtctacgttgatgcatgtgaagtaaaacgaatgattttatgccgtagactacaacattttcctttacgatatggaattgcatgatattttttataaacaatgacaaatatcaaagataataaataacaactacgaattcgaatatatgcggcggattaagtaatttaatttagttggtgcggaaccaacatatacgggaacaatttaatatggtcaatgcgatatgattgtggtcaaaatgattactagtgagttaaaaagtatattaatataactggcatgtaagcctgtaactattctttaccagagaaaataatgtttttaaaaagttgttaaagttattttatgcaaatctacaatgtaacctcttaaaagttaagttaatcaagttacgtacggtcggttgcggtgacaaagcaaaactcattttcggtgcaacacaaacgtgttgagcgcgatcactaaatgtctatcatcaagggatttggattcaaaatttcatttttcagattctttgcaatcggttttagtttgattgttttttggtagatgtggaagtatcagctacctgttttcagttacacaaaattgtaattatttgaaaaggaaatgcacttagagatggaaaaattgggattatgagttacctgtttacattactttctaaaagttataacaacaccatatatgtatttatgaaaatgaccttgtttccatcctaaaccccacaatatacgatatctggcaatggaactttcatgttcaacaatatattatatatatactggtctctcttcatatatgtacgaacagagtacctccacttgttatatggaatatacgtttttagtggattcgtgtaaaatatactatgtattagatggagaaattaacttaatcacgacaaaaataagattagagacacttaattatattatattttctgctattgatagaaaaatgatgagaagattcttcgaaaagacagcgaagagaggcccattgggagccaacgatccaatcacggaactttttaattttcctttttggcccttaacatctactcattttacactccgttaccttgcgctcattgtttttagtatcttttttttctctcaatccaaatccaaactttgttttccaataaataaaggtattttgaggaaagttaattatttggatgtttagagaaaaatgaaagaattgtcgtggttgcatgtatctatgctatttgtagcgcttcgagaaaagaaagtaaaactatgatcgttgactacttctagttgtgatattcttcacgcatggttcccgttaaaactcattttctttaattttattctcggtctcgttagttatgtttttaccattgattttcattattttataatgcgtcagtgtttagcattaaaggattttttaactttgtttatttcaactatagcaacaagcagagaagttcatgttcacgcaaattatagtgtttgactcgaaattttgaaaatgaaagaaaagaatattactatattaggattagggctaattccggtgggtacgtatgtgtagagagtagagaagagtgaaaccagcggcctttttgtctcttacttcgagtatactcttattcttttccatatgtatttatccatcgaaaaaattgatctgtagcgtttaactttactaacatgtcgagcgattctatgtaaattattggattcaaattaatctgaatatgaagtgatcaaatattgaattcgagcaaatgatcttctacctagttggacaaattactctatatggaataggatatataggttcgatacattttctttcatcagctgacaacactatggctaatctttcccaaaataacaacagtttgtgtaactcttataggattcttgcgtttgtgaaacatagaattaattttacaactataatactttctatataatcttacgaacctattttttaatcttttcatataacacaaaattaggtttgacaattctagagccacatagaaagtctccaatatagatgggtataaagctgatgataaacagttttcggaactctctatttaatttgattatttatatgcatcaagcttttcatttttggatgttaagaaggaagggaaacgtataaatgataaaaccgcccaaaaatgtgaaaagtcatgataatacagaattgggtctgcttcactgattgcatatttgcatgtctttataccaactttaaaggtcagaaaactttcggggaaaaatcaaagattcaggaactgaggaaggtaagatatgtcactttggttggcaactgagaaaatggttgtcaattttttatatctaattatatatctagtatttattcgttactattagagtttatttttggattttttttgtatgtcttgtcgatagaaaatcattgtctagacttttgaaggatgggtctcgttctgtatcttcgtacagtatgtgaccagtaaagggttatgagcaatattggttcttgatcacttaattagtattttgtttagctgttattcatgacatgacatatggaaactgaaacgtaatcaaaattgaaatttattgttcgtttgaaatgttagatatttctgtcacataaaactctttactgtaggatatttttattaaatttgaaccaaaaattaacgtacctaaaattgttttactaggttggtacctaattcaagtagattcgatctaacttctgccatatatgtagtgtttaaatgttataaactatatacatatatagagtgtatgttacagctagtagtcggacacattgattatgttttttttttttttgtgtacttcctatagtatagatcgtaaaccaaatgaaaattgcttcatattcaattaatttttctccaatcggtttaagtgagttacgtccacgcagcactctcgtgtgaaagaaaacgttatcaacaattagtatctggttttagtctataatcaatttctaacgtatgtgattttattctgctttttttttttctgttgcatgaaatgtttgttttttggttttcttttatactgtgatatttactttaacaagagtttttaaacaataagatataaaacaaaattgggctatggctaaatatgggtacaccaaagaagtgtctactactggtggaatgggcattccagggatttatctaccagaaacttatgcaaggtcgtgatagcacttatcgatactttggtaaggcctactatataaagtttatattgaatgtattatgccacttggtgggctgggctttcactattcactccgttttatatccaaaatttgagacccaactagtcaggcacttgcggctgaaaataaccggtacggttcggttggaaaggatggagacaagaagtagtcacgtgattcagttacaaaaacaaaaccgttggttaatcacgtgataaccgattaatatggtttttggttaggttgaaacggtgtgtttggtgaaggacagcgacacaacacaaacgtgcacttcaaaagtgtgtgcagtctacagtacagtacatacctctccataccttctcatcattctctctagctcattttctctttttcacgcacttctttgtatgatttgtatgttattcttatcattacatagaaataaaagataaatcatcaaggacccatctgaactatcttcctccatgtttttttttggtttacaactataaagatcgtaaggagaaaaattgatagaacgagagggtaacatgaatggatggtaaaaggcacaaactactgcaaaatagtgccaattcatacaaaacaaaacaagatttatgtatatgatgaatttgtgggtcttttctcttcataatttgttctcagcaaagtttgaaggtacatatatggttcattctgaaaattggaccacctaagttgccttggcaatatttggtgtacatgaagatgaatctgcatgtagagcaaaacatggaaatgaaaagaaaaacaaatccacaaatcaaagatactatctattttctttaatcaggtaaacttgtccgttgtccagattggttcatatatttattttataaacatttttccctaaataaattgttgaattataaacgacactcagaaggatggttcggacatggagacatggactacgagtggttgtagtgggaacgtacatataacatatgtgtgtatgtatagcctttgtttcgatttcaattactaaaaatgtgcaatacaattaacttctcacctctgtttctctttgttatttgtcttatgaggaattgcaacgtacgagcggactaggtcacacgcacatgttccttaccattttttctgattccccgcatatatttttcgtaatttgtttatttaattgccttgtgaaatcttttagttagacagtaaaatgggttctactgaaaatagatttttacatttctatgtactagtaagagctagaattacgtttaacataatgtttctgtagattacataagggtacgaaatcccatcttgaacaaacaagaaaagttatacaatcaaccgaataagtttttactatacgtataaactggtcacatagtaatgtcggttttgatagaataatgggtttaattagggagtaaaaaaaaatcaattaaattactactaaagatgcatttaactaccatgattataacatgaggaaaagacaagaatttaatctttctccatcttatcactctcactcattatttttcaaagacatgatttgattaaagggggaaatgaatatataatgatcattatagctaactaataatcaaagtaagtacgttgaatttaggcggcctgccacatccaacaaaatacacatttgctatctttttacttttgtattgtcgataagaatgttttacttataaaccctccattaatacccccaaagtatgaaaattattctattgatatatttcccaataatcaaataaaaatcgaattaatggccatgaagatgcttatgaggcatttttgatatattcttcgttcttcttttggttttgagttttgacaacaagaaaaatccataaaaatgattaagacgtaatacttttatctaataaaggagagacaaattttagtaattgagtaattaattagaagaggggtttagtagaaacataatgacaagcgaatggcccaactccatcacttctggtttataatcaaaggccctattcctctacttttaatttcgtcatctaccaaatattttttaaaatataaatttattaaaaagtagtttagatgaaataaatcaaaacaaattttgaacatataaaataatggtatcgggaatgtaaacgtgtcataaattttagaaggaataatatttacataatttgtaggactcttttctacgtgtccactgtaattctgtgagcatgcttgtaaaaaaaaaatgaaagcacaaaaaaagaaaacacagttcctcacgatgataatgattgccaacagaggaagcaaaagatcaaaatgaaagttggatcatgtgacttttacagaacagaatcctaaggaatgtgatataataaataaatttaaagctaaaacaatattcgatgattatgttggtataatattaaaaagataatgcgtacttttttttcctttcaagtagactttttttcctacaaaaaagaagtggagtaaagctgtcttgtgtgctggtgttctttggggacccattttcgttgaaataataaataaaacaaatttaacaaaaaaataatatattttttctccaaatgtctatttattgttaacttttaaaaatctattttattgcccataaaaattgtaacgtacgaacaaagcaaaggctggaaataaaaactggcctatttcgaggtggaaaatcattctcttgtaatcatcgctcgttccaccaccgcaagatcttcactctttatatttgcctagtgtcttgtgttactaattagagtatactagttattaattagataacctttagaaattatatctgttaatcttaagttcttaacaaacattcttttcttgtctcatattcttttttgtttgaaatttatgaaattatggtttttatatataaattgagaatctttatgcgaaaactttacttcgattgtaacttataggaaaaatgataatttaccactttcacaatactacatgtcaatagaaatgatataggtgcataccttatatattgatcatgtagttacgtggattataatttgcgttatttttttcagtattttatacaactacgtttatataaagttaatcaaaattagattactcggaagttttgtaattaattctttttaccaaatgcattaagtattcaatttttatgcatttacagatgtgaattaactcaacgtgcaggaaaatttccacatggtacacactgtaaatatatctacgtggctcacatgtgcattgcacttccaaggagcgaacacttaattgaaattctccttttcgtgtccctttttatatatgctattttttttttttttggaattttcgttcacatgaatattttcacattttttagctgatacattaatatatatcagacagaaaataattggacatactagtttaatgcaatataaatagtaattaatgttatccacacggacatgtataaagttcgaggatatttttgtttaaaataaaaacggaattcttatgaaaggtattgtggatagttgttacattctatataaatcaaatatctacttgtataatttatgtaaataataagtattttgtaaattgtgagtagttgatgaacctctgtcatggttttagctggtaaaggagaattaatttgtattttattgtagttggtaacagacagttaagagcattaggtcagtatctacgtttaatcggttatattattaatacatagaattaaaaaaaccacctacaaaacaaaatataaatagcaaactccagcttttagtgatatttgtaataaatatcacatttaaattattgatgattagtagattatgtattatttattgctacaaatttcggttggataagtcgtctagtcaccgtgctaaattatgtaaatggaacccttaggtacgagagaataaataagaagattattctaagtttagtagtcgagaaaaaaaagtttagtagccgaacagaacctgattgacattatcctagtgataaagacatacttatattagagtaaaatttatagtacattttgtataattatgtacagaaacttaatctgggttgatatagcatataggtcggtaattattatttaaaatcttaatctaagcgtgtttaggttaatagtcaacatctgtaggtttgaacgagtcgatattaatctctttttagtcatatttatttatcttaaactcttacacaaaatgttcaacgaaaaacaaataagtaaaataaaccatgtaccattgatttggattaaatagcaaagtccagtttttagtggcagttgtataataaaagattgatgattagtagtagatctaattattaattaattgctatgattatcggtttgatgggtcgtcctcgtgtcaccgtaccaaatcaagtaaatgaaactcttgcttacgagagaataaataagtttattagctaactgcggaactgattgacattgttccacttttcaagatataaaacaaacccaaaatttatagaatattaataacaaacatgcaccaaacttaatttggatcgatgtccgtcggtaattattattaaaatcttaagttaagcattgtcaggtttatggtcaacatctgcaagttgaattagtcggtattaatctctcttggcaatatttgtgagatttactgaaaagttaaaaactaccatccacaaaatgtttaaatagaagataggagaaccaaaaaatctgattaaacgaaaactatcttatgaaatatttttcttcccaaatcgggattattttaaccaatatagtataatttaatggtctttgctaatgtagtgaaatatatcactatctagatttaaatccacataataccatattgttggacaaagaaaaatggaagatgttctcactcgatctagggtcaaaaactcaaaaatgattgttgtttttttatgtatcctcacgtttgagactattaataagtttttgtttcactcgcatatttatttgttttgtgtgtaagtttgtcgtttggtcgaagaaggcaaattcacattaaggcattaggtgaggtatagtaatacgagtttctcttcctaaatacgacgtcgttttctagtttacacgtatcaaggctttatttgaatggacccagtcacagtctcactcactcaaatatgactaagagttaaaaatcttattttaatacgattatacgaaactgacccaccatgggttccactggttcagtaatcgttttgtacgggtcatgactcaacccgctacacagtccaaacagcacgggtcatgacccgaccatggactgttggatatgtttttttactttcatgtcgcatcgttaaattacgtattgtttcgtttggacagataagaaatgacaaatatacaggatatatgtcttatttatagggattgccgtaaaatgttattatgattattgagataaagcgtataatcgatccacacacatactaatgaccctagataatgtagacatatcacgtgatgaaaagcgcgttacgtggtattttgatatttggacccatctctaattgccttttaactattcttcaatttatatatcctccatcgtcagttgtcactaaaaaaattacgtgattcaacacagctcatcatattccaaacttgcttagaaatcataaactttttacgcttttgttttttaatctttatataatactttactgtttctttctttttttattcgtcttcaagaagttagaatctttggatatttttaaactaagcatattataaagaatcagattcagcgatatcgaattctatcaactattgattgataatggtgaatattgaataattttacttggtgttgttacgggcgagcgaagctaagaataaatagctagcgcatcacagccgtcggattgattctgagattagctattgtacaacgcagactacagtaagaccaaactggtaaacgtgtgaaaccaagccacgtgttttccttgctgtcaagctgctgtgtttgatttcgacaatagttggatgttgactttatttttcctctctattaatattaattctaaaagctgaattatattcacaaaaatttcgagataaaacaatcaaaaactgattgaaacaatttatgttttaattataaaatatttcctgaatttaatttgggtggtgagcaccattatttcaattaaatcacaagttgtttaatctaattaaaaaagtggataaaatgtgtaggtagacagtagacatattagatgatatacctaatgcaaatatttatgattattatgtaaagtcgaagctatttgatcatattttaattaagaaaatgacctcaataatcatattcgtttagactttactcttcacgtctcgttctttaaaacgagaaataatgtctgcttttataattgaaaataagtcgctatataggaaaaacaatatctgatttttataatgaaaataagtcgttatatcagttttgggttctcaatttttttcctaaattttaattaaaattgaaaagtcatatagttttttttttctctttacttttggtccgtggaattgctatttacagactgtagtgtacaaacttttgttcgctggcttgtctctaaaactatatgaatgcaattgtaagaagttaggaccatcggctgaatgaatttaataattatgtaaacattttcatgcatttttggttgttcgtagcatatgaccaaaactcagatttgtatttattatctatttttgggaggtaacaaaaacaagaaatgatcgtcctttttaatttccgttaagtttgagataaggtttaattaaacgagtggaaaacaaacgcttcaaattaatatcgtcggttgctccgtttcccatatttagtccatttagtcacttaccataatcatttttctacatattatttcgaaatttacttactacagtattaaaacactcaggtttcatcctaatcattctcgatgtaatactaatcatcattcatcagtcaaagtaattaaaagaaaaccagtcaaatttcttgatataaacaaaaaaaaacgcgaagaattatttgttaggagaacacatttaatgaacatttaatttatgtatattatcttccagcaaaatctcagtttaatgaagtgcattatcatcaacataaaccttctgtactaaatacaatctgtcccatttattttaatttatataaaaggaagattttattaaatactattccatgcttcatatagttgtagtggagtaaacagtatgatcacgatgtaaaaacagaaaagataatcataaaacagtcaaaaacgtttttttttcttttcaaaatgatcacatatacaatgtttgtatgaggtaagctaaatttatttctcttacaattacaaaatgttcagtaacaaatacgtctaagtataatactgtttatttaagtatcgcatgcaacggtaaatacaataaacgcttttcagaaatcaaagattgaaagtctcgaaaacgtcaatggcttaggtttattttgttcaggtcttctattaatagggattgtataaaaaggaagcacatgtgatacatgtcattgtttggctatcatcgtgataagaaattttaggaaaaagcctatctattcattccctttaacaaaaatagggctactgtgtatacggatttagtatttttatttgtttccgacttaaaaccagaattattactattaatcaacaggccaaatatctaaataatactatatagaattcaactaaattgaattattaaaagattattaaggagggtaaataaatagaaggagaataaaaaaaaaaaaaaaagaagagaaagtgaaggtaacgattagtttaaaggagagcctctgctacgttttaggctttgaagtgatacagaaggcattagatagatagatagattattttcaccatcaacatcaccatcaccgccactatcacaccataacccaccactcttcttcttcttcttcttcttctctctctttctctgtatctagaaacagagagtttttgattctctctgttttcaaatctgttccactaagctctcttgctttcgggaagattctgtttcactgctgcattttggatttttccggtgagtttttttctctctccatatatactctcctcctttcgattctacatttcttcggaattatgcttcgaaatcggagaactgtatatatcatgctctgttattagttcatttacaaaaaaaaaaaaaaaagaggaatcggcgtcggtgacttttggttttgtgatttgactgttgagaaaaaagcgtcggtgatttggttttcgaggtatttttttcttcgtctgccatttgtttggctttatatcctgaagttactgattctagtaatggcttttgtctccattttacttgatttttggaggtattcctttactagtttgattcctctcttcttttcatttacaagtgttcacagttcatcgaaatcagaaattttctagtcgattgcgatcgtcggtagtcttttgcctctgcatctctgattattttttactttctggcatttgctttctgatttgacttcaccacttcgtttcggaaagttcttaattatttttccgaaatcccaaaattgtatatatttggtttaatttttatgtttttgttttctgaaaatgttgaattgtttgttgattatgaagatggatcgtaagagttggccatggaagaagaaatcctctgagaaaacagctactgtcacagaagttgttgatcaggtactttgatcactaatcaatcactctttaaatttctcagatttgtttcatttaattctaagatttatgttttgattccttcacaaaaaaaaaaaaacaggaaaatgggaagaagccgagttatatccagatctcatttgatcaatacacgaatctaaatggtttaaaagatgaagtcaagagctacgaagaaaaagttacaaagcttgaggatcagatcaaagatttggatttgaagctatcaacagctaatgcagatattgtagcaaaggaggttttagtcaaacaacactccaaagttgctgaagaagctgtcacaggtaataaaatttgcatgcatttctgtgttttttcttttgagtcacatgtttttgatttatgtttggttttgattcaggttgggaaaaagctgaagcagaagcatcagctttgaaaacacatctcgaaaccattactctcgcaaagctcactgtcgaagatcgagcagcgcatttagatggagcgttaaaggagtgtatgagacaaataaggagtttaaaggaagagaatgaacagaagctgcatgatgttatcgctactaaaaccaaccaaatggacaatcttagagctgagtttgagtctaggattggggaatacgaggaagaactgcttcggtgtggtgctgagaatgacgcgctttcgagatcgttgcaagagaggtctaacatgctaatgaggataagtgaggagaagtctcaagcagagtctgagattgagcatcttaagaacaatatagagtcttgtgaaagggagataaatactctcaagtatgaaactcatgtgattaccaaagagttggagatccgtaacgaggaaaagaatatgagtatgagatctgcggaagcggcgaataagcagcatttggaaggtgtcaagaagattgcaaagttggaagctgagtgtcaaagattacgaactcttgtgagaaagaaacttcctggtcctgcagcacttgcacagatgaaaatggaggttgagagtttaggatttggagatcatcgtcaagatcatcgacaaagaaggtcaccggttagaccatctagtcctcttatgtctccaatgtcacacatgtctcaggtttctgagttctcacttgacaatatgcaaaagttccataaagaaaacgatttgcttactgagaggctacttgctatggaagaagaaacaaagatgcttaaagaagctttggctaagcgtaacagcgagcttcaagtgtcgagaaatctctgtgctaagacagctaataggctacaaaccttggaagctcaaatgatgagtaaaagtccaaccaagagaggttttgaaatgccagctgaaatcttttctcgtcaaaatgctagtaatcctcctagtatggcttcaatgtctgaggatggaaacgaagatgctagaagcgttgctggctctttgatgtctgaactctctcaatctaacaaggataaagccaacgcgaagatcaagaagaccgagagtgctaaccagttggagctgatggatgattttcttgaaatggaaaagctagcttgtctaccaaatggctcaaacgcaaatggttcgacggatcactcaagtgctgattccgatgctgagattccaccagcgactcaactgaagaaaagaatctccaatgtgcttcagtctctccctaaagatgctgcatttgagaagattttggcagagatacaatgtgcagttaaagatgcaggtgttaagctgccttctaagagtcatggagctaatttgaacggtcttacagaagaaaaggtgatagccatgtcaaatgagactacagaggaaaaagttaccattgtcgaggtaataacacaagaattgtctgatgctctttctcagatataccagtttgttacctatctttcaaaggaagcaacggcgtgttctgagaacagaactttctcccaaaaagttcaagaattctctaccacattcgagggagtcttgggcaaggaaaagacattggtcgattttctgtttgatctttcgcgagttttagtcgaagctagtgagctaaagatcgatgtgctagggttccacacatccacagtagagattcacagcccggattgcattgataaagtcgctctaccggaaaacaaagcacttcagaaagattcatcaggtgaacattaccagaatggttgttctcagagctcagattctgagattccggatgattgcaacggaacatctggctatgaaccaaagcttgcaacttgtaaatttacaacagaggagtttgaaggtttgaaactcgagaaagaaaaagcagagagcaaccttgcaagctgtgaagcagatcttgaagcaactaagaccaaactacaagaaacagagaaacttcttgctgaagtcaaatcagacttggaatctgctcagaagtctaatggcatgggcgagactcaactcaaatgcatggtggaatcatatagatctcttgaaactagatcatcggagctggaaatcgagttgacttctcttaaaggcaagatcgaaaacttagaagatgagcttcacgacgagaaggaaaatcatcgagaagctttagccaaatgccaagaactcgaggagcaattacaaaggtaacagcaaactaatcattactctctttttcaatgtagagtctctaaaaatctctaacttcacttttctacaaaacatcaggaacaaccaaaactgcccgaattgttcagtaatcgaagatgatcctaaaagcaaacaggtaaattttccaaagataccaatttattaccttacctaacagagatttcggttttttaaatttataattcatgacattgaatgtttttacacaggacaatgaactagcggctgctgcagagaagctagcagagtgtcaagagactatattacttctcgggaagcaactcaaatccatgtgtcctcaaacagaacaggttgcttcttctccaagccaagaacaacaagccctaaaccctgaagaagaggaatacgcaacttccacaaatcctcaagacagcaaattgagttcgccttcagacaaggatacaccatcgatgaatacaatgaaatctccggtcgcgtcgaaacatagacacacgaagtcgaactcgtcatcgtcctcatcaggacttactcctgagaaacactctagaggattcagcaggttcttctccactaaagcaaagtaaaaataaataaaaagaattaaaaaaagtataaatctaactatgttgtatatcgtatctattgctactatattatatgggttttgtttttaattttttactatgtgggaatgttattttaacttaggttttttcttactttctttctttatttctgtactgacaacaatttggtgttgaattccgcggcgtgtaaatgtcaagctaccaaatctcgttttctcattggtgtgcgttattttttaatctaaggtttcttaaaaacatctcaatttaatatcttttcccctatctttaaaaactgaaactacaagttctgtgttctgtaaacaaagccaatcaggtttcaaggtttaatgaaatctcaactttgggcttagcccagcccacttacaccgtctcatatgctacttgtttgaaggtgtatatagaatttcttgtgaaatcacatcccgtgggttgagaataacgccaacatttttctagtaatttcatacgaaatgcttgtttgaaggccggcaaaaacaaaagaaatcaagaaagaatgtctcagtgatgaacactccgatcgattaattggggttagtgcaacgatcctcattgtgggaatataccttttaaagcaattagcgatcatttactgataatcaatgttttgacagtttagctactgtttggtttaatagggcatcacatgttcacgtattcaacacctacacactattacatctaattctgacctatatcacaattcatttacttagacatgtcagacattcttctttctatttaaacggtctataatacaatgaatgtataattgaaaaatgatccgctgacgttattcaaatatgtagccaaaaattaatatatctatggagtacttataacctttcacgatgcattctcttgcttatcgtaagtgtacacttttcaggaatgccaacgaaggaagtaagttaaaaggttcgatgtggtcgtacgttagattgcaaatgacttataaaaaatagattccatttagaagatctaaaattttatgagtccggcagtatctaattggtagaacatttctgagagctgtcttcatacctaaagacagtatacacagtcctagctacatgtgttggtgatactcagattcgttctttttctgaaagaagctgcaaactattccaccaattagtctgacagttttaaaatttttcgatggaaactaatttataattaatgtctaatcttaattaggaatttctgaaattcagacgtaagtttgtgttaagtcattgtcattgaagacagctaatattaagatttggcttttgtcttaccattaaccctacataaaaatagtttgcgcttataaattaagatttgttcaaccaaaaatagtaaagattctgattatgataatgtattataccatgtggctttgatgagtatccttgtcgcttctctctgtttggttaatcatatttggtttgctctggttttgagataacatagttttttcttacatccaaatccattaaaagttatatacgtttccaacttccttaccatatcatcttctctaataaatattatacgttcgcgaagacaacggccgagccattgaaagacattcaatacattttgtagttgacttacgtataatatcccataatattaacatagcactttcgtattttgtctacatcaactcgtttttagctagctagggaagtggaaatattgctttcaacaaaaagttaggacgatcaatggggctttgaataaatagtcggctaaaatttgggaagtatagttgacctgattatacaaatcaaataatttcagctaatgcacattcagtggctctctagtgatttaatcactatttatggtcaatacacattcattgcaaatcattatagaccgtccttttttggggggaaaatttcatagtattaacacgtcggctttatttcattttttcaaaaatcattacaaacgtcagagacttttcatattttggaaattttttaacattttttagtatttttaaggctctctagatttctgaatctcaatcaacatatattttcgttaaaatatgttgaaaataaaataaataaacagagttgattttcatcgtgttgtgaggttttaaggaaactcgaccgtccgttaagtaccgtacggtctgaagaaggagcatttaggtaaaaataattgaaacccgcatgcgatatgtttgaagtttgcgttaaatctgagccctcaaaaacatgaacgtgggtcatcacgtaccattcttgatacttgattagcatacgatcattatcataactcgaaggtataataatattgcagggagatatctacttttatagttttatcagatttacaaagttttgggtccacttgcatgtgctatctctcagacattgatatgacttctccaatgtatatattttgttaaaatcgtagcttttttttttggtagtaattaagaatattttttctacagagaattaagtttcaagtgactaataaattcttaatctctttaggtgactaaattcatgatttatagtcgggtgatattatttgtaattatattgatatttagatgacatgttacataagatcgaagaattgttctgtagaaattgttatagaattatcatgatttggttattccctggtaagtggtgaaattggagcaactcgtggaatcgttttagaacttttattccagacgttactaccaatgccaaatacattattttcatggcagagatgtcttctttttaccaactaagcgcatttctgtagtgaataaagggaaaggccagaaaacgggcatgagaattgtgaataataaaattatattttcctgcttctgcatgtgtgtgtttatgcatagtgtcaattttttttgtcattatcctggaatcagcatttcgatgctttcttaactatttatttattagttcaacagttttaacttttaacggctaaaaaactgccgattccaaaagaaggcatccttcgccttgggattccttgtttggacgatgtcgcacagtaacgtacttttttaaaaacttcaaaaagtaaaacaagttttgcgagcaaactaaatcgatatcatactatatgcaacgcgaattccactcgtgtgaatgaaatgagtttccatttcttcaaatggaaacaaatatagtttttttggatcaaattatacatgcttttaacttggttaaactatgtacagatttacattatattaaactccttgaatggagtatatcatatatgcaagaatatatatgatagaaaatggacaaaaccaaattataagaagaaaaatagcattcatcactgatattatataatagtccctcaatgggttgtacagataatcacaccaccacaacgagaaaaattatcagagtatttgcttattttcctccctacaaatctaagataattaatataaccaaactggttttatagatcactcttagaggcatctctagagttagtctcgttctaatagaaacacttacccccattgtaccccaaaatcacctaaaattttaaaggctacctaaaacagatctttatcctcaagaataaaacactaaatatatgttggctgaagcatagaggtgatgagagatttgaaagctacttcctcacaagggatagtgagacccatgttgtgatcgaagccaaactcttcctcagcttgttgtagaagaagctgaaactcgggtcgggtcaaaaacgaaatgggtaagacgtacctgacccgattccctcctacgtagaccacgaagtgacctttgggaacatccagaggaagagagtctccatcatgttcatgtgtatcgttatactcactgctctgtttctttcccaaacttgaacacctcttcaagatttgctttatcatagtcgtttgtgtcagcttgctccggtttataatcgccattcccttgggaaatggggttttctttgttatcttctatgtttttgttgtggtttgctagaggagtgaggagatagtgaagaagggtatgctgagttatggttttggggtatttatggatggttacactaaatatatagagttttataaataaatttatatactactttataatattagagtcttgtgatgggtctaaccgtctaagattcactagacagatcctagttttggaccgggtcaatgtttttttgtttaaggtttggaagaaaaaatagtttattttggtgttgtttattacataagagtctatataagaccaattaggtggaggttttaaacctgaaatcagaattttgttcgttaataatccaaaattgttagaccatttttatttgtatgcgtggttggagccactaaattctccatcttagggctggttcttgtaacatcaatatataaaatgtatatacaactatttttagctagtgtacatatatccttttacaaatactattgtacatctatgcaatgtatacaggaagaggtgattttgaggcgtggggtaaagtaagatgtgtttgtctcgatatatgaagaatgtgtctgctacagaataaatatttgttgtaccttgttaaaacaaattttgtcaataagttgtatatatgtttaaattatgtagatatacaatacaaattatttgtcgaggttttttgttttgtttgataacatctattgtccaagtcaaatattattttggttgaagattagagaaaatgttgtagagaaacgactctaggtctttataaaaaaacaacaactcttggttcatcaggtttagcttgaaaaagatggcaaatataaaatgttataaaactccgatgaatgcaaattaatggcacacattagtcgcaatagaggctgtatctaactttcaacatggattcaaagttgtaaacttttctaactacctttcgggccacacaaaaaactctaattaaatatacttgattatatattgtcggaatgtatttgcatgccttacttcattacaatttcaaaataacaaaactagcgttttaaaaaaaaaactagaaacaggaatataatgtgatgtactattttttttttttccagttttgaacgtaactaattatgcaaacgctaatgctagccgtgacgtacttgtttgtaatttcagtttaaacatcgaaaagctaagagcctgagactatatctatcgatgattagtaaccaaaaagggtagcttatcgatgcgttggtgaaaaggacaatataatgcaaacgtgaaggactaaggacagtaccatagccaattaaggcttcctcaattaatattcctgccattgcaattatgtatgcacatgcacgacctaaaacccatcccattcatattctatttttctatttattgttttgctgattggggtattcatgttaaaatccaaaattgttttcaaaattaatagtcgccgtatgaattttgctttagaccaaaagacgatgaccaataaactatagatgatcaatttatttagctaaagaaaaggagtttaattgttgtgtttagtggttcatactttaatactttatacattgtgcatatatattacatgaatgtcatgttagctggtctgcaacggcgcatcgctatgtcttttggtttgtgcaaacgagctgtgactaaactttattattgggctttattgtagcccaatatgaattacgcggcaaaagatggattgtgaacttgtcaagatataactacgaaaatttaacctaaataatttgacaaataccaaagtcgacgatggtgaaaagaggtcggagcggcggcgtttcaaatcggagatttcaaaacctagttctccagtcatctgagaagggatcaacggcagaggaaatagtcaatgagctccgttcaaaggaccgtgaatgggctcgattgagtcgtcatgttctgctacttaacgtcaaccaaacccttcaatccagaaatgtaagcgacaaagacgaagaagaaagcaatgcaagatcaaaatcacggaagagagccgccacagcttcaccttcaggatcgtcgtggtctgatgccgtggggacggaaatgtattagatgatagtggtaagtcaactccacagtttgatttgataaatgaaaaccttagggcttcgtatgatacaaggaaacatattagggtttcagatgtggaattagagatagggaataagaataaaaaaggtaagaaatttaaggatcttggtgggttaaaggagatattgcatgacctaacgaattgagtaaagaatcctctgctttttcctgaaatgcatgaacgtcttcaagagaagccaatttctgggattttacttcatggtccacctggttgtggcaagtctacattggctcgtgcatgccattgctaatgaaactggtgttccttttcatatgatctctgcttctgaggttgtttctggtgtttcgggtgaatctgaagagaatataagaaaactcttctctaaagcgtatagaactgctccttcgattatctttatcgatgagattgaggcgattgcgtcaaagagggataatcatcagcaaaagggtatggagactcgtattgttacacagttgatgaattgtatggaccaagagtatatgcttcaaaagatgagagagtctggttctgaaactagcggccatgttatcgttatttcagctaccaatagacctgaagctcttgatccagctttgtgaaggtcactacgattcgacaaggatttttgtctcggaatgccagatgagaaggcaagagaagagattcttactttgatactacggaaccgtcctcttgacccaagttttgatattgcaaggattgttcgtaagacttcaggatttgttggagcggatctagcacttttggttaaggaagctgcaaatgtggcaatggagagattagtgaaatcaagaggatcagaacttggaactgatattgattctttgttgagtatgcagccatgtccatttccaccacaagtgatagagaaacttttctacactatctcggattttgaggaagcattgaaaaagtttaaaccttcgttaacaagagaaggattctctactactcctagtgtaacatgggaagatattggcggtcttgatcatataagaaaggagttttatagcgatataatcaaaccgttgaaatatccagaagagtgcgagggattcaagttctgttcagggagggattttttgctatatggaccacctggttgtggtaaaacattagttgccaaagccgtggctaacaaagcagaaaccaactttatccgtgtcgagggaccggagctttgagcaaatacgttggagatagcgagaaagcgattagggagctatttaaccttgcaaggatgtgttcaccgtgcataatcttcttcgacgaggttgatgcattgacaacaaaacgtgggtcaggagaaggtgcttgggttgttgaaagaccattgactcagttgctcaatgaaatgagcggtggaaaagaacgagatggagtgtttgtgattggtgcaacgaatagaccggagatgatggatcctgcgattacaagaccagggaggtttgggaaacatatctatatacctcttccaaactctgttcaacgaggtttgattctgaaatctcttgcgaggaagattcctttagacacaagtgttgatttggatgctatagctaggcgttgtgagaattttagtggagctgatcttgaagctttggttatagaagctggtttggcggctcgagacgatgagacaggctcgtaccctcgtaggacaaagatggttcattttgaggaagcgtcgagtcgtatgcaaagcggcaggtgaagagaaaagtcaagagattggccaagtttttccagttttcaacattttttcaaaacttcatgcttattttttttggattattggtcaagtaagctagtttggttttaccatgttatatctgcttggtcaaataagatgttatgtcataagttcatagcataacattttaactccgcccatactgattgcaaattttccgatgaactatatagttcaagattattcaatgtgtatcattattggaatagaaatatagcaatctttctgttctttctaaaatgatgttactttctcaatttaagacaactgatttacataaacccatctaaaccacaacaaaagaagacagaaaataatatgtcaaacacagttcttcaaagaatctccagcaccttgaaagaagaaggaagaaagcacaaagtccgcgatgaagattccgacaagagacatgacgacagcagaagttgtagattctccaacacctttagcacctccagtagtggttactccccaagaacaactaattaccgatattatagctccaaagacttgagatttaatcatggcactcacaatgtcccatggtctaagtgctcggtgagccgagtccatgattatgttaatgctgatcccgtaaactgcatcagagagcagagcgcttgaagccataccaacagtgaaacacatgagtgtcagaaacggtagagccaaacacgaggcgatgactcttggagtgattagataatcaattgggtcagctcctaaaacacggagtgtatcagtttgctctgagacttgcattgtccctagttcagctgcaaatgcacttcccattcgtccagcaacaacaatcgatgtgatgactggacttagctctctagagaaggctaaagccaagacacctccaatggatctgtttagacctagtctagtgaattctctaacgaactggattgtgaaagccataccaacaaatgtagaagtcagaagacaaactcctagagatttcggtccggttctctccagctgttgaagagtgtttctccagtgaatcttaccctttaaaatccggagaacgacttgtcctgctataataggaactgataaacctctccatatgtacttagaaggtgaccatttgctgaacggaagctcggcttcttgactgggtgcgttgttttcagtagaggtttcttcttccaacatagacatggatgggtgaccatcattagcattcaaattcacatataatcttctttgccgtatcggacttgaaatcccataagattgagtctttccaatgaaaccaacttgacaaagctttgggggcttaataccaatcgaagcatcaaaccgtggaaagactctgcaaaattaatattcaagaatccaaaataacatattctgacaatgaagcaaatgagaaagcttataaacttatggcaacacaaaatacctatgagggaaacaaaacgattgatggatacaacaagtctgcatcattgtggttgccttcttctttacgacctcactgatttagtgcctctcaatttgtagcaataagcacgatttcaacagctgaatctgtaataaacccagaatcaaattgatttacaatcaaatagaattaggacacaacagattttgcataagagatccaaatcgagacaaaaagtttccggtgacctgatcaattaatcaatctctgactctgaggcagccaaattcgaatcccagtataagatatgtacggaccaatctaggtgaaatctctactatatagaaggggaacaaataattaggtctatcaatcttcttactgaaacaaaaacttgaaaacttacatttagaaacgaaactaagctcggaagatcgaagaagcttgcttgagagggttcatcgagagagaaagtggcacagtgccaacaacaacaacacacacaactaacagttgcgaagaagatgtgtgggtttaactcccaacaaaacaaacaaaaaaaaaaccaatggcaaaacataaattggtccgtgggccgtaaagcccaatatacttttacaagtaaagcgtgggctctatgccattcacggcaggtccacttgtactttacacatagactgatacagaaaagtataaataagaaaataacaatgagtgtttttctctattgatccaaaatgacaaaatatatgatctaaacattttatgttattctgtatatgtaaagtgttaattatttaattggttgtataaatctacaaagctattatatgaaatgtttataccaagacaatcaatcaaataaaggcctacatttcatgtccagatttgtactaatatccccttcattgcttactaatatatagtaaatttaactaaatgctaacttaactataatataaccaatatcgaaaggagaaagatgtgaaaagaggaatggtggtggtcacgtgacagtgatacttggtaacctttacggagacaacaacgttatctttttcttcagccggtccgttctttaaaagcacactctctgtataatatatgcctctctacgttttatatactcacgtttaccctactctacactacaaaccaaaagcactacttctctcctacacaaaacgtgattctaccaaattgaatgcaagagtttagtagagggtctcgattcttaaaaaaaacaaactgtcctagatgatattttggaaatataagtttaaggaaacgctgaaattggttgctttaattcgactactatatctttcgcatcttagaattatattagaagatattcaatatttgtatcttttacattttatatttttatgagtattctattttaattagaggtattaatttgttaaggttttagagttttatgttacaaatttacaatattcaagtgttacgtttttagcaaaacttgtcttcatttccggtagattgattaaaaaagcacaacgaatccccaaaaaaatggtaattcaggtattttaaattaatcgagttccttgaaccgctatgaacactcaattcagtaccttccaaaggaaatgtgtctcaagatctcatgttcaagcttcgctggtagacaatgtactatttagttcatatcctccgactcgagaaaactttgacccttggttattgtaaaaagtgttctatacgtatacttatattcgtaatttcgtagatagagagaaagcataatgtgatgcatgtgcatgggatgggcagatggggcccgcgggctttacaaggcccataaagctaaaagaagaggagaggaccacgtggcagggagctagctagtactacaagtggagtggatactaagaagtaagaaagtaggaatgagttgaatctcgtgatcgcactgtttctactattggcaatgcagtgttgctttcgtctagggtttcagagctatagccccctcttccttaattatttctttttttcactttacttttctcaccaatccatgtccaactacacttaaaattgcattaccgcaacatcttatatgtgtctatattcgaaatatcttctgtgtatagaattgtataagctagctacggaattacattttcgaacgacatatatttggatgttctagtttttgtcatttttttattagtggtctatcaagccgatgattcttgaagtctccattcccggtacattattgaatgtgaagtttaacctctcttaagattgatctctcgcataggatcgaatcccaaacattagcatgcatgctttcaagtttaactaacggtgtttgaataaaacaaaaactatatcttaacattcccttagataactttcacatattttatgagggaggatcgttctcaatcatacgctaatggttaacagttttggttacatgagtgttcactaatgagagttgtattatatgtgttggtaatgttatttttgtctctgttggtgattgtttcttatcccttttgtaacgattttaacaaaattgatcattaattaagaccgaaaaggaaggtgtttaacatattttctcatattatatattttattatttgataacacaactattaaagggtagttgagatattgcgtgtatttacatagtgtatacgaataaagtttctatatcttaactttaccacgaagctttgagtcacttcattcctttatatattcaacaagacaaaaagccattctaggcggaaagagcgtaattatcacttttctttaagctaacaaactgatggttaggaatgaggaaccttagcgtcaatcttatgttaattttaacaaatctacatccaattattgtcgtttaacatcatacgggagccaatatggctccaccggaactgaaatcattctcaaaattttttatatatatatttttttagttcggaaaattttttggttgaatcagacaactaatttctagagtctatatatatcgccggtaaagaaaatttcgttgtggtcacttaaaaaattgtatccaacgaaaagtaatttatagtttagactaaaatgacaacaactatttggacaaccattacttgatccaaatttaaactcatatttgttttttttaccaacaagaaactctaattttggctatgtttttttgctgaatacaaacgctctcgtttcaagaatattttacatcctcttagacaaggcgatagagaatcgagatgtgtactttcgtattcatctaaagttttggttgagcaatactaagccaggagcaatatctcagtaaattgtttttgccatcagtattagccaattaacaagaaaaatcgtactcctagttggcaatactagtaaattgtttttgccatcaggagtagatacactagctaacaaggataatgattgacttctagttttatcctgtaagagagatgaataggtagagagagaaagtgaagggtaagcacaaggctcgagggtgaaagacataataattgggacttctcttcgtccataaatttccccaaacaagtcatgcactctctacttacctttctgtgtgtattgagtctattgccaaatcatagtaagatcatgttctaataatcatttgttattttaaccactaaacactactgtactaccttgtatgctagtatcatttgccataattatttctgagcacgcaatattttttctcaactccaatataatagtatttcctctgtttcattttaataaacgtttaaggtttttgttaaaaatcacaaaaatcttatttagttttttttttttacataaaaatatcattaactacaaatgattcaactaatagataatatattataaaatataattggtaaaaaattattaaatatatttagtttttgcatatgaagttgaaagcatcaagcaaataaaatctctaaaccatcacttaactactgcggaaatattatatgtaaattgttagtttggatcaccaaagttcgctgttcaaaaaaattgcaagttagtagtataagtttggttacctcgttgttacaaattcatatgtctaataccacctataatgttgatccctatggttcgaaaaacattgggaactttcatcatttgatcatgtagtacaatctcattgcctaggattctaatttataggacagtcattccgaaataaaaaaaattcttagtgggatatatatataaattaaaattaataaatgggaagtcaaagtaaaaataacaatggctgttaaattaacaatacaaagctaggttttcatcgagcgcaacaaaaataaagaaaatttgttgagaaaagacaaaagggagattaggcaactagtttaatcattgaagatccagtcatcaaagttaggggttcattgtttcagttctgccaaaaaatattattatttgtgaaaattgtaaatacagacaattatttattatagagtccacacaaaaaaaaaatccacggtccgttaattagtattttttattttatttttaataaacgatataattaaagcgtagttgttgctaattcgtaactcgaaacccataatgaaatgtgttgaattttattaatggttgcaaatttgcaatgtttcattatatatgtcgtgtatattaaatggtcggttgataacgatgcatttgttgcatctacgagaagtcaaaacctcagttgagtcgtgacttttggactgaactaaacataccactttacatcaatacttatttagttagacaaaactgtatagtcatgactcatgaatctgggttacgtcaattagttttgcatctgattttctcgttgattgtaatatatttattgagaccgatttttgtatacaagcaaggaagatttaacaatagctatccatgattttttttttcttgggggtcagatataccatttgaatgtagttcactattgacttttgacttaaaattttgtcgattttggtcttatcaaataccaaatgacgctatatactaattaacatcaaattgcgccgctaaatcacgcggttccatgtgatcaaagtccctggagtggatttgcttgtttggtctcactctcacgccaattaaaaggtgtctgtttaaccttttctcctttagtttatagactatgatatggtcaggaattacttaactataccacggatttataagaggtatctcaataaaagatctaatgaattttgaatcagatacaaatatatgatttttataattataaaacctttaaactatctcatggagtagtttggttggaaaacgaaatggatcctatccatccgttagttgataattattactcgtgacctaaaacttagactatatagggtttgctgtcaagcaagtattcattaaaaattgcacatttatataattactttgtttaaccgcatattcacagcacttgttaaagtttcaattatgaaactcagctatagtcttatactgttattatgttcacattaatctcatgaacggcaatatagagactgttggataaggtttgaaataacttaattctcatacaacagcacaatatataattgtttacgatccaatttagtgatttgcaaaataatgaaagaaaacatgtgaaagtaatagtaactgataactttccaaaatgatctaattatttcaaatctttgtaagattttatttcagccaaatagtatttttgtggtgtcttatctttgattaagccaaatgaagcaattgccgacaaaaataaaagatgctaaagacgtaattaaatattaaaatattaccgcacgagggaccttttgaaaaatcaacattccatcacataggtaaaattatgtcaaatgaccgtctagctaatcacaccatctgattaagcggcaacattttttaagtagttctaaatctaaccagtgttttgatttcggagtgatccggccggtcggacctttaaacatgcgacttgaatacgactaaactatagttcgtttggtaagcgatttttctttcacccactagaactaaacatgcaaaaacttcggcaaaaactagtgatccggtaaaatccacacaagggcggtctttaacacgccaaatcacaattttttttttatcctggtaacctctgattctttttttttttttctttctaattttgatgacgtgattgatatatttatttgataaatttgactctctaaaataatttaatttctgctaagacatacaagaactaataaaatcacacacatatatatatatatatatatagaacgtattatatgataaattttgattttcttggagaattctcatgctgattttttttaataactttaggaataattaattagtttcaaatcactctagaagacatttacttaatcatagcctctgatgataatagttccgaaacaagaaaacaaaacatacaatatatattatttattttatttttaattttataatagatatcaaaattggtgatatttattgtgatggggattcattgaaactggaagacaactgtagagaaagtgccccatagaagaagatcttcatagtactctccatctctttactctccttctctttctctctctctatctctctatttctctctctctctctctctcacccacagagaaaaccagcagtagtagcagtaaattgcttgagttcttgatgacagatcgacaatgtcttaaatgatgaagagaaaagaaggaaagcaataaaccttggcggcgtttgcagcagtttcttaaatttcctcaccatcattactctctcatctgctcccaaatctgctccttttaaataccaaacacatctccaagcctagctagaaattaatgtgatagagagcaaaagaaaaaggtgaacacaaatccccaaaaataattcatccacaaaccccaaaaaagtctcataaatcctctttctttctttttgtttgtgttttgtgttggggaagtagaaaaaaatggctggattgttctatctaggagggagagatcacaacaaacaagatcatcatcaagaaaaggatcataatgaagacaagagcaacaattatctctatctatacaaagacgagatctacaacaacaacaagggttttgagattttccctcctcaatattttcaacaacaacagcaacaaaatcatgcggctgctccaacaaatctctactcttttggtatggtcccgagtggtggtaacataaacaataaccggagtactaatcggagtttgtacttcaacgtcgtctccgatcatgagccggtgagatcctcaacgggagggtttacggtaacgagacaagggaacatgaattgccaagactgtgggaatcaagccaagaaagattgtcctcatatgagatgtcgtacttgttgtaagagccgagggtttgattgccaaacacacgtgaagagcacgtgggtctcggctgctaaacgccgtgagagacaggctcagttagctgttttgccagctaagcgtataagagacgctaactcaaggggtggtggggatgacgatgatgatgacaaagaggacgagaaaaatgacagttgtggtggtggctcggctcttgcttgcacccgtgtggttaatgctagttcttcaggtatgacgatgagttttcaattaattaacatagagaaaaaatttcaacaaatctagaaaggatttaaaaacaaatttatgtgaagatctggttatgaatgttttgtcaagaaagcaacaatatgatttgattgtgaatatatgtccaccggattttgctcctttctttttgctgtttgattttgattgtgaataaatgtccaacaaaatgattttagtcactgttctatggtaaacctgacgacacaaagggtttagtcgatttttattcaatatatgatgtaaaaaataaacaatggttaattatgtcatgtgttttaaagattttgattattggattcacgaaccaaaacgtttttgaattttatagtaattctttggttttatgaaattagggttagagactagtcacttaccaccggagataagttccccggctgttttccggtgtatgagagtcagctcaatcgacgatgaagacgaagagtatgcttatcaaacggctgttagcattggaggacacgtgttcaaaggcattctctacgaccaaggtccatcgtcagatcaccaccgttacagctcaagcctcaatggcgaaacctctcatcaacaccatcttaacctcatggactcaactccttcagccgcaactacaaacgccgtgaccgccgttaacactaacaacggatctattgacccttcttccctttacactgcggtggcaactccgttcaacgcctttgtcgccggtggtacgcctttctttgcatcttctaggtgttgagattaaaacatctgaagatgttaaatcttttaaattacgtttgtgattaattataactactcttataactaccagagatctatctacgagtacgagagataatttatttgagtatttttattgttgtcggacaatatggtgactgttcgtacctagctagggtttgtgtactgattaacatgcacatcgtacgttttagagataaatgagatattatcattaagttttttttggggataaacgagatattaaattaatgtcagagtttcaaattttgatcttctgtttgtttactttaatgtttgatcttcccaatgtgatcaacataacttctttttttttttttttctttcgaatatgtctgaattattttcaaaaagtttggtcttctatataaaatagggtttaaaaaatatattctaattttcttctgtatacaaatagggttgggtttgatagtgaattagctttctggctggtgatgaactcgaagctactttttcccagtttatccgtttgcttgccggatctaaacaggaactttactaggtttcgtgttccattgagcaaacaatttcaaatctatttatatataagagaaaaactttctgttacccaatccaatttccgcagtaaaacagtggaaaccatcatcatagtttacgaataatttgttatgtttacatttatgtaatattaaaaaaaatatttgttaccgatatttttcttaacaagagagtaggttactcccaaatttcatcacaaaaagaccttcaacgcttgtatcaatttatgtaaatccaatcgtatcgttctattctttcattaaaataaacaaatttttaaatttgagaaattttcaattgtcggcgtttcttgaatgagcttgatcagtttcagtgtatgagacaatcggactaatactaatccttgaagaagttttgttgtcgttctcacatcacatggacatgacgacttatagcggacgttaggtttaattgttctggagaagaaacatcaaaattatgaggacaacatagtgcatgtgaagtattaacttttgtagatgaatgtaaatggaaagtattctagctagggtacttaaatctactaaactacttctctacaaaatttttagcattttagctatttggatgtaacgtgcatgatgtgactatcattggatgtagtattatagattaacctaatcataattttgtaacttgttcgatatcattttcatatacacatttgtttatgaaatgtttcaaaagattttttatttatttatttagaattttcttttaaagaccaatttttgcctagtaactagtaaaaagtaggtggacaaaaaaaatactaaagaaaaatggtattaattatatctttaaaggcggtttggcaaattttgaaaaatggaaagaaacagttacttgtttaattattagagaaaaatgtgggaaattatgttggaaataaaaggatacaattgggtcaagaagcatagtaaaagtcaatggtcaatgtataaaagaccacatagagtttaaaacataggtttttgatgcatcccccacaaggccacaacatctgtatacccaattcgattatgactgatatgacatattatttatcaaatccttttccaaaaagcaaaaaaaaaggtctttacatataaaacaacgaccttacgaaaatgttcgtcccttatttagtgtttaagaaaagtcttacattatataaacttttttctttctcttattctgacaacaatttagctactttgttttctcatcaatatgtgatccattctccaagaaaatgtacaaatctcaatatataagtggccatagagaaaaattcgtaaggtagaagaacaaaatcaacgagatcaatctttctttcacgttgttaattaattcagattttcttagatctatgaatgttaattgttcttaaaatacagattagatgatacagattcgagggtttcaatgtcatctaatgctacgggaatgaagaagcgatcatgttttggattgtttaacgtaactagtcgtggaggaggaaagacaaagaacacatcaaaatcatttcgagaaggtgttaaaatcggatcagagggtctaaaaacgatcggaaaatcattcacatcaggtgtaacaagagctgttttccctgaagatctaagagtctccgagaagaaaatctttgatcctcaagacaaaacacttttattatggaacagaatgtttgttatctcttgcattcttgctgtctctgttgatcctctgttcttctatctccctattgtcgataactcaaagaactgcattgggattgactctaaattagctgtgacaactactactctaagaacgatcatcgatgttttttatcttacacgaatggctcttcagttccgtaccgcttacattgctccttcttctcgtgtgtttggaagaggtgagcttgtgatcgaccctgcaaagatcgctgaacggtatttgactcgttatttcattgtcgatttcctcgcggttcttcctttacctcaggtagttaataaaacgcttcaatcttttttgttttgtgcattgttttcaattgaatagatgattcttggtggtgttgatgcagattgctgtgtggaagtttcttcacggatctaaaggaacagatgtattaccaacaaaacaggcgctattacacattgtcatcacacagtacataccaagattcgttaggtttattccattaacttcagagctcaagaaaacagcaggagctttcgctgaaggtgcttgggctggtgctgcttattacctcctctggtatatgcttgcaagtcacgtaagcatttcaaaattcatccatcagcactaggttaaatatctattgtttttttttttggttctgtttttaagaaatgttgttatactttgatagataactggagcgttctggtacatgttgtcagtggaacgtaacgatacatgcttgagatccgcttgtaaagtccagcctgatcccaaggtctgtgttcagattctttattgtggcagcaaattaatgagcagtcgcgaaaccgactggatcaaatcagtccctgatctttttaagaacaattgttctgctaaaagcgatgagtctaaattcaactacgggatctatagccaggctgtgtcttccggtattgtatcttcgacaacgtttttctccaagttttgttattgtctatggtggggtctccaaaatctcaggtaccttccttggaaaatcgatgaatagctgttagactgtggtgcaattttattgacttgggtgttttcttgtatagcacgttaggtcaagggctgcaaacaagtacatatccaggagaagttttgttttcaattgcaattgctgtagctggacttcttttgtttgctcttctcattgggaatatgcaaacttatcttcagtcacttacggttcgcttagaggaaatgaggattaaaagacgtgattccgaacagtggatgcatcacaggtcacttccacaaaacctgagggaacgagtcagacgttatgatcaatacaaatggttggaaacaagaggagtcgacgaagaaaacatagtccagagtttaccaaaagatcttagaagagacatcaaacgccatctctgtctaaatttagttcgcagggtaagttttcagaaatgtgaattgcctaaagatcctacacttcattcacaaggaacaatgttctttcttttttttgcaggttcctctgtttgctaatatggatgagagattactagacgcaatatgtgagagactaaagccaagtctatacacagagagcacttacatagtgcgagaaggagacccggttaacgaaatgctcttcataatccgaggccggttagagagtgtaacaacagatggtggaagaagcggtttctttaacagaggtttattgaaagaaggtgacttttgtggtgaagagcttctgacttgggcacttgaccctaaagcaggctcaaacttaccttcttccacacgaacagtgaaggctctaactgaagtagaggctttcgctttagaagcggaagagctcaagtttgtggctagtcagttcaggcgtcttcacagtcgtcaggttcaacaaactttcaggttttactctcaacaatggaggacttgggctgcttgtttcatccaagccgcttggcgtagacatttaagaaggaaaatcgcagagcttagacgtaaagaagaagaagaagaagaaatggattatgaagatgatgaatattatgatgataatatgggtggtatggttacaaggagtgatagttctgttggatcaagttctacattacgttccacggtatttgcatcaagatttgctgctaacgcgcttaagggtcataaactaagggtcaccgagagttcaaagagtttaatgaatttaacaaagccatcagaacctgactttgaggctcttgatacagatgacttgaactaagtacttatagattgcacacttccaaacattttcattgtaaaacatacaaatttacatctataaccaaagctgttacacacttacacttacacaagataaacacctagaatatatgattagatatacacacaaaaaatcaagggaaataaaaaaactttctttagagattcaagaatccaaacctaataagccatacgattgtctttgtgaagcctaaagaaataagctgcagcgcttaagacggcagtaaccaaggcaacacctttgaaggcatcaaactcatcatccatgaaattgaagaagatcaccacaagaaccgacacaatcggccacgtaatgacactgatcacattcgacaacacgctcgaaacagagtagacaagtccaacaatcccaacccaatagacctgccacgaaacagcttgaccaaccatagccatcacataagaacctttccctttcgagaatccattcatttccctcttcaaatcgtgttgctcaccggctataagcagacccacgacggagatgatcgtagcaacgagagaagagaagataataacttcgaaaacagaggcaaagcttggtttttgattggttgattcagttcgtttgaagatgtaactgtcgaagacgttttggatgttacagagaagaagagcgaaacagattccagcgaacagagcagcccatgagcctctagcgtaattctcctctgcttcatcaggctcaccaccgaatgaagaagacagagtaagagctccggtgatgatagctaagatcacagagataacaacccatcgattgaatttgattttgttaatgaaagctgcgaagataggagtgaagaagagctgtgctgtgtagatcagagtgaaaacaccaaatgggatctcgagttttcccatggctgcgagtcttccttgaacggacatgataattccgatgcaaatgtagatcacagctaaggattttaagtggattgaatcggaagtgatcggaggttgttgatggtggttgcgtttgttcttggtgatgaagatgaggaacgggagaagaaggagagggaaaccaacagtttggagaagagattgagtccaaacgccatcgttttgacggttttcgttgtattcgcttcggttggttttgtcgtagtagaagttttcgaggagtttcgctatggattgaccgatgatgacgaagatgattgagatggtgatggttggccagtggtttggtttccggattgtgtttccggtttggttcatgcgtgtggttgaagaatcacgctcgatgttgataggtatttgcacaaattgttctgcaaaaagaaacagaggaaattagaatcaaattgttttgtaagaagaggagatcaagaaacgagagatctggtttgttgattcttattattacctggaggtttggtctggaaaataggttgttgattctgagccatggattggaactgattgtcggagattctgagcggatttgagttcaatgtatgtcggcgattagatttggtaatatgtgatatttggagtggatgatgttgtgggataaaggaaagagaagggtttattatatatgggcacgaaaagtctaccctggcggcgtaatggtcaatcaagcgagcctcatgtctacgcgtcgtcgttttcaacttgttccgggttgtttcgtcatccaaaaaagtgtgtaaacaacacttagaagtaacttattcttgtctttacaaaatccaagcaataatcgacaaaagatgatgagaaatatttgaggttttgaatcttgattgttttctatcaacgaatattccgaattggatttatggttcgaaggttatataaggaaatggtatagttaagtttaagttatattgactttgtttgttttgggggtttgacctttgggattatccaacatcctacgtttcggaaattttgaactaacacgatgcccacttggcagctcactacttgtaatatgatactctcttaaatgcgtgtcttcttatgacttcatcttagaatatcatacttcatgtaaggattttggtatatgacattttataatgctcaagatataatcccaaaggtgcaagattagaatgaacttgaacttcgaatcaaattgtttgcaataactaaacaaattttgaactcagattcaatgttgttcaacgtaacattgatcatttttcaaccaaatgagcttcgaaagtttggattttacaaaataagagattaagggtaacaaacaaaggcaatttccttggtgctcatttgacacattttacttaagaatcatacaaaatctctatgtacacaattgcctcgtttgactatataaacgtcctcacactgtttccacgacgctatacccattatgacccataggcatacatgctctcaaatatacactggacccgtaattaaaataacattttaatacttaacaaattagcatgtcttgaccaagagactgaagcagccaaagttgtccagagcaatagctcaagtaggcataacctattactgtgttaatagattcacaaaggcaaaacaactattactaaaccttcatggattactcatctatataagttctagacatgtgttttgaattccccggttcatcatcggtacaatagtttcagaactaaaacgctatggggcattgaatttgaaactgtgatcacgcaaacttcttaaatagaacacccattagaacacccatatgacccataggcataaaagctatcaactacactggacccataattaaagaacacagcatatcaccaaatcaacttgaggcagcctagccacagttgtccagcttaagtaggcataatctgtcatgtgttaattgaattcacacagacaaagcaactattactaaccttcatggattatacatttcggcatatcatcatctataccagttttagacttttgttatagtttcagtactaaaacgctatggggcaatgaaactctgatcaacaaaatttctttagatagcatttccacaggcttttcaatgaacatgccacaactcgagaagtgaggatttggtattaaaagccttaacttgcatcactacattattctatgataatagagccaataaagtaaaaccattctgtttgaccaatccagtcatatgatccgatgatcatagaggcaaccaatgatttggcattgcaacaccgattaaggaaacttctttagaaatacctttcaatgaaaatgccaactcaacaagcatggatttagtactaagaaccttacttgtatcactacattattccttaatcacaaaggcaataaagtaaaacccaattcttaatcaatccagctaaattttcctatggtcatagaaacaaagaaggatttggcattgaaactccaattaagcaaaatttctttagagagcatttcgacaggctttcaatgacaatgccaacttgagacgcaaagattttgtattaagaacgatacttgcatagttgcattattagactattctttgatcatagaggcaatctagtaaaacccttttcttgatcaatccaaatataacattcctatgaaacatctccaccatctattccctaagtttctgaaactttacacattgatcaaatataatgtatccaataactgaaaacgcttgaaagagagaccagaagaaatttctaaataccgatttaactatggctgcgatgggaacacatctttcactgcagaagctgcggtcaagtaattgtgaagacatagaaattcacagattgagaaagaagtcttgttttctctcagtcgctccagttgtctttatcttcagctacttcaccttgcgcctgcaaatagacaaatcttgattaaagagacatccacaacaagactgcctaacctctaaattatgaaaatttgaagtagtactagaatttagctcaaccatttcatcttccacggatccgcctggtgaccacacaattatttgtctatctgcgccacttgtgtatagttcctatgagcaagtataacaagtaattcggatttagaggtgtgttcaagcaaacttacaaactcaaatcactcgcgaaattcgggaagattctgaggattgagtttatacctgatcattggaattaaagcagcaagtgttcacgctttcgtagtgtccacgaagcatcagtgttgttctacccgaccacatgccaaaacccttatatacagttgcagcaacaattcatcaaataatgcaagtactggaatggaaagatttgctgatacaatagtaaggtggtgactaccttcacagtcttcatgcacggaacaaatacgagagctggatcatcgcttgtatctaattgaatcgctctgtctgtctggatgcgtccagtttcaaagttcaccagggtattgcgtccagattcaatatcccacaatcttattcttgaatacgaccctgaaacataatagtaatagactcttaagtcttaactgttgtatcaccactgatgtgtacggtagtaattagtgctaccacaaattgatatagttcacttgatgctaaaacccctaacacatcacttccacttcgtagagaggcatgtattataacatataaccagcagatgctgcctataccaggttgtgacagaggtcaaataaataacctaaagaacaaagaaattagccaggacaataagaactcaccagcactaagaagatacatcccatcgttagttgcctttaagccagtaacaacaccataatgagccgtagcacgatctagagtagataacattccagggtgaattctcttctgtcgagacttttccactgaaggtttctcgctagatgatccctttacactttggctgccagtgtgtttactctgcaatgtcttcaaccaattttggtcccccagagaagattttgcagctgaaaaaaactttacaacaagataaaaaaaaaattactacagggaatcccctatcaataaaacagatattgattatccattctgtctgtcaattgtaggcttgtagacatgcaggttaaactggatataaataatggtcctaaatttagaaggcgtcatgcttatgggagaacgggacgggacaaaatctgaggcaattattgttgtgtgcagagaaaggctcaacaacatatggtgacactgtttattcagattcagtagcatcttaggaatatataaacgtagatccttcattctggggccacagtccccttgtacgagatgatacaggatgagtgtgacttgagcattttggtactgctaagtattgtccaccctctggtagaaattgttatttactacatatctggtcgtttatcaggtcttgcagtcatactaaacaggtggtatacaaatgattgaagtcgcgccaacacaagaaaaccccaactaactttttaacttcggaaaattccagtttgaaaatcttcacacaaagttgggtaattaatgctaactctcactagcatgtcagtaacaataaattacactcttacacagatgcgtctaaacaatataagaagagataccagtttaaatatacagacttcagggaatttaaacagaaaagaaatcaataagtaattcataacttgtctattcaagaaattgtagtaaaaaagaaattcaggaataaaccttactgctaaccgctggtcgctttaaaattggtggtcggaccccaagttgtgtttgtgagttatctagaacacggaaacatccagcacgtctgatgtcccagaaacgtattgcaccatcacaccccccagtatacaaaacccactcgctggaagtagaccattccactgacataacaccatctggcatatcatcaaaacatgacaatttggtagcctggttctttaactaatgaattttgaatatgaggaaaagcatgagtaaagtagcttattatcgttccagtaatcatcaactgaatacaattctatataaaattttgatacacttcttttccaaagaaaaaaagaaaagtaacataccacggtgacccgataatgtgtgagagaatgccccagaagcaatatcacagaggcgaacctggacatcatcagttccagcagcaattaacgtgtgagacattgccatagaagacatggcagttctataaacctttccaggcattttaaaatccacaaccacctaaaacatatgaaaagacaaaaaatgcgtcttaaaaatacgaaaaatggaagtgatataccgtcttagttaaaagcttagtacctacctgcgaagtattggtatcccatacttttacgtaatgatcaaaagaacctgtaatgaacatcccagtgtcaatgggataccaaatggcagaggatatggcatatttatgtccattttcatgttgcttacggacagtaaaaatacacttgtgcttggcaattagaccacttgcctcgtaatcggtggcccgcttaacatcaaatacagcagctgaaccatctgctgctccagagagcagatatctcccctccgtcaaatcaacctgataacacagttaataacacaaccagctaccaaaatatggctactctagaagcagcaaactacataaactagattcagtcccagatcttttatatttttagtgatttctcagccaaagactgagaacaaaagtcacggataagaagagcaagaaacatctgagagaacctgaagggagttaacggagccacgatgaggagaaacaaaatcttttcgattagagagctggagagacaaaatccggcgggatttgaatcgattggcgaaggaattggaacgaaatcgaccggtttctctgtctttaaaagccttccacattctcctagcatctcgtcttctgattctcgtggatattaccagactttatgtgtatatatactcgagctcgaatctcccttgtccagctccaaaacccctaacaaaagctttgatcctcctccttttaaagttttgtgttagaaaaacaatgtcgcgcgataaccaacagcaatcgaaagaacaaaaccaaaccacctcaaagaacttgatttcggtattaaccggactaaccgtcggttttcatatcatctttggatttattttccggtatatacagtagttttaatagccaattaatttgttgatttaatttttctctcaattttttatttttttcgtagagttaataatttaccccaacaaaaatacatacagttagtcctaaatcttcactaatccactaaaaacaatatgtcaaagagaagcatccatatctttacttgctatcgaagatgtgtgagcttataaaaagaattttgccgagaaacagggataatagctaactgaggaatcgcatgagcatattgaatctctcaattttcccagaatcttcttcactgcctcaaaagaaatatgaggctttggcactcacatgatttatacaatttctaacctgcctctcagaaacataaggatgacctaatattatttgttgacttgtttgttttcgtgtcattgatccacaaacaaaaatacgggattattcaacatcctacgtttaagaaatttgcacaaacacggtgccaggtctcttgagatttggatataacaagataggagattaagagaggctaatagagaaaggcaattccttggtgctcatttcacgcattttacttagaatccagagtctacaaattgatacaacaccagaacgcaatcgcccgcgtttgaccattaaaatgtccccacactctttctatgacgctacatgcattagaacttaatcaatcttttaaatattgatgataagaaactacactacccatagtccatagacataaagaagctacacgcgacccattaattcaaatcacacatcctaataccagatcaattaagcagtcttcacacagaaactgaggcagccaaagtggtccagaggcatagctcaagtgtgcataatttatcctcttattaataaactcaaaaagacaaagtaacaattactaaccttcatggatcttacatttcagcttatcatctaaagattctatactagttttagacatgtttcttcgagtcatcatgggtgtaacagtttcagtactaaaacgctatgaggcattgaaacactctgatcaagcaaacttatttagatgaaaatgtacatgcttttcattgaacatgccaactcaagaagccattctttggtatcaagaaccctactagtgcaatcaagtaaaacccttttcttgatcaatcctactactgtatataatcctatgaacatagaggcaatccagagtctggcattgatccgaataagcaaaagagagcatcttgagaggctttcaatgtaaatgccaactcgagccgcttcgtattaagaacaacacttgaatcactagagtaatcttttatcatagaggcaatcaagtaaaaacccatttcttgatcaatccaaacgatcctatgaaacacatctccactatctattacctaagtttctgaaactttacacattgatcaaatataatgtatccaataataactgaaaacaccgaaacggagaccagaagaaatatctaaataccgattaaactatggctgcgatgggaacacatctttcacagcagaagctgccgtcaaataattgagtgtattcctcagcgtctccctctctctctttaacctagccgccgtatcttcaagctccagtaacgcttgctgctccatcggagctccttcaaacgtgcttccgacgaagaacgagaacggagtcggaaactgattcttcctcagatcctgagattccttatctggtttcccattcaatctattcgacaatcgaatcacttctttcatcagaacctcaacttcattcgccaattcgtccagattctcttcaccggacggtcgatcttcaagccacgtcactttcgcgacgaggtaaggtttcgtacggacgagatcggtgactcggaatcgttcctgacctttacagattaagaagaatcgatcgtcgactagacgctcgtgtttcacgatttctccgacgcatccgattccagctgcggagcctgaaacagcgtcggagtagacaacgccgaatctgagatcggattggagaagcgtttgcatcatgactcggtaacgaaactcgaagatctgaagcgggattgttgcgcctgggaagagaacgagaggtagtggaaatagaggaagctcgactaagtcatctgatttgggtggattcgcgttgttgtggtgtttctcggagaaggaagaggatgagcaacggaaggagaggagtttacagcttcgacggttgatgctccggtaagtagctggaagatgtagaggtttagggttgaaggcggagagataaggtggagttgatttgaaggaaggagatgagacagtgcttggaagcgccattagagagagtgaaggaggagaggtttcacaagtgaacggcgaaattgatttaagattttaattgtttcgtctttaaaattaaaccttatctgtttgagaaaatatatttcatcagatatttttatttcataattcctgtggctagaaatttgtttagaatagaaataaaaatatatacgagccatttggttcgtgtgtaagtgtgtagtacatgcatttgagacaccggtccacttggatatcatttcgtagtaaccatgaatttgcaggggtaattgtgtcaatatctcttggtcatatataggttacaaagatgaacggaagaaagaaaaaaaggtgatcggagattttggcttattctcagatttgggagaaatggcggcagaagagggtcaagtgattggttgtcacacgaacgatgtatggactgtgcaacttgataaagccaaagaatccaacaagctggtctcgattctcacccctttgttatgcaattctctttggttgtattggatttgggaattaggtttttgtttgattagggttactgtttctagtgtcaaagaaagcattatggtttcacatgttatggtataggttttgattccggctaacgtagagttggaataaacggattgttaaggagatcacaacattagatgtgagggcaagtgaatcatcagtgaaacttacgttttgatgtgtaaacttttagagtattttctttaattgattcatctttgtgacttttgttgtgttcctcttttccttattgtagctcagagtcacccctctggtaaaaaaaatcattttggattgggttatttaggattctgatggtgtgataatttcattgttttcagattgtgattgatttcactgcttcatggtgtccaccatgccgcatgattgctccaattttcaacgatttggccaagaagttcatgtcaagtgccatcttcttcaaggtggatgttgatgaacttcaggtgaacaaatacactttctttacaaacaaattaatctcctcactcttagactttagaattacactgatatattctatatacttgtgatgatgtttaacagagtgttgctaaagagtttggtgtggaggcaatgccaacctttgtgttcattaaagccggcgaagttgtggataagctcgttggtgcgaataaagaagatcttcaggcgaaaatagtgaagcatactggtgttacaactgcgtaaatcagtttgaggcataaataataaggtctaatttgtttatcttaaactagctagacataacgggaatagtgcagattggagatgaagtagaagttattgatctctgactgtcataaaaccatgctttttttatatggtctttggcttttgcctaattcatatgtttaggtgttctttctatacctccatagaccaccactcagtcgaattttcagatcagtgaaatagactcttgtgaatgaattgttccatgcatatcataatttgaatatctgaaatctgaggccttgcaaaggtgtaaaataattttgtgcgagcagctgtttccacgtgttataatttgattggaagttgaaattcttatccaccaaacgtttcatattttgttgccaacgaacccattaccgaggttcttcgtgctttcttatcttctttcttcttcgctgagcttactctgtaatcttgtgaactctcgttgataattcaaagaggaaacggagataaaggagaaaactttagagcgtgttcaagttaataacagttctgtcgataatggaaaagctcttcgtaccatcatttcccaaaacttttttgaattatcagactccagctaaagtagagaattcgcctgaacttcatccaaaatccagaaagaaaaacctatcattcaccaagaagaaagaacccaatatcattcccgacgagcaattcgattacttgtgtagaaacggaagtttgctcgaagctgagaaagctctggactcgttgtttcaacaaggttccaaggtaaaacgaagcacttacctcaaattgttggaatcgtgtattgattctggttctatccatttgggtcgtatccttcatgctcggtttggtttgtttactgaacctgacgtctttgtggagacgaagctgttgagcatgtatgctaaatgtgggtgtattgctgatgcacgtaaggtgtttgattcaatgcgtgagagaaatctgtttacatggtctgctatgattggtgcttactcgagggagaatcggtggagagaggtggcgaagctctttcgtttgatgatgaaagatggtgttttgcctgatgatttcttgtttcctaagatattacagggatgtgctaattgtggagatgttgaggctgggaaggtgattcattcggtggttataaaactcgggatgagttcgtgtcttcgtgttagtaactcgattttagctgtgtatgcgaaatgtggtgaattggatttcgctaccaagttttttagacgtatgagggagagagatgtgattgcttggaactcagtactgttagcttactgccaaaatggtaaacatgaagaagctgtagaattggttaaagagatggaaaaggaaggaatttctcctgggttagttacttggaacatactgattgggggttataaccagctagggaaatgtgatgctgcaatggatttgatgcagaagatggagacttttggtataactgctgatgtgtttacgtggacagctatgatttcgggtttgattcataatgggatgagatatcaggcattagatatgtttaggaagatgtttttagcgggtgtagtgccaaatgcagtcactattatgagtgctgtgtctgcttgttcatgtttgaaagttataaaccagggctcagaagttcattctattgctgtgaagatgggatttatcgatgatgtgcttgtgggcaattctctggttgatatgtattcaaagtgtggaaaactggaagatgcaaggaaagtttttgattcggtaaagaataaggatgtatatacttggaactcaatgataacagggtattgccaagcaggctattgtgggaaggcttatgagttgtttacgaggatgcaagatgcaaatttaagaccaaatattatcacatggaacacaatgatctcaggatatattaagaatggagacgagggtgaggctatggacttatttcagaggatggaaaaagatggaaaagttcagcggaatactgcaacatggaatctaattattgcaggttacatacaaaacggaaaaaaagacgaggccttggaactttttcgaaaaatgcagttttctcgcttcatgccaaattcagttaccattctaagtctcttaccagcgtgtgctaatcttcttggggcaaaaatggtaagagagatacacggttgcgtattgcggagaaatcttgatgctattcatgccgttaaaaacgctttaacagatacttatgctaagtcaggggatatagaatactcaagaaccatcttcctgggtatggaaacgaaagacatcataacttggaactcgctgattggaggttatgttttacatggtagctatggtccagctcttgctctttttaatcaaatgaagacacaggggattacgccgaacaggggaacgctttcgagtattattcttgcgcacggtctaatgggaaatgtagacgaaggaaagaaagttttctacagcattgcgaatgattaccatattattcctgctctggaacattgttctgctatggtatatttgtatggacgagccaacagacttgaagaagctctgcagtttatccaggagatgaatattcaatcagagacacccatctgggaaagcttcttaactggctgcaggattcatggtgatattgacatggcaatccatgccgcagagaacttattctccttggaacctgaaaatacagccactgaaagtattgtttcgcagatctatgcattaggtgcaaaacttgggagatcattagaaggaaataaaccgaggagagataacctgttgaagaaacctctcgggcagagctggattgaagtcagaaatttaattcacacattcacgacaggtgatcagtcgaaattatgtactgatgtgctgtatcccttggtggaaaaaatgagtaggctggataatagaagtgaccaatataatggagaactttggattgaggaagaaggaagggaagaaacttgtggaatccacagtgaaaaatttgccatggcgtttggtctcatttcgtcatccggtgcatctaagacgacgataaggatcttgaaaaatcttaggatgtgccgagactgccatgatactgcaaagtacgtctctaagagatacggctgtgacatattgttggaggacacaagatgcttgcaccactttaagaatggagattgttcctgtaaagattattggtagagtgattattgattagccaaccactaaggtacgacttaacttaatttcaacagtctttttaaccacatgatcacgtaatatatatatcattctcatattttttacagctataaaaagattattgagttagcagcatggcgtgggtaaaattagttgaagtttgaaagctaaattccaatccttgtaactaactacggaagttgaccaaaggttcattagtgcgtatttttgttatcttgtgatatatgattctttgaagaatgtgattcttttttccccccatgatttcccttggtagtggaaaccagaatgtaacgtgtattatgcaatttgatttgatatattccagaaaattcccaaccacaaacggaaccttttaatccatcataaattcccatcaaatgtctaagctatgtgttgcagtggtcagctatctgtttactcgagcttcttacacttgctttgagtctttagagatcatcttaatctgaggatggtattaacatcatcttatgttttctttcttcagtttctctatattaaaatttcaaccacaaaaagctgatattgcagttatgattatgtgagattaacttgatcttgtttctgcagagtgttgaaggcaagcctgcatcacttggcccatggggaggccagagtggtcatgcctgggatgatggaatgtacaccacagtaaagcaaataattatagcccatggttctggaatagactccatacaaattgagtatgacaaaaacggtagctcggtttggtctgaaaaacgtggaggaaagggaggcaagaagtttgataaggtatgatcgagactctttatcctataaatattgtgttggtggttctcagaaattaatcactgttctcttcttgctgtttaggtcaaatttgattacccacatgagtatctgatttcagtaaatggaacctacggtagctttgacgtctggggaactatatgtgtccgatcacttactttcgagagtaaccgcagaaaatatggaccgtttggtgttgattcaggtacattctttgcattgccaaaatcaggatcgaagattattgggttccatgggaaggctggttggtatttggatgctattggtgttcacactcaaccaattcctaaagagaataatccttcgtcgaaaatccttttgcactcgcatcaaagtttttctcagggtgataagaaacatgagtactcagtgctacaaggaagtgtagggcaaaactttgatatagttgttaccctcagaaagaaagatccaactttgccttcttttgagtcccgagattccgcaggagccgaggtcaccaaacataaggtgatgtcaagacttttctgttatacattcgaaaaacaggtcttattggatttttactggtttcttaacaattttttttatggaatttgttttatcagttggtgacagatactgagaagtcacagtcaaaaattgaaggtggcgcgaaaacatatggaccatggggcggaaccggtggaatcatgtttgacgatgggatttataccggtattcgacaaatcaatttgtcacgcaatgtcgggattgtgtcgatgaaggtctgttatgattttagaggacaagctgtgtggggaagcaaacatggtggcgtgggaggattcaaacatgataaggtgcgtgaatttgaaacgatttttggtctacttaagtttaattacacttcatatttcacaggtttaaatgtaacttgcagattgtatttgactacccttcagaggttttaacacatgtaacgggaacatatgggccgctgatgtatatgggacctaatgtgataaagtcactgactttccgcaccaacagaggaaagcatggaccttatggagaagaacaaggaccgtcttttacacatcaaatggacgagggtaaagttgttggattccttggaagagagggtttatttcttgattccataggtgttcatgttatggaatgcaaaataagttcccttaagccatcatctcctcacaatgcaattgttcctcataataactccggcactgcgcaaatagaaaattccccatgggctaataagctagtccttgcagcaaacggccatggcgaagaggtaacttgtagattctatcaccatggtattttccggtttttcaagttttcgatttcatgaatagcagccactgtataacaactctactatggctcagtttatatggtttcggttttaatacgttatatatatcttagccaaattaagacctgtttgatttttaaatcgttcgtttcaagtttggttcggtttatctagattaaacaccctaatagcagcctacttgttgggtaatcgttttcacaggttgatcgtggagtcgtcaaagaaccaacaccgagcgggcctggaccgtggggaggtgacggaggtcaagcttgggacgatggagtattttcagggatcaagcagatatttgtgacaagaggaaatgatgctatcacttcaatacaaattgagtacgataggaatggacaatctgtttggtccattaaacatggtggtgacagcaatggagtcgctacacacagagtaaacaacaatatttctcctttcacataaagctacttttgtgtttgatgctttagaaccatttctaatgctctcaaatctgtgttgcagattaaatttgagtatccagatgaatcgatcacctgcatttcagggtattacggacctctgaacaattcagaccgatataatgttgtcaagtctctgagtttctacacgagccgtgggaggtacgggccatacggtgaagaaaccgggacgtttttcacttcgactacaacacaaggaaaagttttggggttccatggaaggagtagctttcacttggacgccattggagtgcatatgcagcattggcttggcaacaataagtcttattacagcagggctagttgtttcaagctcttctgataatcttctctgcgcaacaagaaaacatctaacctggttccaccgacgcttacagttatcctctaaagagttgcaaatacatattcatgctcctaaacgcattgaatttactttccagttaaaaacactgtttctataaacagaataaatacgaaaactctatagagagtgtactgtaaaatgaagtaatattggcatttccttgctaaacttttgtttaatgatccgaattggttgttcgtgagtgaatttttgcatgttgcaacacttctctgagcacagaagctattcgatgagacatatgatgttccaagaacatctcttttaccctctcataccctttcttccccattgtattcctcatcttcacgttagtcgccagcttcacaatgtttttggcgagaggtaacacgccatctttaccagtgttgtgcaatagacctgttgttctgttcactacaatctccattgtgcctcctgctgcagtcccaagtacaggaagcttaaaggccatggcttcaattgttattctcccaaagcattctcctctggcttgggagttttggacaagaacgtcaatagctgctaaatatggtgctaccttcattgttttgttgacaaagtggacaattttttgaagtttcatctcttggacaaagttgcgtagctctgtctcaaatttcgtctgtgcgctcatatcgcttcctactaccactgcatgcattgttggtacctcaagtttcttagtctctttgattactttaagactttcatggaacgctcggaggaatagatcttggccctttcctcgagatacacctgcataagagaagcaccagtcagaaagcaaattaaccaaaattttgagtcttttgcagattatgattcttaaagaaactaaggaagagaaagaatgtaagaaatgactaactattaataatgccaaatagtatgtcttcattcctcactccaagagattctcgaacttgctcacggagaacattcttggcgaaactatcttcagctacttccatcaactccttgctatttcctaggtgcacgacataagttttaggcattttaatcctgtgttacaacaataaaagaataaacactgttaagcttatgacaataacgtaaactaatatatcgcaagactctacagagaggaaacagaccctaagcgatcatgagttctgttcttccagtattcagctgttgcgtgcgaatcaatcatagcacctgcaacaaacggaaggtgcttgactaaatccggtttgaaatagtgacctctcatctcatgaatccaccagagtactttaggaagaactttaggaacattgtccttgagaactgcatcaagccatttcccagcaacagcagtgtttaaaacaaccagatcagacttgagagctgtatctatagctttctgactctttgctgatatcacctgaatgattcaaaaaagattgatcactaacaattatgatacgaatcaaagaaaaacaatggaggtggttagctaaatctgaacctggactcctcgatccaacatcttgtgttctagaaccttgatcacttcatcttcttcaactggtttctgattcgtgatccaaacaacttcagattcaactcctctaagcaaaaacgccaattccattaacaataaaggtccacctaaaatcatcacttcaagtttagccatagagattttgacaagagagtaacacgatcacaaaacatcacctgagagcgagagttcatgagaaacaagtaaaacgagctttgatttcatgaactcgagaggattcaacgatccagaaaccgattggatcttaatgtcactgttatcttccttctctcggctacatctctttccactaacactacaggaatcaaaagtagatctcacgagaatcattcctactgttgatacagataaaaccaatagaatcatcagtggccatctcttcttctgcaatgttgcccacatactcgttgatggcttcgccattgtttctctctacagcttagaatcacatcctagggtttacacagtaacaatcgatctcagaactttctaaggatctgtcgtcagtgatggagaaagcttggaacgaagaagtttagaggagagatttaatggggaaaagccgctaatcagtgttgactctttgcagaagtttgcaattcacgccgtttttgttatttagaaggaagttgattgccgtttctcagcaggcccccgatggaatcctctcttcatatttataatgggctttaaaaggcctatttgctaaaagcctaaaactaaactagttatgatgatagttaatgcatactatatggttttaattctttttttttcttaagctaagctaggcttcagattagttttgctgatacaattttggtttggttttgtttggttctaataatggagagcataatgatttcgatccatagaatataaatgttacaaacatgaattttagtggtgatgatccgtcttcatatatggtccaacaatgtatgtggcaataaattcttttactttttgttacacggccataacttgtggctatttattataaagttttttttcggatatatccatgtaattaatatatttgacaattggcaagaattattatacttcaacattttcctccaaaccaaaggttgttcatttcttactcacacacattttcctcgtttagcatcatcgattcatcctcaactttaaaatatgatttacagaaccatacggttttaaaaataattacatcattaataatctaaatttttagtagatttaatcaatctctcaccagctaactgcctaattaatttatttttaatcatcattataaatcaagatccacgtggaaacaaaagtcaatatcatcatctctcaaagactcaaaacacatgaataataattttccaacacaatggtacttgccaaatgattttgtgtcggctgctctaaatccaatctccaacaaaccaaaacgaaactacttgttattttaaaaatcagaggaaatggattatattattagtgtagctataaagataatcttttacgtattcttcattgtggaatatgcaaatacaaacatgtaagtgtataactaaaaggtttataacaaaagaaataaaaagacaagagaacttagaataaaaattgggtataacagaagagtaaggagggactcaccaactggttgttaagtcatttaatccatcaattaagcaattgagcagacacacacccacctttgttttatcttcttccttaaaccagcttatcagggtcagttttgtaatctcatattcctacctataatgacgtttctatgttttatttgatggagtttaatttccgctaccatgcataactaaaagtatatccgttatatcaaacatttaaagaaaacctcaaagatattgaactacaaagtgctcaagaagttctattaaaaatgtatcgaactttaactttatgatgaaagcaaggtgataagaacaaatagtttaaaaaaacattttagtttgaaatccaaatctagactctataatttgtggcaggtaataatttcactattttggagcctcacgtacacaaatcaggaagtcgttaaaagtttcccacgataccatggtaatgtacgcattatagattatttcgtttaaatagttagatttggtttttttttttaatatacaaatactaaacttttcatatataaacactcattccttcaacttttttcttttggttgtatttagttaacttatacggaaaagtagtatgagtctcaagtcaatgacaacacaacatcattaaagtataatacaatcatctataaaaatccatttatttgtgtgtgtggaattgttaagttttgtatgttaaagtcgtcataagaaatattatcacgtaatcaagaaaagaaaattggtgatttgtaagctctcacgtgtttctctatgaatggttggcacacaaaaaaaatcatattaatttatctttactctaagcatcagaaacagaagcttctgccgcaaaaaattaaaaattacaggtagcggttgtcaaatttttccggtagtgatcattattttattttattgttgatattgcataataatatttttaaaaattgggttggtgtctaatgtcccaatgataagttgggttggttttattgttcttgtggactgaaaaaaatttgtttatttaagaattttgcaattattaatcgcctctttctctatctctctcgggattgggtctcaaatctttttttgtcttcaactgttcgaaactcttctgcttttgtgtttcctgattcagccacatccacactcacaaacacaatctctaggttttttttcttccttttaactttgattctctccctcaggtagtttttaaaaattcaagttcttgattcttgattcttgatatgattaatcttgtactgtgtttcttgattattattttttgtatactttctgtgttttttttctcccttgctttttggaaattctcctacaagagatgaaatcatcaagacactttacttctttatgtaataattgaatcttctctgcttttgactcactacgttgagctacacaatttctttttactctgcatttttttttccaacctcaaattagggtttttttctcctctcaatttcacctccatagatcgggtattcctctacgattacacaattcctgtattgggtttttctgggtttcttcagttcttcacgaaaaacatttgctttttatcaagaatttgactttaatcctccgaataatttggtccgattctgtttgttgctttcgaaactgtttatgtatgatatataaaaaaaatggtttggtgtgaaatgattacgatgttttaacctctcttagattccatcagaaatttttaaaattccacaccttacacgactcttcttcctcttatttttttgcaggatctcatttcccgaccaaactcatcgaactaagaactcactgtaataaaacttttaaaaggtgtaaacaccaatggcagtttattacacaagtaatgtcggttgttaccagcaagaaccaatctttctcaaccatcaacaacaaaaccaacaagcttcttcttcatccgccgccgcttctttcaccgtcaccggcggcgatactgttcgaaacgagatggtttttatcccaccaaccaccacaggagacgttgtaacaggaaacggtaccgtttcaagcagcgatctaagctttcacgatggtcaaggactgtctttgagccttggtactcagatctctgttgctccgtttcactttcatcaataccaattggggtttactagtcagaatccttcaatttcagtcaaggaaacgtcaccgtttcatgtggatgagatgagtgtgaagagcaaagaaatgatcttgttgggtcaatctgatccttcctctggttatgctggtaatggtgggaatggcttctacaacaattatcggtataatgagacatcaggagggtttatgagcagcgttctgcgttctcggtatcttaaacctgctcagaatttgcttgatgaagtggttagtgtcaagaaagaactaaaccaaatggggaagaagaagatgaaagttaatgactttaacagtggttctaaggagatagaaggaggaggtggtgagttatcgagtgattcgaatgggaaatcgattgagttatctacaattgaacgtgaagagcttcagaacaagaagaacaagcttttaacaatggttgatgaggtaactaacttacatttcataaaactacctttggtttataacaggattgatggtgatttggttgttgtggatgtgttaatggttgcaggtagataaaagatataaccaatattaccatcaaatggaagcattagcttcatcatttgagatagtagcaggacttggatcagctaagccttacacatcagttgctctcaacagaatctctcgccattttcgtgctcttcgcgacgcaataaaggaacaaattcagattgttagagaaaaacttggggagaaaggaggagagtcgttggatgagcaacaaggagagaggataccaaggttgaggtatttagatcaacggttgagacagcaaagagctttgcatcaacagcttggaatggttcgacctgcttggagacctcaaagaggtcttcctgaaaactctgtctctgttcttcgcgcttggctctttgaacatttccttcatccgtaagtgtttcttctctcacaagtcacaagtcacaatctttcaatctcccagtacaaaacatttagagagactctatgtttttcttctgttttttttatttgtagatatccgaaagaatctgagaaaatcatgcttgcaaagcagacaggattgtcaaagaaccaggtataaaccaagcttttggtcttcacttaaaatttgcaccctttgtgttctgcttgaataattctggtttctctgctaaatgattaggttgctaattggttcataaacgcgagagttcgtctgtggaaaccgatgatcgaagaaatgtataaagaagagtttggtgatgaatctgagttactaatctccaaatcttcccaagaacccaacagcacaaaccaagaagactcctcatcgcagcagcagcagcagcaagagaacaacaacaacagcaacctcgcttattcatctgcagacacaacaaacattgtcttctcatcagaaaccaaaccagatcgtgttctaggcaatgataacgacccacagcaacaacagataaaccgctcatcggattacgacactctgatgaactatcacgggtttggtgttgatgattaccgttacattagcggaagcaaccagcaagaaagcagattctccaattcccatcacttacacgactttgttgtgtgatattatctggttcttcttggtacagaggagatgattcttgaagcgcaagaaatgtgcttttgcatttttatagtattaggcataatacacccattctctatggattatatagtagatgtgtaggttgcttttgtgtatagtagactcttaagccaaatattgatatgtgtgtataataatattcacggtggtataaaggatacttgcaagtgtgaaaaaatctgaacttgagacttttgtggtaaatgtttcacgattctttatagtatatatcactggactgtaaaaacgaaatgcagtccttgattttgaaaacaaaacggcacgtagtttctttgtactgtgaatcagttaaagtacaacagaccttggagtctctcagtcctccgatttcaatggcggtttttcagttaccaagtttgtcaccggagattcctttccgttttactcccacaccacttaaattttcaaatcgtaggagaatcaactttttccggccattatcagcaaccgacgattctcgatccggtgcaccagatccagaatcgccgaaccaaatgttcattctcgggatgggattcgtcggaggtttttttgcgcaacagctcaaagaatcagactggtctgatatctcagtttctctccttatctctatatctatctattttcatctttctccgatggtgttaacaattttggaggtttagggtggtttcagggacttgcaggagtgattctaagaagaaagaatgggaaaagagaggaattaatcttcatccattttctgcagactcacctgagtatttgttttaatcagatcttcaatgatggtaatctctaaaatctgagtcttaaactcttttgtttgcttgttaatcagatggagcttgctagattcagtgaaagattacactcatctactcatttccattcctcctttagctgacattggtgatccggtttgctttcttctccagcttttatcattagagcttaatgtgatttcttatttgataacactgtcttaactgtgatgacttccaaaagatgttgcggaatgtagaacttgtgagagacaagctttcgagtggaaatcttcgatggctttgttatctctcatcaacaagtattttcctttttaactttcctcattacatcaatgcttctgcttccacagtagacaggaacttacaatacttctctttgatgcttgcaggtgtgtatggagattgtggtggtgcgtgggtcaatgaaaagtaagtttctttcttccaagtttcatctcttttgttcatgatagataaggtcgttccttcatattgcagtcatctcccaaatcctaaaactcagtcagccaaagtgagattagctgcagaacaaggatggttaagcttgggtcgtgatcttggggtttcgactcaaatacttcgacttgggggtatttatggacctggtcgaaggttgtttacagcttctgattgtgtatgtagtgcttaaacaggctttaaaactgattctcaaaaggaacgtttcttgctgcagtgcaattgataccttgttaaagcaggagcgtttgtctgaaggtcaaaagagaagagcgtcccgtaaattcacgtcgagagttcatgttgaagatatatgccaagttcttaaagctgccactgaaaagccagcatcagggtttgtgtatccctcttcatctatgatcattcttttgtgatggatgattgaaccattgagacggatgaatcaaccattttggcagggagatctacaatattgttgatgatgatccggcagcaagagaagaggtgtttgaatatgccttggagttgatcgagaaacgttggccggggaatatcaccacaaaaccatttccatttctgtatgaatctcgggaggaaagttcattgagaggcgagaaacgagtctgcaacgaacgcatgaaggataaactaggagtgaaattgttatatccttcgtataagtcaggactgcaaagcatagtcgagaacatggacaaccgtttttgagcacaccacaggactaaattccgctgatctgaatctttcctgtggagaattagggactctttagtaaagatagatttttagtttatccttttttgtttcttctgcattctacaaaatgacaagtttgtttcattggtacacatattttccccatgtgacatttaaacatggaataaaagtaaaaagggatacaaaatgtttaagggagcttttctctaatccaaagccagtcctattttatgtcatgttgcctgattaaggccctgaaatgcggaaaaagaagtgttagcagttgagaaacttaactttgtttagatggaaagtgaacatattgagtctcgtatggatattttacctcaacgcttgaaaaagaatgacttaatcttttattactatgtctggaccaaaagctcttcttcgaggtagaatccctggctttactccacttggtgctgacggaaccgaagtgccatttcataaaagacttagacgtggagcctttggtattcgaactaggatccatcttcagaccttttccttctcgtttccctagattctggaacataagatcctcacattcactgcggacataactatctaccacacggttcttacaccttttgtaactcgttgccttcaattctgcctcggcttttagagctttcctcgataatttagtaacctgtgtctctgtgcatatgggacacgtaggatcatacttctctgtttcatttgtcattgtctctaagcatgccgcatggtaaacatggccgcacgctagaacagcaggaattggaaggtcaaacctggcaactggagacctttcagttaaaagctttgagcaacgcccacaagtctgctgatcaacagaaggggagcatgagaatctgctactactacacccacttagtcttcgtcgtccggaacctaagtgctcattatcaaaagaccatctctccctttgagactgagccacgagctcacaaaaggcgtttatggaccagccaccttcagaagaagcaaaatgggacccagtggcagtgtcattactacaggtcgaaagcacaaaggacgaccttccttcagatgttgagtaattattgggagatttcaatcccaaagtttgactatcagaaacctgcctaaacaactgctgcccaggtgaacctcgagcacgtctagacggagttgatctgggaggaagtgaatgtgtgtgagctgaaggaagatcagagaccgaggtggaacttgacggatttggtaaaactgatgaaacaatatctgatgagtcaactatattcttcacctgaagaattaaaagacgagagggttaagagactctgaagggacgaaaagagactctgattggagtaagtaatgatctcacctcaacacgaacaggacttgccaaggatacatctgcccagagaaaatagatgcatgagagacaggaaaaaaatccttcattacagtaagaaaataaagctgaaatgatctctaccaaaaaatgaaatgtctctcgatctaatcctaccaaataaatgttgttacccctttgactggattgagtagactggaaaagaacatccacgaaggaactaaaatcgactcaacagtatattcccaaacaatgaaactgaaagttctacactttccccacaaaaaaagtgtttgaacgaacatacctgaaggagatcgaatcgccaaacttgtacccgctaaaggagctgtaaccatcgaagctgtgcccatctctgagtctgcggatttctgagagccaagagtagctaaacccccagtttcagatgacggaggtcctctctctaagcctaacgacaacttatcgatgtcaatacctctactcccaacattatgattagatgaatctttaatctcatcagctacacgcctcctgttgtcccgtcgaaaactccacgatggtgaacacactgaattatcaatagctccactgggaacatttctgtcctttgcagccacacagcaaacagaccccataatccttaaaagagagctgtaatgaatatgtcttacacaatctccattggtggtgcttcctaatctaccactgaagaacttatcacagtagcaaaccacaattctgcatataaacaaacagaatgtgaacttcgaatcagagccattataatacatagaggtgaaggcagagacctcaaaatctaacgcagaaatcatcaatggaacggaattaaagtaaatacaatagatgattctaaaatccgggggttcaccagggactcaccagagcaactagggttccgcaggattgaaacgaggtatatgaagatgcggcggaattcgaatccaacggctgagagagatttcaattactcgacggagatggccgccgatctgagagagagagagacggaggttgggtgcgtcgcagggaaattgtgccacgtcacccttcctctcttctttttctgttctctgtttttcttgtgctactatttgtttttggtcaaattttacttttttggtcaatttgtttcttttttttttacataacaattttttttttttttttactgaacaaacataacaaaatgttttttttaacaaacataacaatatgtttcctaatgcaatttgattatattttttagtagtacttagtaagtcttggtatgtgtttatggacacatcgttttcgggaaacgaattaaattgtactccgaaaatgataaatgcatggagtaattgtataccaactaacttgtaataatttgaatcaacacatgctcttttgtttacgcagcccatgcatttatcgttttcgaaagtatttaattcattttgttataactacgatgagaagccgagagaaccacagaattataatgaatcggataagaaaaatcaacattctccccctataaatacaaaacaactagctaaagttcgaaggattcatacataaatcttcaacacaactctttaattatctagtttaatacaaatggcggcgatagaggacagtccaacgttttcctctgtggtaactccggcggcttttgagataggcagcctcccgacaaccgagataccggtggatccggtggaaaatgattcaacagcaccgccaaaaccggtgagaatcacctgtccaacagtcgccggaacttatcccgtcgttttattcttccatggcttttatcttcgcaactacttctactctgacgttcttaaccacatcgcttcgcatggttacattcttgtagccccacaggtacataatttaactatacaaaaaataattatgaatcatttaaaaggataacttacggtatgtaacatgtaacatgtaaaacaaaatgtacattaattgagattgattgttacgtgaaaagatataagttaattttatattcttgaatgacagttgtgcaaattattgccgccgggagggcaagtggaagtggacgatgctggaagtgtgataaactgggcatcggaaaacctcaaagctcacctaccaacttcggtaaatgctaatggaaaatacacctcactcgtgggccacagccgcggtgggaaaacggcgtttgcggttgcgctaggccatgccgcaacattagacccatccatcacgttttcagctctaataggaattgatccagtcgcaggaactaacaaatacattagaaccgatccgcatatcttaacgtataaaccggaatctttcgagctggacataccggttgcagtggtgggaaccggactcggaccgaagtggaacaacgtgatgccaccatgcgcaccaacggacttaaaccatgaggagttttacaaagagtgtaaggcgacgaaagcccatttcgtggctgcggattacggacatatggatatgttggacgatgatttgcccggttttgttgggtttatggccggttgtatgtgtaagaatgggcaaagaaaaaagtctgagatgaggagctttgtaggtggaattgtggttgcgtttctcaagtatagtttgtggggtgaaaaagcggagattcgattgattgtgaaggatccttccgtttctccggccaagcttgatccttcacctgagttggaagaagcttctggtatcttcgtctagatttgtgttatgtactattatcagaggggtcttgaatatttgaaaaacctatcaatgttttctagctccaagctagctattgttcatgtcctaagttgcatgtgtatttttattaaactcgatcaaaacatttgttatagttttaccccaaaactttacagcttcttcttatactaaaacctaaacacatttaaatagctatataattctctatataattcttatataatgaaatgtgaccaagcttttcaacttcgttgcaatgattcatgtaatttggtttaactccgtcacaaactctatatctttgtaacatacccttattcaaactttcttgttgtattctaaagttaatggtatttgtaacatatcgcaatttcgatcttattttcgtaaggagaaaggaaaaatttgctcctgcactacaacatttaatgagagctccaaactctacaaacaagtcaacaatgacaaattaatttgggcctgcactacgacaacgatacagcaaaatggagacaaaaccacatttaaggttttattgtaggcaaatggtcctaagattgtctgtatacgaaaggtgcgtcgtgagtctcgtgactcttgtgtatgtggtggttattttactctcgagttccacgtgtgtttgttataattgttagtatatacgaaagattgttagttataaccaccagctgacctgctgaagaaaggaattgagatgagccgaaaaggatcgagtcataaagcttggaccggtagatatttaaatgggcctaggcccatattggtcatttactttcaaagtagataaaacagtttcccacacatcccactaaagtcacatccaaacattacaaaaagaaaaaaagaaaaaaaccaccttatccataaccatccctgacacaggcgccgtacacgtggcgtccattaggcttaatttaatcggtgactgttacttgatgacttgtcagttttccacgagttaacggttcacgtcatcacggctagacactgaattc

SEQ ID NO: 11 - DNA, 68986 bp, Arabidopsis thaliana
aagcttaagacgaaattcaaataccagcactatggggagctgactctttggcctcaaaagcttggcatgcttttgatacttctttgattgtatcactcatatatgggtggagaatgtatgattcgtcaaaatcatgaaaagtgctttgcacctacacaaaaaataatagaggaacgaatattagaacaaatgcaaggaacaaacggcagggttcatttttccagtatggcaaagaaagatctattgataaaaaattcagtagacaaaagagaggcaaggagaagacctttgcttcataaacagaaatggtattgcgtatcatcccagcaatttcttccaaagaatgacttgaatatctcgcttcttccgccttctcctcagctttactggctgaagtatcattaacttgggaagactaaattggtagaatcaaatcaaagtaaagattcacctccatttgaataaaggacatatatgtactaccctcagcgtatatcatgtaccttggcaaatttcccagtaaaaacagaaagagctgttttccaaaacgtagggagatgatatacgattacagcagtcaatatcttgatgtatcttcccctcaaagcatccttttctctcctcgctgactcttctaatggttggtcaacttgaacttgattatcttccatagaagacgtgtcatctgactgaaggattgaaaagaaagtaaaaaaatttaacacctttaaacctgaatcttgcttatctcgcaataatatagctgccttcacaggtgaactcacaagttgaacaccattttgttgaatttgtcgccacttcgcgtcagagagagctctctcatgcacctggttgcgcaaaatttccatccttgcttcatgatcaaatgtacacttttcaagcatcccatggatcctatgattctgataaaagaaagaaccaagccagaaaaatttatatacatagtctaggaaaccatatataatgtgtatttttgaagaggtgtcatgtaagaccacaatcatgaaagaaagagatgcataatagcagaggctaagagagaaaccttcggatattaaaatcaaaagtatcaggaatccaaacactactcagcactaaacaatggaaaaccgtagtgaaaagaaaaacatataatacactgacctgaacatttaagtaatgccaaacaggatccgattcaggctccagttccagcaaaagcctcacagtgttttccagctaaattaagcaaaaacaaatagcattaagcagaggaaaagaatggggagacaagatacatgaatgtttattataaacattaacttgtgactcatagtcttacaaaagggaagcatgaaaacttcaatcattctacacttgggaactgatgatgatattataacaaaagaaacaggatcccaaacatattacaatgatggaatgttcattcattccattagtaatccacattagaatagaagtggtaatagtgaacttacactcgtaaaatctattttcggatcttccatagacctgtaaagggtgcctttaaactcctgcatcactttctcaacctcctcgagtacgcgcttgagtaaatttacctgtaaccaaagtgttactctatgctttcaagagctttgtaatgcaagtgaataatatggtaacaaacaagcgaatactaggagaaacatgagtgctatctgtctgaagagttggataatcgggcatgcatacatgagaagggagagcaatagacttcgccttcttgtattcccgaacagccaaatcatactcgcctttgctaatactactacgaattatactgggtaaattgaagagtgtacggaatctctgaagcattccttgtacagacctgatcttctcagcttgggcctatgaataatggtgaaaacagtctaagcagatagcaagaggctaggaaaacaccaaaaaaacaatagtacgtgaccatacaaacctgtctctcaaaaagtggctcaaaagcacgattagcccgtgatgtcacactcttcatacaattaaacaaatgagtagttcccgatccgtctgggtcgtcttcaatccgtttcagttttgattcaatatctgtaaagaaaggcagtaatgttcacatcaacaagagagaagagtaaagttcaaaatagataattgagtgtaataatgcataccatcaattgttgttttacacgagacaaagcagtcaaaattatctttcaccaattgtttcctttgtagattacggccctttaagtcacttttcagggcaagggccccagattctaagtctgctgcacttgtctcttggtgaatgcgagaaataaatagcttgggatcgaaatggtcagaggtgtacaccaacttttctgcaaattctcagaccagttaaagttagaaaaccggaagttgtacatcgagtaatcccgcataaagttcaaatcaaactccaaattccaagtatggtcatgaagaaatacatacccctaagtgcattatccactttctcagcttttgaaagactttcagatgactcagtgattaatctcagtgtcttgttatctattatcctacaaggtacacaaaagccatatttagataccccctaacatacagtgttccccgagatagactaaggtattcgaatgacggtagaggtgagcagcacaaacgagaggaagtaccccaattttagcggatcaatgcattccatgccacgagggaatgattgcaaactggtaagaaccactttcttgtcagctccagatacctttctatcaaggttctgagtcacggatggtgctgttctcgactcccgcatatcacgaaccttgcgtgcaagctgccaaatgtcattagcatttcagtaaaaatgttcatatttccaactaaatttttcgtcatgccatgattctaaaataactaatggccttgagctgaggtcttctacacctcaattccatgaacagataattaaaggccatacaactaatatcacatatacgaattgattcaatttcaaatcttcaaatcgatcaaagaagcaaagattacttaagactacttcaaatcaaaacaatgcaattgaaattcgtaggtcgaaattgcacacataatctctccaaaatcaatttaaagccagataaatccaaacatgatagaaaccgtacctcagcttcattaacccgtttccagcaatctggctccactccatcccaagctctatcatcttccttccgcgctcgtcctctctccttaccacttccacctcttcctctacctccgccaccgtcaccaccaccacctcttccccgatcatttccctcatcttcatccccgctcgaaatgctaagcaattccacctccgattcatcatcctcatccatcgatggcttccttgacgccttcgcacctcccttagacggaggagctgccgccctcttttgtctccgtggctgctgcactaaattggtgactggcttacgggaattagcggaaggaggcttctgataggtaacatctctctgagattgctccttcaacgccatttgaagtagctcatcttcatctaaatcatcactgctagacattgttatctctgacttagatgatcgtctttgtcttcctcccttgagctaatcgcagagatctgtgcagttcttatttgaatttagttttgtgactttttcctttgaagaatttttcttctgttttcgactttttccaatttccatgtattaatgaaataaaaactggagactcacaaaacgcagtcgttgattattttaacctaaaagttataaattctccttactcaagctttcttcttcgatcgaaatttataaatacgacgcgacaaacctgaattgcgttcagaaaccctaaagctctcaaatatatctctgcaacgaaaagaaatcacctgcttactcttctcctgaaagacctgatcttctccggtgaattgttttttgttccgtcaatcttccgagtttgtttttgcctaatatgaagttaaacccattacagaaaaaggtaatcttctctatcgctctgaacattgtagttgattttgttgatttattgttgttgtttctagagttaatgatcggataccttattgtatgttttgttttcggtattgggggttaatcacaggctatattcatatttgatttctatcaatggatccgaggaattcgagtgcgtggggtgggggtgatggtctcccccttatctcatccatgggaggtgttgaatcaaagaatagatgctgtgtgactgacgacgatggctctattggtacgaagctatgtgagaaacctaaagctgaggagattgatttttctgctcggaaaaagaagttgaaatcgaagaaaggcgggtctgttagctttgctcttctcgatgttgaagatgacaaggaggaagcagaggatggagacgacaaaaatccttctattaggagtgatgaggtggttggagaaacttcaatgagtaagaaaaagaagaaggataagagtggcaagcatggggtatgtgaagaagatgatgatgcggacaagattcttgctcaacatgggataacaactactgtttcaacagggcctgaagcggagatagctctagctcaacctgagcaagttgcatctgcagatggggctgttgacaaggacggagaagaaaagactgttgagtcagctacagcgaagaaaaagaaaaagaagaaggacaaggacaagaaagcaagtgcttctttagctatttcttctgtggaggctaaggaggatagacaagggaagaaagatgtaaagattaaagtagcggaaaagaaagttcctaaacatgttcgagagaagcaagagactcttgcgcggtggaaagaagctgaagatgggaagaagaaggaagaagaagagagattgaggaaagaggaagaggagcgccgtatagaggaagagcgagaaagggaagctgaagagattaggcagaagagaaagatcaggaaaatggagaagaagcaagaaggcctgattctaacagcaaagcaaaagcgtgatgctgctaagaatgaggctttcagaaaaagggtgttgactgatgctggaagtcttcttgttgcagataaaaacggtgattcctcaaaacgtcccatatatggcaataaaaacaaattagcttgcaaaaaagcaaacgatcctgcttctgtccaggctaaaggtgatggggaaaccaaggaaaatcatgcagcagatgaaccatgtactttacctgacttggtttcagttgaagatagaagggttggtattatcgaatcagtagacacagaagagacacatgaatctgttgatgtatcacaagagaatggtgatgaggaagatgtgtgggatgcaaaaactaattttaccatcaagggtgattctgatgatgaggaggaaaaacctcagcctgtgttcaagaaaggtttaaaagacactgcatcaaaggcacatgattcaggtcagtagaaacaccctaggaagaagaacctcagcctgtggttttattatcttttgtctctgatttatctaatattttgggtttcaatacagttcctggcgcagatagaccaacagtgaagcctggaggttctggcaagccaaaaacagctgccaaaaaagctatgcctaaggtggatgatactacccggccgaaagatacttctaaaaaggatgaaggcttagtactgaatgaacttgctaaagaagtagaagaaaatcttcgctctccaatttgctgcatcatgggtcatgttgattctggtaaaacaaagctgttggattgcatcagaggaacaaatgttcaggaaggtgaagctggaggtattactcaacagattggtgcaacctttttccctgcagaaaacatccgtgagaggaccaaagagttacaagctaatgctaaactcaaggtgccaggtatattggttatcgatacacctggacacgagtcattcacaaatctgcggtcaaggggttcaaatttgtgtgaccttgcaattctagtggttgatataatgcgaggtctagagccacaaaccatagaatctcttaatcttttgagaagaaggaatgtaaagttcattattgccttgaataaggtgagacttcttgtcattctgttggcatgtgtttggtatctttattgtcactgatgtatggcacaaaacctccaaatttcaggtggataggctatatgggtgggaaaaaagcaagaatgctcctataaggaagacaatgatgcaacaaacgggagatgtggttaaggaatttaaaatgaggctaaaccgagtaagttcttcgtctaaaggttttaatcttttagtgtgaatgggatgtgcgtgttctaaacttattaactaatattgtttcatttgtgttccaggttcaaaaccagttccaagaacaaggactcaacagtatgctttattacaagaacagagaaatgggagaaactatcagtatcctacctgctagcgctattaggtctgaaatgtttttgctatctccaaattttagtctaacatagaggtcaaccatgctaactaactaattgattaatgttggatactgatatttcagtggggaagggattccagatcttttactgttcttggttcaatgggctcagaaaacgatggtggagaaacttacatatgttgacaaagtgcaggtttgtctcattcctcttttaggtaatgaatcgtttctgcactacttcagctttcttatcttttcttaaaatggtgacagtgtaccgtccttgaggtcaaagttattgaaggccatggtattacagttgatgttgttttggtcaacggtgtactccgtgaaggtgatcaaattgttgtttgtgggtcacaggtaagtagaaaactcatgggtcatacctaaacatgtaatatgccaagtatatcataaaactggagacttgatgtaattggtttatttttttcctttcttctatttcagggaccaattgtaacaactattagatcattgttgactccttatcctatgaacgagatgcgggtgacggtactttcagatagtccatttcttgcctcttgttattattattcctagggaaacatggtttatgcaaatagctttctacattcctttttcgtacacaatgacaatttttggtctgatatttcagggtacctatatgcctcacagagaagtaaaggctgcgcagggtatcaaaattgctgcacaggtgattgtctctgacattacaattactttattcttaccttgatcttaattacttagcacaaatgaggacatcctgaacaaatgtttcctatatttttggtgtttataaaagggccttgaacacgccattgctggtactgccttgcatgtgattggacctaatgaggacatggaagaagccaagaaaaatgccatggaagatattgagtcagttatgaaccgcattgacaaaagtggtgaaggcgtttatgtacaagcatctacattagggtccttggaagcattgctcgagttcttgaagtcctcagatgtaaaaatacctgtcagtggtattggcataggacctgtgcataagaaggatatcatgaaggccggggtaatgctagagaagaaaaaagagtttgcaacgattttggcctttgatgtgaaaataagtgcagaagctcgtgaacttgcagacaaaatgggagtaaaaatcttctgcgatgataccatctattgtctgttcgataagtttaagagttacatagagggtatcaaagaggagaaaaagaaagaaacagcttgtgaagcagttttcccatgtatccttcagattttaccaaaccatatctacaatcagagggacccaattatccttggagttaaagtcaatgatggaatactaaaggtatatggtattttctcattcaggatctgagtacacttttctgctggatcacaaagatctaacaatacggtcttgttgatttaggttggaactcccatttgcattgttaaaaggattgagaatgtaagagtgtttatggacattgggcgcgtctcatcaattaagaataacaacaacatgccagttgattatgcaaggaaaggacaggaggtggctattaaggtatgagatccctctttttgtcatcatttttctagtttttactgcctttccttaaaaactaatgtttgttttcgtattagatcattgcttctaacccagaagaacagaaaatgtttgggaggcactttggtgtagacgacaggcttatcagtcacatttctagtcgatccgtggacgtaatcagaactaattactgggtaagttgtatacagtctttcttgccctgggttgtcaaaaatgttgttttaacattagcttgtgttttagtaaagcttaaactgatattcgaaacctgattgcagaatgagttatctaacgacgagaaggatcttgttttgagacttaaaaggatattcaagatacaatgaagatttttgagatttgagagtgagggacttaaacttatgtattttttttctttttttgaagtgctgatttttttatttttttttcgtttttaataatatagacaaacaactcctttaatgcccctaaatactttatggaagcaattgtcttttgtttttggctaccaatattttacaaaatattttgatatacatataatttacaagataatacccagactggcttattgtgtaacttaataacatttgaggcgaatctatgaataaagagaaataaaggacctattcacagattcagacaacatcgtcgcattttgattttgaatcgattattttacctacactcgtgtatgagccagtcctccggaataagacaacatctccaggagtctctacgaaattcttcggctctcaaaggtattcacgacggtcttttagctctattctctattgagaacctgatttttccggtgaattttgattattgcaaagttggagaatttttgagatttagaagagatactggcttaggattcgtattcatgtcgagcttattacactgtagaaatgtcgtagattgtgcgtttacttcttccactgttcgtcgcattgtcaatttagggtttttagtgggtagaataagaacgttgtgttcagtgtcacaagtgaaatcagagaatctcgaaaagcaaaaaccatgtttggaatcttttacagtttcttatctcgtggattcttgtggactgtctttggaatctgctaaatcgaattccagattcgtcaaattggtttcgtccaagaaaccagactctgttcttgctctcttcaaggaccatggcttcaccaatgaccagatcaccagtgtcatcaaatcctttcctcgtgttctgtcactgagcccggaagatgtaatctcgcccaagctcatgtttttcagttctatcgggttttcgacctcggatactgcgaaaatgatctcttcttccccgaaaatgctatcatatagcttgcacaaaagattgatcccttgctatgattccctcaagagcatactcgttgaggaagaaagtgttgtcaagtgtctcaagcgtggaatcagatgtttctcattgaagattacacattgtgtgtctcttcgtgtctccatttgtagagagcttggagttcctgacaaaagcatcaagtggttggttcaagcgtctccattcacttttttctctcgtgagagaagattcaacgaggtcttaaacagagtttgcagctacggttttgacccgaaaaaggcgggttttgttcacgctatggtagcctttgattgcacgagtgaatcagcaatggagcggaaatttaagttgttccaatgttttggttggtctaaagaagatttcgtcgcagcgatcatgagattcccaaactgtgtgacggtttcagatgagaagataatgtacacattggagtaccttgtaaacaacattggtctgcaagctcgtgacattgttgcaagaccggtggtgttatctctgagcatggagaagagaatcaaaccgaggaaccaggtcatctctttgcttctctccaaaggacttgtgaagaaggaagacatcaactatttcactatactaaagctgaaaagctccgagttcatggataagtttgtgctgaaatatcaggatgagatgccacaacttgtacaaccctttacaagtaatcgatgagtttgttctattagagaagtgagaacacactcttggttgcggctgaaccttgccgactccgatcatgttttgatgaattttgtgacatttaatttgacatcataaaatgatttagctgattctgtttatggttatggtaattttgttgattctgtttattttgtacaaagaaatatctatgatgatgatactataatgttttcatagataaagctcacatgttgcattatcctttctacgaggatgtgagagttaacacgcaatctggtgcaaaagtaggcattaaatttagctttataaaacggaacacgacaaggattccaaaagtagctctctttttatgtttttttcggagatcattgatttgtcatgacgagagcatttgtacactccaacgcgatcaatctttgtgtaaaggatttgtgtggtgttgatatctttgtttggaacgaaatggataaatataggtaggctctagttggggattactttgttataatttctaacaggttctaactaccaaaattcagtggtattttggtggattaatttggccgattagttgcatatttttagagtttagtctattgagttaagctaattactctcttaaaacaaatttcgtttatgtgatcagtttaaaaaatatataattgttgacacaaattggtaaaattttgtctccgattttttcagccaaaaaaatttgaaacactagtggtgtagtatatatgtgatccgctccattttttcatatttgattttctttctgatttttaatctatcttggaggtttagatattcattacaaaagtcaaatttatgtttttgcttcttagttttacatatccagaaaatttgattgaatatcgtattcactccataaatattattaaaactaaacatattaccttaaaaatgttataagaaataaaattgaataagaacatatttaatgattaatagatatacatttcatatttttatattcatttttttatagaaatacacatgtatgcattttttatggatattactttgcccaatcatggttaaaggcttaaagccataagtgttacaagactctcaagtctcaattatcattattggggaaaactccagttgacagaatttatattaacacatttgcttacaaagagatcccattactatcaaattcccacgaaataaaacaagtcaccacaagtggcctttccacactttcttatctataaaaaaaaaaaaaaaaacgtaaccgcttaaattgtgttgcatgaagcgtgaagcatgaagaagagtttactcacgttactcacgtatgtaagtaaacagaaacatatcacagactatgtgtcccaatcagttttgtcaaaccaaaagtaacggccatagctaaccatcctccaatcaaaaccctagccgacgacttaaacaccggtgctttccccaaaaccgctcctaaccacccaaacatcactaacgccaatgtcaccgccgccacgatcgctcctattctcacgtgatagtctttcacaaacgcagccgccattaaaggcacaatcgcacccaaagaaaacgctaacgcagacgcggcagccgcttgcatgggactcggaagcttctctttctccacttgtcctccgttctctctcttcatttgagccacctcgatgtcgtactgagagtaaacggagacaaactctccgatagccatgctacaagctccggcgaccaaaccggcgaaaccagataagatcatgactttgacgtcttgctttaccgcaccgacacccatcataagtgaagccgtcgagacaagaccgtcgttggcaccaagcacggcggctcttagccattgagctcttttggagtagtcgaaagccttttcttgatccatctccatgtctaggttcaagctgttgctcacgttgtgtgattccatggtaaagtcttttgggttggctttctgtctttatgtttttggtttgtgctgaaataagaaggtagagaatataggtgaagtgtggagaacacacgcctaggttctatttatggagagattgtgtgagtttttagctttttttatttaactttttaaaataatttatgtggtggagtcgacgattaatatatggggagcatcatcaccactaacggaaatactttttattctgtctttttcaaaaatttagattaggaaatcgaattaacaaacatctaatcgtttttacactatgattataagtttgaaacgaacaaatgaactttagaaggaaaaaaaaaaaagttgattgccgcgtaccatcggtaaagataaagcacaacgattggtataactgtacccccaaaaatggatctcaattgaattaaattcaaaaggaacttaatacttttcaaaaaaaaagttacaaataatcaaatataagaagaaaggaaatgtgaaagtatacatttatgtgtctttttcatttcatttgattcgtgaaggacaaaaaacaaatatcaatttgagagaccgaaaggggcatgcagttacatacttacactatggagttgttaagtcgtcgtcaagatcaaagccataatatgcatatatgtcttcttggcaaaaaattatacaaaattaatatataaaaatgaaatctcaacctcccaaacgattacctaatgttacacgaaatgtgttggccaaaagtttattataaacatataatactttagttttcttggttttacttttattaccaagttaccaaattaacattccttttggcagctgtactactatattgactagagaacaccatattcaaatttggcaaatgctttaatctactttcttgaataatcaattgggaaaagaaatcttcaggaacgtcttcgtattcatgtacattgtatttttctttgaaaaaatgaactttttgatcggagtgtggttggtagttacattttttagaagaaacgtaacttggaataatatatcaaaagctttctcaaagtgtcaaattttgtctttttttcttttacataacttgaaacaaatcagtagcgtatatgtcatatttattttatcctatccccttaattttagaacacgtaaactgtgaaagcatttttctagtaaataaaaatgaaacaacaatctcattcttttactttctgtttatttttgttggttaattataccttttttctcgacaaagaaacaatcccaaaacagaaggggggcgaatcaatcacacatagtgtttggatctctggattttcttagagtttgaccaaaagtgatcaacggataatctatttattgataagacactgttatattttggaattgtttgataagtgtaatcatattctacatcttcttttcattgaatttaataagagggattcattaattaggaagaaaaaataggtcaaaaaacatggattagttaatacagctccttgttgataaacggacacataatggacgattaaaatatgaaatagtagaatccaactatcttatatatgaaggggatcaaaattgaatcagatacttttcacactatagattctttgatccagcgcaattagagccgtatacaagtgaaaatcataaacaacaaattaatagtagataatgaacacattacacataaaagctagggttttttttggttatataaataaaaaaaaataaattttttgatggattggtgaattggaaagcacttagagatagatttatggtgagataaaataatagagagagatcataataatattaaagaaagagggacgagtgtggtttccacacgaatagcaccacatttcaccatcatcgtcacttgtttgcacacacactaacacacatacgtagacatctacgtattatgtttcttcatgtatatgcatgcatacgtagtcgcctacgtacatatatgccagcacattattaacattccagaatttacaatttatatagcgcatactaactataaggtaattctttttggttttttttccctatgattcacacactgcattcatataatggacagtccgaaataaatagacaatgaagacattagtcgaaattactaaaccgcttacgaattatgatcacgtatgttttcatgaattcaaagtgattgatttataattcgaatgttggagtacatgttataatgtctccaatatttttcaagcattgtatatattattactattagtagtatacactatagaatttgtagagcggcttgatcaaaagcaaaattcattaatttattatttaaatttgaaaatattgatcctaaatcaaaataatgcatggtaacatatatgttaattgtatattccttattatctccctatatatgtagtgaaaagtatgttattgtgccttttataatgataatgatggatatagacatgcatatggatttcaactttactattgtggtccaagtcctagtcctactgatcatgaaacgctaaatatcatgtaaactcggtatactttcagttattaacagttgaatacgacacgtaattttgctatgtcgatggtgaatctgtgcgtagcggtagcttagatgagactcgaatatataaattttgtagggcttgaaaataaagagttttgtgcaaatatttttaaaatgaaagccacaattcttgtctacgtaagtatatcaacaaaaaaaaaagaaatacaattctgataaatatatatcaacaaaaaaaaatgtttataatcaacataaaactttcaattcttgtctaaataaagttaagatagcagaaattttgaaacttaactgggccaagcataaatgggcttaacatgatgtggattaatgataaatgggcataacgtaacagaccaatgaagtatatgttaatccaacgacccgtttgcggtgtggtataattatggtcgcatatcttttggaaatataaaaataagtagagatagataagtggacaggtgttcattgtccgttctgatccaaaataagttcgtgtcttcgtggaactgaatctttatgaagagtttgccttggcatgggacaatgcttctccaatctgaaatagacaggtctttgtcgtcttggagctgtcttcactcttggccgagacacttgcgcagtcaagatggacacaccagaattaatatccacacctactaatatctttgtatgaatataattaccaaatcatttatgtaaagagatttcggactctctatgtcgatagaaattgtttattccggaaagtctttgagaggctcaaaaccaaaaaatgtttttgaacttatgattattttttgggggtatctgaaaaactaaatgatatgagaactgcaaatcttgtttcaaatagtaagtggatttacgaaaaaggtgaaaaattcaacaatagaggttcaatttaatttcttcactattagacggacaaagtgaatatataaatatatcttgatgtacatatcatttttgtgacattattgatatgtacatgaagatatatttatatattcaattggtccgacttggtccgtctaatagtgaggaaattaaatcaaatctctgctttgaattttgacttaaatatcgtctttacttcaaacagaattttagcagccacctcttacttttctacggtacattacatagagactattcagcaaccaagctggaccggcaacgctagccacaatgatttatgtgaaaattttataaagaaaaggaagaaatatctaagctttagctataaaaggagaaacaaggatatacatcaaaaacatactaaatcatcaacactacaaagaagaaacacactatctctctctctctctcaatacatctttcctcacttctgatcagtgtgatcacgtagagtgccttgaaggagaagaaagaaacaaaaagaaataaaaatgggataccttctagaagaaaccttaagctctaactctaaaaccccaattgttatcgatgatgataacgagttgggtttgatggccgtgagactagccaatgctgctgcctttccgatggttctcaaagccgccctcgagctcggtgtctttgacactctctatgctgaagcctctcgcagcgactcgttcctttcaccatctgaaatagcgagtaagctaccaactacacctcgtaaccctgaggctccggttttgttggaccgtatgcttcgtctactcgctagctattctgtggtcaagtgtggtaaggtctcagaaggaaagggtgagagggtctacagagcagagccaatttgcaggtttttcttgaaggataacattcaagatattggatcccttgcttctcaagtcattgtcaatttcgatagcgtcttcctcaatacttggtaattttcattaatcatggatgtcttataattcatcaagaagtggttttatattcaatgaatcttacctttatcgatacataaatttcagggcacaattgaaagacgtggttctagaaggaggagatgcatttggccgcgcacatggtggtatgaagctctttgactatatgggtacagatgagagattcagcaaactatttaaccagaccggttttaccattgcggttgtgaagaaggctcttgaagtttaccaaggcttcaaaggtgtgaatgttttagttgatgtgggaggaggagttggtaacactcttggtgttgttgcttctaagtatccaaatattaagggtatcaactttgatctaacctgtgccttggcacaagcaccttcttatcccggtgtggagcatgttgccggagatatgtttgtggatgtcccaaccggagatgccatgatcttgaaagtaagctcaatagaacttattacttatatgttttggaagtttatacatggtactagaactttatactaattttattatgtttttatagcgtatacttcatgattggaccgatgaagattgtgtcaagattcttaagaattgttggaaatcactaccagaaagcggtaaagtagttgttatagaattagtcactcctgatgaggcagagaatggagacatcaacgcaaacattgcctttgacatggacatgttaatgttcacacaatgttccggaggaaaagagagatcaagagctgagtttgaagctttggctgcagcttctggctttacccattgcaagttcgtttgccaagcttatcactgctggattattgagttctgtaaataaaatgtgtgaaatgtaaaacaaaatcgtcgttaattatatatttccatctttgttgccattctttcttgatatctttgtcttcgagtaataaaagtgttttaatatgtcatattgtctcttagaactagttttattcactcagacgaagttattcaccaacaacttacaaagtcacaagtgcatattcattgcccaatggtcggctgctttctcttcatgacttcattacctattgtatccctagcagaaaatatgactacctctctaacttatactgtaattgcaaaggtaaaagctagagagaaactttatcttggaaattttcataggaaataagatttttacaagtcaatggatttcttatcaaaaaaaaaaaaaaaaaaaagtcaatggatttagtcaaagttcaaagtatatatagattcgacttaatttcatcactattgatagaagttatttattgtaacaaaaaaaaaaagatacaggattcttatccactttttactcttgtaaacgtaacaacggctgtcatgtttaaaagcttttaaatatataaagctatatttcagttgaaaagaaagaggcaaatatgccaaaaagctaaattgtagtgatattatactgtttaatctttacagaaacaatattttttattccagaaccatcaaactgtcggactgtatctaatcggatacgaaattcttattgtttttttgttgttaaagacgaaatttcttgtaagttttagacagcaaagtacctaaaaagtcaactaaacttactaattaatgtgggttactcgatccaaacaaaccctttgatctagttcaattaagttttgtaaactcttacacatataaactcttaattttagttttagaaatatatatattatatagtcgtatttcataaagataatatatattgtttataatggtcagacaaggactatatattaaccgttcttgacttagacctactcattacatacacaagatttctcggcgactgcatagagtaacatttggattttggttaagtgaaaaaaacgtcactcgtcgtgtaaaagaattaatacagtaattaaccaggaagataagtctcttttggatgtatactaattattaagaactatttttaataagagtagcaaggatagtattaaataattataatatatgtgagtctactgaaattgataattactaaaattttgctaaattaaactttgtgactttcctggaatcaaaccgacgatgaacaaattcaaaatagactaacggccgaaaagggactggctgcggagcccataatgaagacaattgtgatgttacgtgaatttggtccaaatctccaaataaaccaactttatcaaaatggacgcctttaaaagaagatcaacaagttttttttaattaaatatgtgattaaattttgaaagaaataggaattctataaatatccaagaaaaaaaaatcatatttgattactgaaaaataaatgataaatattctatttgccttggttggagcacaaatgatgtattattcacttcgatacaaatttataaattacgtcgacgtacttgtcctcgatgtgaggagatacaaaaatgctcaaggcaatgatttatagtacttcattgaaaaattgagatgataattgttagggttatttattagatgaaaaaatctcgaggttaatttataaaataattacgttaaatattgattgaaaacttattttcattaaaaaaacatgttattttatcgataattttcaaattatccaattttcaaaatcttcaaattttcaaattttaactatctaacaaaacaactctaatttttagtagtctttccataaaagaaattgttcgtaaaaatttgaaggaaatgccaaaagcaacaataatagagagaatcattctccttggcccagtccttggtcgtcgtatcaagtgataccaatgcgtgactctgagtggcacccttataagaaattaatcttcatatctatcaagaaagacaaaaacatttaaaatacataaaatttcgattttattggatagtttagttatctatcaaactgagacaaaaagatatactaatttagatacttggtcagactaatagagtaatagtgatgaaatattagtgaatctctccgttgaacattgactttttggtatatccactaacgtgaaacaagtttgagctgtttcagccgcaaaaaatagctcttacctttctaaacagagacgactcagtcagcccccgagatggaccggcaagccaacaataatatatacgtgaaaataattttaaaataaataaaataaagagagaaatatcaaagcctttaactataaaaggagaaacaaggatgcatcaaaaatatactaactcatcatctcaacactacaaaaaagaaacaaatactctctctcgatacatatttcctcactttgatcagtttgatcacgtagagtgccttgaaggagaagaaagtaacaaaaaagaaagagaaatgggataccttttcgaagaaaccttaagctctaaccctaaaaccccaattgttgttgatgatgataacgagttgggtttgatggccgtgagacttgccaatgccgccgcctttccaatggttcttaaagcttccctcgagctcggtgtctttgacactctctacgcggaagcctctcgcactgactcgttcctttcaccctctgagatagcaagtaagctaccaactacaccccgtaaccctggggctccggtcttgttggaccgcatgcttcgtttactcgctagctattccatggtcaagtgtgagaaggtctccgtaggaaagggggagagggtctatcgagctgagccaatttgcaggtttttcttgaagaataacattcaggatattggatcccttgcctctcaagtcattgtcaatttcgacagtgtcttccttaatacctggtaattttcacaaatcatctttataacaaatctgtttgtcgtcaatgttagaatccttattattaaatcttactttatctatacgaaaatttcagggcacaactgaaagacgtggtgctagaaggaggagatgcgtttgggcgtgcacatggtggcatgaaactctttgactatatgggtacagatgagagattcagcaagctttttaaccagactggattcacaatcgcggtggtgaagaaggctcttgaagtttaccaaggcttcaaaggtgtgaatgtgttggttgatgtgggaggtggagttggtaacactcttggtgttgttacttctaaatatcccaatattaagggtatcaactttgatctaacttgcgccttggcacaagcaccctcgtatcccggtgtggagcatgttgccggagatatgtttgtggatgtcccaaccggagatgctatgatcttgaaagtaagctcaatagaacttatcacttatatgttttggaagtgtatacatgctagctagaactttatacttatgtgtttaaatatgtttttacagcgtatacttcatgattggaccgacgaagactgtgtgaagattcttaagaattgttggaaatcactaccagagaacggtaaagtggtagtcatagaattagttactcctgatgaggcagagaacggagatatcaacgcaaacattgcctttgacatggacatgttaatgttcactcaatgttctggtggaaaagagagatcaagagctgagtttgaagctttggctgcagcttcttgcttcacccattgcaagtttgtttgccaagcttatcactgctggattattgagttctgtaaataaaacgtgtgaaatgtaaaactaaattctcgttaattgtttattttcatcgtgttgccattctgttcttgatatctttgtcttcaagcaataaaagtgttttaatttgtcatggtcccttagaactagttttatttactcagacgaaattgttattcaccaacaactcacaaagtcacaagtgcatattcattgctcaatggctggctgctttctctttgatagttgttgtatccctagcagaaaaatatgactaatttattcttacttgttctgtaattgcaaaaactgaagagctagagagaatataggaaataatattttacaagtcaatagattttagtcaaagttcaaagcatagttttttagtctgaatttcatcactttaatataagattttttacattaaaaacaaaaaagtataggattgaaaatatttacccactgtttactcatgtaattgtaacaacgaccgtcatgtttagaagctctacttatatttcacttgaaaaaaagagacaaaaatggcaaaaagctaaacaaccactatagtaattagtgttgactaaatgttaattaaagcttctatattaagaagtttgggtttttagtactgcatactgtgatttattaacagatttgcagattaatgtagccaaatatgcatgagatttccaacaatttacaattagaaccgttcgccaaaattttaagcagggaggaaagtatcgtcaggttgtggatgtagtcaggtcgtggatcagtgaaggtgactatcgagagcatggagaaagaagtgtcgtctgttgtgaatttaataaggatcgaaagaaattatcggtgatagaattatctatataacaatctcataatttacaataaataataaattcagatattaaagaaaaatgataaaaatatattctttacaagaacaatatttttaaatcttagaaccatcaaacagttatattgtatctaatcggatacgaaatttcttataggtttagacatgatagtacataaaaagtgaactaaaaatttcctagttaatggggttaagcgatccaaacaaaccctttgatctagttcaattaaagtttcataaacttctacacatataaatcataactttaaatttaacactttttatatagtcaaaatttcatacagataattttgtttataatggtcagacaaggactatatccgttcttgactcagacactactcatacacaatttgagatttctcgacgactgcataaagtaacatttggattttggttggagaaaaaatcactcgtcgtgtaaaaaaattaacaacactaattaaccaagaagataagtctcttttggatatattaattattaagattattttaagagtagcaacgatcgatacgatgatataactatttttgctaaatcaaaggttgtgaccgagaaacaaaaaggaacgttgtgactttcctggaacaaacctataaaccaattcaaacaagactaacggccgaaaaggcactggctgcctgaaggggccataatagagacaattgtgatgttacatgaatttggtccaaatctccaaataaacctattttatcacaacggacggctttaaaactattaaagattagcatgttttttcatatattgatgatgatgacaaaaaaaaataagatgtctccaaacttacttgaaagaatttggaattctataaatattcaaaaaaaagttgtgaaaaacaaatttgaaaatagaatatttgatttactgagaatctgagatagaaatagaaaaatgctcaaggtttatatttcgtaagaaattgagatgataattgttagggttaatttaaattaactactgataaaataatttatttaatttttttggtagaaggccttctataaaaataattacgtgaaatattaatgggtatatgcagtagatgaccatgaaatccataatattatacaaactaaccatggacgtatagtacctgtcggaaaccaactttaaattactctcatatccttataatagggttttggttgaggggacaaatagctttataggcaaatagctttactactaaagcttccataacctcctcttcccttacaacaataaccaccactagatctgtaacaccaccgcctcctccgtatttagtattactagatctgtaaacactaccgcctccgtattcaccaccatcatatccataacaccaccgcctcttccgtattcatcactatcgccgtttacttttgttgacatgtatttttattctaaaacattgtatttttcaaagtttcttttaaataatacttgttctttactaaaattacaatgatccgtgtgtctcaattcaaacgatagcatgtaatttttgaataattcatgctatttttttatttgatatgtatattttcctataacgtttgtattttttgataagataatattttttaaagataatgtgcattttactaataatccatgttttctactaaaatcacaagtaagttactgattcatgattcatgttttttttataatcacatgcaaatttgtacaatcacatgtaatctataaataacacatatgtggtttgcttatctctgttgaaaccatttaccatattgtcaaaacaataaacctacgttctaatgtaataaaaataaatagcatgtccttaaatatcttatgcaacacttctatactcaatcacaactgtttctaaatggctatcttttaactaagtttttttttacgtatacatttttaaggtataagagatattgcgtgtgattttaataagtagtggtctaatattgcatgattttttaagaagtagcggtgtaatcattacttcatattgtcttttgttccctacatgtagcagctattgtcggaaagaaagagtttctctcatctgtaaagggtaaaatagttattttgcaggctcaaaaaagttatttacccaacttttctgcacgaacgctattttcttaataatgctgtcaaatttggtcatcctctaatattacccaatattaatctcaaacgtaaaccctttaacaaaaaaaatattaatctcaaacgtatatgaaaaaaccgtaacatgttatttcacccaatcattttctttttatgatacgtcggcgtacagttttgtcattaaaattattttacatgtaaatcttaaaatctcaactatctaacaaatcaactattgttagtcttcggtcttccataaaagaaattgtttgtaaaatttgaaggaaagtgacaaagcaacaacaattgagagaatcaatttccttggcccagtcctggtcgacgtgatcgtcgtatcaagtgatacctatgcgtgactctgagtggccagtggcggatccacgtccctgtgaatggcacccttagaagattttattggttaattaagtaataaatataaatgctcttcaagctgcgacaaaaagatatactaatttagacacttggtcagactaatagagtaatagtgatgaaatattagtgaatctctcctttgaacattgacttttggtatatccactaacgtgaggcaagtttgagctatttcagccgtcaaaaatagctcttaccctttttctacacagagactactaactcagtcagcccccgaggtggaccggcaagccaacaataatttatatgaaaatattataaaataaagagaaatatcaaagcctttaactataaaaggagaaacaaggatgcatcaaaaatatactaactcatcatctcaacactacaaacaagaaacacatactctctctcaattcatatttcctcacttttgatcagtttgatcacgtagagtgccttgaaggagaagaaagaaacaaaaaagaaagagaaatgggataccttttcgaagaaaccttaagctctaaccctaaaaccccaattgttgttgatgatgataacgagttgggtttgatggccgtgagacttgccaatgccgccgcctttccaatggttcttaaagcttccctcgagctcggtgtctttgacactctctacgcggaagcctctcgcaccgactcgttcctttcaccatctgagatagcgagtaagctaccaactacaccccgtaaccctggggctccggtcttgttggaccgcatgcttcgtttactcgctagctattccatggtcaagtgtgagaaggtctccgtaggaaaggagcagagggtctatcgagccgagccaatttgcaggtttttcttgaagaataacattcaggatattggatcccttgcttctcaagtcattgtcaatttcgacagtgtcttccttaatacctggtaattttcacaaatcatctttataacaaatctgtttgtcgtcaatgttagaatccttattattaaatcttactttatctatacgaaaatttcagggcacaattgaaagatgtggtgctagaaggaggagatgcgtttgggcgtgcacatggtggcatgaaactctttgactatatgggtacagatgagagattcagcaagctttttaaccagactggattcacaatcgcggtggtgaagaaggctcttgaagtttaccaaggcttcaaaggtgtgaatgtgttggttgatgtgggaggtggagttggtaacactcttggtgttgttacttctaaatatcccaatattaagggtatcaactttgatctaacttgtgccttggcacaagcacccacttatcccggtgtggagcatgttgccggagatatgtttgtggatgtcccaaccggaaatgctatgatcttgaaagtaagctcaatagaacttattacttatatgttttggaagtgtatacatgctagctagaactttatacttatgtgtttaaatatgtttttacagcgtatacttcatgattggaccgacgaagattgtgtcaagattcttaagaattgttggaaatcactaccacaaaacggtaaagtggttgttatagaattagtcactcctgatgaggcagagaatggtgacatcaacgcaaacattgcctttgacatggacatgttaatgttcacacaatgttccggaggaaaagagagatcaagagctgagtttgaagctttggctgcagcttctggcttctcccattgccagtttgtttgccaagcttatcactgctggattattgagttctgtaaataatatgtctaaaattataattaaaactaaatcctcataattgttaatttcatctgtatttcagttttttgtttgaaatggtcatgcctctctttgtctttcgagcaatatgaaataaaaatcttttctatttttgaattctaccctttaagaaccagtttcaattgattggtcatatgattccttttcaagatttgacgagtcacaagaccagctgctttcatttgcttccttattcatctctcttagttagttgtttgtccctatccacttacatatctctctaataacttttcttcggtaactatctttctagttactaaattgtttcatgttaagtaaattgcaaaggcttgtgagaatcttgctcatgggatatgattgtttatgttatcaatgtaacggacactataatatatttctaatcacccgttgttgaacactggttaatgtactattcgtctctttcactagctaaccccaaccctcctgaagccaccaaaacatgatctcatttattatttctattgcaaattgcaatctgtgtttaggtcaagaaaggctaatccactcggacttgatctaaaataattaatattttgacaaagaaaccttcaacccctaatgatgaaaacattaaaggaaaccctataacaattgagatgggaaacaataaaatatgatattgttcatacacacagattctagataatggaaaagttaatttatgatatgccatcgcaccagtgttgtttcttcccacaataattgcaacgaccaacaaatcgatataatcattcatatcacaaaaatagtgatgctagtaatgtccaaagtgattgtccggttgtggtcaatggaggaatatcgccgttgttgactcagacctactcatacacaatttgagatttctcgatgactgcatacagtaacattcgctcggatactcaattaacctaaggtggtccattatgtgttaaaattttcaaatctcataattataggactaattaaccctatagtatatactgattgagtccagttaatgaagtttgactccaaaaatttgtgaccttcctggaaggaaaattcaagatggggcacactaaggacaattgtgacgttgggtccaaattaaaatatgaaacgtttaaagcgtatttgatatttatcaagtagtataagtttaaagcatatttgatatttcttgccctgtttctttaaactcattcgtcctaatatacgtgtcgctgtatgtatgtataaacttattataatatcacgtcgataaaattgacgagaaaacaaaacaaatgaaaactgccgccaaaaaaagagtatataaataaacagacaattcgcgtgataccatttttctaatgatattaaactgcgaagataagatagactttatgtatgtatctatcaagcgataaaatcaagtgagtctcacctttgaaaattgacttttgctattgaaaaaaaaaaaaacaaacgacgtgaaacattctttagctgtttctttcaaccaaaaaaacaaaaattagctatttcagccggcacaagaggctcttacttttctactagaggcccattaggaccggcatgccaacaatataattaaataaagatggaggaggctaagtcttggctataaaacggagtaagatccatcaaacaatacaacaaaacacacacacactcactctcaatatctagtttttcccttgtttctgatcagtgtgatcacgtagagtgccttgaaggagaagaaagaaacaaaaacaaaggaaaatgggatacctttttcaagaaaccttaagctctaaccctaaaactccaattgttgttgatgatgataacgagttgggtttgatggccgtgagacttgccaacgccgccgcctttcctatggttctcaaagccgccctcgagcttggtgtctttgacactctctacgccgcagcctctcgcaccgactcattcctctcaccctatgaaatagcaagtaagctaccaactacacctcgtaaccctgaagcgccggttttgttggaccgcatgcttcgtctactcgctagctactccatggtcaagtgtggtaaggccttatccggaaagggcgagagggtctacagagccgagccgatttgcaggttcttcttgaaggataacattcaagatattggatcccttgcttctcaagtcatcgtcaatttcgacagcgtcttccttaatacctggtaagtttttatttcattgatgttgagttcttcaataagtcactaatatacgcaaatgaatcttaccatatcgatacgggatttttgcagggcacagttgaaagatgtggtgctagaaggaggagatgcgtttggtcgcgcacatggtggtatgaaactctttgactatatgggtacagatgagagattcagcaagctctttaaccagaccggattcacaatcgcggtcgttaagaaggcccttgaagtctatgaaggcttcaaaggtgtgaaagttttagttgatgttggaggaggagttggtaacactcttggtgttgttacttctaaatatcccaatattaagggtatcaactttgatctaacctgtgccttggcacaagcaccttcttatcccggtgtggagcatgttgccggagatatgtttgtggatgtcccaaccggagatgccatgatcttgaaagtaagcttaacaacttttattacttacatgttttggaagtaacttattacttatatgttttggaagtgtctacatgctattagaattttatactaattttaaatatgtttttacagcgtatacttcatgattggaccgacgaagattgtgtcaagattcttaagaattgttggaaatcactacctgaaaacggtaaagtggttgttatagaattagtcactcctgatgaggcagagaatggtgacatcaatgcgaacattgcctttgacatggacatgttaatgttcacccaatgttctggtggaaaagagcgatcaagagctgagtttgaagctttagctgcagcttctggcttcacccattgcaagttcgtttgccaagcttatcactgctggattattgaattctgtaaataaaatgtgtgatacaaatctaaatcgtcgtttctagtatttttcttttttgttgatatgtgattatcgttgttatttcttattttcatatttgtttgaaatggtcatgcatgtctttgtcttcaagcaatctagcaataaaaataaggttttataatttctcattgtactcttccgagtcacatgaaatattcattcatgtccttttgaatatatagctcacaagtcacaagtgcatattcattactccacggtcggctactttcattttgtttccttcctctttcactcacgggaaatctaactaacggctacttctctagtttaatgtttcattctttctattattgcaaaaccttgtggaatcttgttcacggaaatcttcacatgcttttaaaatttaatgttcaagtctcctccatttatatgcattttaaatagttggtaaataagaaaaggataggacatatagtacaactcaattaaagctaaacatactatatgcttaatttctgaaaagaaatctgagacatatgagtgaaagtagtaatgggtgaccacaaagataagaaagacacgaactaagaaacaaaaactaaggcacattgattttataaaaattgcacatcaaaataaacataaaccctaagattctaacaagagccctaccattaagagagacagaaacagaaaagctaaagagagaatgattacacaacaacactaaagctaagttgttggattaacaataagatcagaaatgtaatcattcttccattaaaaactctgtttctctacagaacaagaaaaagaaacatggctacacaacacaaacctagcttcaccgttaatgtcatcatcatcacctgcacacacacacaatcaaacatttctattaaatcaaatcgttttgtatagaaaaagaattgatgtttttgtttattgttgttaatgtgaatgtgaatgtacctgatgagctgaattagtggaagttggtaaagggttaatggaagtagagtcgacatctccggtaggaagaggaactgccggattactgttgatgaatggaactccgtctttaccagggactgtcactgacgtgatctctgatggggatggtcccggagagaaagctgaaccttctctaggacctaatggccaagggtaagaagaaggagatgagatcactcctccttccgaaaccggaacaggggcagttgctggtggttgcgatggcggtgatgccgcggcgaggatgacttggactgtgagcttctggttgagttggcatgttttgggaagagatgtgttgtttgtgaaggaaaagtagtaagagcctgttcttgatggataccactgagaaaacaagaatcataaagttcaaatgtagatcagtagagtaaagtttaagtactatgtaaaagaaagaattattaattgtcaagatgcttcttattgattatcattgagccctgaacataagactttttgtgtttaatcatttctcaattctgttgtcagaacaaagaatcggatttaaaattctattattatcaattccactgaaattattaattaaacaaacaaaaaaacagaggaaaaacaggggaagaggagctttttgtcaatctcaagaacagagagaacaaaaagggagcttgtaaaagatcacaactttatgaaatttctgagaaaccctagatgaattctcatactttctagcaatttccccaaataaaagaaattcacaagttttgtaacgaattaagaaatgcgtaccgtgaaggaagtggaattaggtttagtaagaagagtggcttgagtaaagttgcagacattgaatgcatctttgtttctgaagatgtagagatcgtatccgtacttatgtctgaaaactaaagtaagatcacatcattaatattaattaagagaagaatttaacaaaaataggaaaataaaaggactggttttgtaattaacacttactaacagagtcgccggtatgaacagtgggggatttccagacagagacaccgtcgacgagaaacgtggcggaaagagaagggcgagagaaaagagagaggaagcaaaagaagtagaagaagagcattgaggtgagatgtttctgagagcaacccatgttttttagcttgaaatgaggagatgcgtaggtttaagggagattctgaaattaaaaagaagtaaagaagcttcaatgatgtctaccctttttatctttagcaggcctctctctcacacatttaggtcaaaagagaggtttagtgtctatggagcttagggagaagagaagaagaaaaaggggtgagagacagagacagagaaagaagtattttgagaagtgtgcagtgagtgtgcagtgagtgtctctgtcttttttactttttatgtgttgaagaaatggagaagattgagaattttgaggactgttttattttattaatttgttccatacctatacttgaaatcaagattggaatttcattttctttgaattatgagtaccagattactaggtacaagtttgcattttacatgacattttgactaatgtaagtctataataagttcttcttggatttattttcctagactacaaaattaggtattgaaaataacatttaatttacaatgttcatggttactaattactttcttggttcaaaactaagaaatggaagacaggtaatagtaatacacagaagagaagtaggcatctctctgcaagtaattttagtaaacggtaaaaaaaggtaccatcatttttatcacgggaaataatgctctggtagtaaaaatctgacgaacaaaagtgtaaccaacaaaaaataacatgtactccaaaaaggaaaagagaaaaagtaacaaagtgagaattatataacaagataatgatggtgattattattcttaaatcattacgcctgtgacttaaccccaacatgtttctgatgatccctactttacaatttagttttataattatgtaggagtagtatcttctatcgtttttgttaattacaaaactttttccatctttaatcaaacgaaaatagaaatactataaccgtaacttttcgactcgatctatatcgacactactttattggctggaagcaattatacacatatctttgttttatgccagaggagtcatcaatgctaatcttatcttttgttaatataatgactgtattattacattaacatttatataacacacacggtcgaattttcttgcccccatataatgttcaaatgatattcgtatcagcaagtaaaataagatattttgctaaaacctacttggttttttattgtcagtatatttccacggtagaagttaaattgtatcgatcaaaatcaataggttccaaacacaactgttgacaaaaccaaacatctgcttgaaaacaaacaaaataacaacattaattaagctcaaggggtttgtctttgcatgattttgtttgtatgttgtgtttgatacttctaagaaagggttttcaaaaaacaattgcagtcttcgaagaatttgtatagcaaataatcggagaaaacaaatggcagcggcacgagcatggtgcaccttttcctttttgtattgaaaaccacacgaaccacacagccttatgtgttacacgtctcgtcgtatttgtgtttagcttttttatgctaaaacgacaactactacatgacaaaacgcgagcttcggccaaacccccaaaaatctcttcccgttgcttttgatggacttcatagtctattaatctttgttaagttggactatataaaagaatagtttacgatactaaatagaggtttctgtaaacttacgtttaaatcaaataggcaaacgataacatggagtaatatatattaggtccacaatggttcaagacttgaagttattgaaaattgacctctcttggcttttatgtttacaagttcaaaacatgcctgccggtttctagccttgagttcaagtttcattaagatgtttatgataataaattctgaacggcataatgtctctgctacctccacagatttacggcacttgttctaacaagttattataaaccaatcaatgtatgattttgtattacaaacgatggtctttcactcttttgtaacagctaacaaatcttatataattagtcttcaactcaattaaatttgacttcttaaagagttaaaatcaatcactgattataaattaggtattgattgaccaattaaacttttagttttgtcacacggagaaaccagaaggtcgagaatataaattaatatctcaaaaattaccaaatgtgacccaaaaacaaaatctttaagataatgaattaacgattagactgaatttttttttgtttgagagaaaaggaatccaagcagagagatgctgacgaaaaaacgcgtggcgaataataatgtacgactggatatttcaaatgaagcgtcaattaaaagggaaaaataataataaaataaaaaaagaggaagaagaaaaaggagcggttgagttgaaatttgctggcgcgtactcgtcaacgtaacgcgcgtggagtgttttcgtgtccctcctcctcctcctcctcctcactaagacaaatattttgaggttctctttctcgtttgtgtgatctgtctgacaagctagaagaatcgtagatcgtgatcggattgatttgataattatggtgaaggagacggagttttacgatgtcctcggcgttagccccaccgctacggaggctgagattaagaaagcttattacatcaaggtttcatttccaatctctctgattcttacggttctgtttttttttttgtttaaagttttgtaattttcagtgagttcttagctgaaaagtgtcgattttgggggtacccacccacgagatttgattagtttccctagttttgtgaaagattgaatctgatgacaggtaagctcaattcttaagagctttcagtgtgtgtggagttttgcaatggtgtctaatggacagaagttctttaatgtttactatgagttagcttgatcgattcagacaattacgaatttgctgctgagtgttggctttttttttgtctcttttctacaggcacgccaagtgcatccagataaaaaccctaatgatcctcaggctgctcataatttccaggcaagttctctgatttttgaatattgtcaagagaaagagtttaaacactatcgtttgaattggtatttaggaagaactcctttatctttagttgaattcttaggcttcttggcttatgatgtttggaaagtattggactggttactcttgtagatttaggatagaggatgctgtctacattttgtgtttaaccattatcccttgtgcatgagcactgggttcttctacaagatgcttgggtttgttgttttacctgataccatgtagagagctgatcaatggatcattgtattgattaggttcagggtacatctctatatatacatacaacaggataactatcgaatatttagagaaaaggctagtctaagattacaacagatattatatcaaagagtatatatactcttctgtatagtgtttgctttggatggtatagctgttatcatagtcaataaaagcatattagcaggactaacagtgacattagttttttggaaaatccggtttccaagaaattagtatgacaatgatctcagtattctttatctttcgtgatctgttttttttctttggtgaatctttctggatgaggtttttgaaaaatctaagttcttatacaggtattgggagaggcctaccaagtgctaagtgatccagggcaacgtcaggcctatgacacatctgggaagtcagggatttcaacgtaagtggcttttcttgtgatagttttatgggtgctttgctgtttagcaccatttggagtttggtgacatggatcttgatcctgttgctgaagaatttggcatgttactcagttcttacttgtggtgttcattcttgcagtgagatcattgatcctgcggctatatttgctatgctttttgggagtgaactctttgaagaatacatagggcagcttgctatggcatcaatggcttcacttgatatcttcactgaaggggatcagattgatactaaaaagattatagaaaaaatgagggtaaacatcatttattgatctatcctgcttaagaaaagtctttgatcaccttccgttcttaacatactatacatcaagcataaaacacgagaaagcatatatctaagttttctcatctcttcttacactctatcgacatgataaaatatatgttcttaagagacaagacatttgtttagattatcagaaggaataaaagaattgtgccatattttctccatttgttcatagattcctaagcatgttagactgcttttggtttcaggctgttcagaaagaaagagaagacaaacttgctcagattcttaaggaccgcctcaacctatatatgacgaacaaagatgaatttactagcaatgctgaagctgaagtaacaagactctcaaatgcaggtacggtgttttgtagcatattgttcccctttcatagtttatgctttctctttcaatcaatgccatatctgtggtaaaaaaactcaaacttatcttcttttttgtctatcttcaacagcatacggggtggaaatgttgaacacaatcggatatatatatgtcagacaagcggcaaaagagcttgggaagaaagctatttatctcggtgtgccattcgtagctgaatggtttaggacgaaaggtcacttcatcaaatcccaagtaacagctgcaacaggttagtgacttaggtacaaaggcgacctcaacaacatcatgttcatatcatatgctagaagaagtagtatgggttacataaggaacattttatttcaactactgaaaaagaaaacccaagaacactctcctagctttctagaacttggtctcctctctaggggggtaatatttagtgacttttctttatctgtcgtcctaggtgcatacgctttattccagctgcaagaggaaatgaaaaggcaactaagtgctgaaggcaattataccgagaaggaacttgaagagtacatgaagacccataagaaagtaatgattgattctctgtggaagctcaatgttgctgatatcgaaagcactatctcccgtgtttgtgagcaggtagtccagctacaactgttcactagttgactgaagtagcattttggtcaatttctgttgtgaccactctatgattattttttggcttaggtacttcaagatcccactgccaagagagaggagcttcgtgcaagggccaaggggttaaaaactctgggaaagatcttccaggtaaatcttttttcattcccttcttggagaatgtagcgcatatttattccaaatatagtttactaaaaaggaagcactgattgcaaaacgctttatttttgtggttatatagaagaacaagatagccagtgagagtgatcctttagtaagagccgaacttcacaaactaaacggaaatggtcaagaacatgatcattcatccacatcaccaaaatctgatgaagcatctcgctctaccgttggacctcaggtacatctccttcctctttagccattcatctactagtatgtttcacataaagaaaaaccaagaaacataaccttgtgtaatctaaatatcttcccttacattaccctcatctttggaaacctttttcacacatcgtgagacacagctgcatgtttgtatgtgatagacagatagagattcaggaatgatttagggtatgttgatggtgtgtaattgattgaaacttgtctatgttacgacttatgagagatcacgagatatgattgtcgggaatgatttagccagaagtagaaactgtttcactcgtagtaacttacagatactaaaaattcttggatgccattgtgaataactaatagccacttaaaggactcatgaaatgcaatgtacacggcattcttgtaggaaccgcaaagcccttatgtggaagcaccgaaacttggagaagagcaaatcaactattacttcccaaggcctgcgccgcctccaggagcacagagacactcttaaactggcaatggattgattcacagatgaacgaaaaggttattttttcctttttttgctatataatataagtctttatgcatatttgatatatttgcaggcgttggtattaccattatgtaatttttattattgttagaagaagaaattattggatctttgaaaaaagcacatgttatctcatcttagacaatgtataatgtttttattctatttatatatttgatgtttggaaatcatgtgttgcgaatcttattctcattactatataaagaacaccttagagaaagagacatataactcaatcgttttcataacttaaaaatctcttacatatacatattttctactgctttcttttgggagataataaaagcctttctcagacaaaagatctgctattgttttgggtaacattttcatatcgaatttattcgtataataaactattaaacgatgttagtttagttttaaacgttaagtttaaaaaattaaatgcatgacgttatggaatgaaatgacgaagttacccttaaatgcaacgtattgtggtaatcagtcatgtgcctatcaaaaacggaaacataaggtcaaatatggtaaacgacaagcgtcaaagtatttactatattaacaaatatttgagagaagaatttttgattataaattaataatcaaaggcatcaaggaaagcatcaatggcggaagaagcttacttgtaatagccacgagtgaagaagaagaagaaagccactggaacaaataaggaagacgatacactcacagagagagagagatacgtgtttctctgtgtgtttctacgctttttggcttttcttcgcggcttccacgaagaagccgaacggcgtgattcgcattgttctccacattgtctcatcttcctccgattttgattccaccattttcagatatattactctcttccggatctgaattgtgttggaaccaattggttctgatttcagatttcgaatttttttaatttgaatccaaatggagaaagcagagaacgagaagaagccatcggctgtatctgacgtcggagcatgggctatgaacgtaacgagctccgttgggatcatcatggctaataaacaactaatgtcatcatctggattcggcttcagcttcggtttgttttcctgatctctctatctctcccattttcattggatctgcatgatcattatcgtttcattcaattgtgtgattttgggaaattgatttgtgatttgcagcgacaactctcacgggatttcactttgctcttactgctctcgttggtatggtgtcgaatgcgactggtttatcagcatctaagcatgttcctctttgggagcttctttggttctcactcgttgctaatatctcaatcgctgctatgaattttagtcttatgttgaactctgttggcttctaccaggtaaagcttctctttgattttgcattttcccaatttctcaatttagcttttaagatggttcttctgatagtccacattgtgtttgatttcaatagatatcgaaattgagcatgattccagttgtttgtgtgatggaatgggttctacatagtaagcattactcgagagaagtgaaggcatctgtcatggttgttgttgtaggagttgggatttgtactgttactgatgtcaaagttaatgccaaaggtttcatttgtgcttgcactgccgttttctccacttctctccagcagatcgtaagcttttttatatcatgttcagtgttcattccttccttattttgcttgatctctgattttgtcaattaagtggtaatctggcagtgactctgccttttcaatctttgaatctttgtttaccactgcgttaagcgtttcattagataagttgtcgtgtagtttgagtattgatcataagttgtcggacatggacagtgtatgttatttattgttcatcaacctgtgagataagatgtctgagtacttgaaactccttatggaaaagtcttaccttgaaaaacttctttcttgatgatgatgttttctgataaaagtgtctctctggaaacagtcaataggttcactgcagaagaaatactcgatcggatcattcgagttgctgagtaagacagctccaatccaagccatttcactcctcatctttggtccatttgttgactatttcttgagtggcagattcatttcgacttacaagatgacttatagcgcaatggtaactatccaaaaatctcctaatcccgtttataaaatcccaactcttatctaattattgataaccatcacacacatacagttatgcattcttctctcctgcgcattggcggttttctgcaacataagccaatatctctgcatcggaagattctctgctacctcattccaagttcttggccacatgaaaacagtctgtgtcttaacattaggatggcttatctttgattcggagatgacattcaagaacatagcagggatggtcttagccgtggtgggaatggtgatatacagttgggcagtcgagttagagaaacagagaaagtcgaaagtgataccgcatggtaaacacagtatgacagaagatgagattaaacttctcaaagaaggtatagaacatatggatttgaaagacatggagcttggaaataataaagcataaatatagctctattcaagagaaacgttttttggttatatttttggttactcatttcccccatcatgtactcttttcttttgccctttttttcgttctttgtctcaaagaacctttttagcctcttattgatgagctctcctctgcagagcacattcttttttctatagaaatatatgattcctctacttctttgcatatatcattggcacatatcattcttgattctgattgaaaaaaagagaaacaaatcatgaaatcaaaattgtgtttttgacatccttttgtagtaatcttgtgttctgtttccgatcattgtttctgtagtttctttctctttccttacctttctgtttgatttgctgtaaatatggatttttctgatgcaataaacaccaaaatgtggacaaagtggtttcatatagaaagtcaaatttcattacaagactgtaaaaatctattaaaacattacgaggttacaagccatctaacgtgaagagacatctctagattccattgagagtgaccacaactctgcgtgctgttggagcatcacggtgttcacagagccatattccctgaaaccccaacatttccaacacaatagctttaaataagacaaagtagatgcaaatgagatcgaagagacatacacacacttgaattgctattaactatagtattgaaagatccattaccactcaacccaacgaagtcagtaccataaatgaagaaacatgaaaacatgtgattgtagtaaattatagtcagatggagaaatttattacctgccaagttcccatgctgagttttccttttgttattgggattctgcagaccaaaatgaacaaacacttgttaagtgaacatccaaaagctaaaataaattgtgctatgtcaaactacggttataatatgattgtagctcacgtgagttgacatccaaacattgatgacttgatatgagctggcatgtcatcaggacctgcaattatttaacacaattcaaatctaattacaacaaaattcatgaaatcagatgtaatgccaaagagaatcacatttcagaggataaagggaacaacatctttgattttatcgtgtgttcatatataaattagctttagtctgatgaaaccaacaactaaccttccatagtatgcctccaaggcgctgaattcccctgaaattccacaacaacaaaaatgatcaacttaagcaccaaatcagtaaattgagaagccagccaaatagagatatacctcaggaacaatcctgttcaagaaagtctcagtatcagcctgaacatctggatcataattctcattgattgtcagagaagcacttgtgtgttgtactgaaaccacaaacaaacaaacaaacaaagaaaccatttacttaatcaacaactcaaaaattaaaacagagcagaagcagagtgaaattacagagagagtgaaatctcacagaagacatgagcaagaccacaattgaaatctgacaagtcttcccttatttctttcaatatctgtttcaatatcgaattcacaaacccaatcaaatgaacagccaaaaaagctcataaattgagtcaattcagaatcgtttcgaattgaaacaaaaacatctacacacgaaagatgaaacctttggagtaataagatgacatccacgacgtagcggtggaagcgtgatggttttctgagcccacttagcaccagaggaactcgccattgaagctctatcggtagccggattagctggagtcaaaaccgatctcacacgcagaggaacaacaccagagaacaagaacgtcgagctcatagctttttgtgttcctctaagcccaataataacaacaacaatggccaacacaatcccacctccaactccaaaccaaaacctcccaataaggcctttcactttcaccatcatcaccattcatttttctcattttactttgcttctgggccttagaattgatttctataaacggcatgtagttcacctctcatttctcaaaataaaaactacatgccggtttttaatgttgttatatttcgctttatattatagtagaatcatgtcttcttgttgttggttcctggatgattacataacggaaacttgagttttccggtgaatattcaatgtttctgctcttcttcttcaacaatttctgagctgttctcttcgtggagtccggtaaacacttcaccgttgtttccatgagggcagatggttccagtgacatatctttagcatagtaatgaacaatcttgggcaacaatatctttgtctcgttgtgtatacgaacattgtttcttataaactcttctttggattttcttagatcccggaatacgcaatctgccgtgtaaacccgaacctgataaacaacataactgtaaaagattaaaatccaagagtttcaagaaagaatctgttaaaaatagtaatcatgagccagttctcttaccggaggatcagtagaaaatcctgaagaaagagcaaaatgagccaatgcctcgggatattccaaggcgtaaatgtgtttgacattacaagttttcgactttcttgatggcgaaaacaatgtctgcaacaactgtttttgcaataattcctagttacaagttatgaaacgtagtgaaagtgaagcaaaagaaacaaagagagtgtgtgttgcatacaggttgtgaaaaatgtgggcgaatgcctaagattgagctttggataatgtaagggtttacgctatagcctccaacatcataagctgcctgaaacatataaaaagtgtcttaagtaacagcaaaaacataataaatcaatcagtctaaaagatgtaaagatcaaaacctttaaaaccgaggtgtttctggcacggttgtgagttccgtaggctagatacgcctgcaacagagggaatcaagaaaaagattgaagcttttatacaagagacagaatcaataagagactagttcttgtttgcttacatgcattgtgagggcattgtgaatgtttatccaaaacgctagcttctcttcgcgtttcattctactcggatcaaccttctcaagtttttgaactagtgatctattatacacaacaattgagtaacattttagaccaacctaattaattgtaatgtcacagaagcaaattgttactgttttaagtatcttatatacctgaagttttggagcataacagcagcgtgattgaaactaccatcatccaagtgaagttctagagattctattacaacaacgcctggcacatttgcttctttgcgttcctcatggcgcgagttcaagctatcaaaagtggctttggaagagacagatgaaggtgaagaaggagaagcctgaagacaagaattgattctggctttgctggagagtgtacaatatacagaacatatgcatcttaagatatcttcagagagcctactcggattcgcaatgttatctacgataagagtagaacccagaagatctccaagagtagtgtgactactagaaacatatctactcttctcctacaaatgcattgtataattcttgtcagattcatcacaaggtttgttcgaggaaaatgcaaatgggggttgcttactcttgcagacaaagcttttaagctggcttggaaactccgaggaggacacaaagaggaacattcagaggccggagaagcttgataatggtagctgaacacactggtaacatctgattgctcggatttgggtaaaaactgattagaaactaagcttgtttcagtgtgaggagaaaaagaagaaacttgttcatcgaaagctgtcctatacagagagagcagatattgttctgtacgcagaatctcaaactcaagtgaagcaatttctttcctcaaatcttctgaagactgcaaaaaacacacaacattagaactaacagtacatttgttaccaaaagaatctatgaacattcaaagctataataaagatcaaacctttggcgtaacgttgcaattagaatcctggtaagtaagtaatctcttctcaattgataaactctgccatgaaaaatatgactttagaaccacaaaagttttgctttttaaaagagaaatgaaattggttgctcagaagaaactaaccggtttagtgtaggtagagaatcttgaaggtgatgcaacaatcacattctgcttcttctccgagttcctgtgaccaaacccatttcacattatttgccccaaattgatttcaacgaaactaaattgcagaaagagataatgtaatcatcggtttaccttggagaagatgaagaacaatcgtgagaagaaggagaaggagaacagagacccatcattttctcgcactttcttgtctgtttgtagagattcatcagagaataatattatgagtatgagtgaataattataataaaattaagaagacatcccatcaaagtatcttcctttgagacgtctcaagagcatatctcgaaaagctccagtctttttggcttgtcgtttataagactccaaaaattgttaaaaagaagatgtttttttcttcataactttccgggaaaatgagcgagaaaatcaggaaagtgaaaccgacatttttcccgggacttcagaccagatacactagtatcccgagtattaatcattctatacaaatcaagatttaatactagtctttatttatgtcagaccacagaaaacttaatattgtttcctctttaatgacgtttattagctcctaataaaaattcataatacactgatacttgttcagtgctcacaaactcaagtacttttgaaataatgcaatgaatcataagaaatgtataataatatgaattgcatagattatggaaaacataaggatatatttttatagtatggtatatattgcattatggagaaatataataaaacaagcagttaatgcagtcgatctcataacaactaggtaagtggggacaatttaacaccatccataaaagagttgacaatgagacataaaatagtagtaactaatattttgtggtcacgaatgacaaattttaaggacacttttttaccatttcattcacaataatatgcttggaaaaaacatttccaaaacaaacaaaaaaaattataagactccgaatataattttttaatagagattttaaataccattgatactgattgagcattatatgtatttagatttaaacaaaaaaaaaaagggacacagaacaagtaacagtcttaaagagagaagtatgaaaattaaaagaattctacgttgagacatttgatagaagatggtggaagtgggactactcgactaggtgtctcatgtttattttttttggatcgttttgtgtaaaagacatatatagttggataagaacaactaaatgaataaaaatagagtggtgaggatgaggcaaattttgttacaaatcatacaaacttccaaatcgagtttcattttcgacgtggtccgttgggtcagaccaataaatgcctccagtttttggcaccactcttcaattaatatcaatgtgaacaaaatgttgaatttagactgaatttaagaggtgcagctttctatgcaatttcatcaaatttgggtatgtatcatttccttttttcttttctttttttagacttcatattggttaatggttagcattcataagagaattgaatatgatcttcagtagggtaattttttgggataatataaagacaaatagttaagtaagacgtaaaattactttgctaatcatttacacaaaatgtcagaaagataatcaattattaaaaaagaaaagtcaaaagagtaattggaaatacatttttctttcttcacaaaaaaagaaacaattatgtttcagtcaccacctaatcttactcagtcaaagaaaccgggcctcactgcctcagctctgaaataggcccattctaaaaatgggctttctatcgcgtcagtcactgtactaaattttctactctgctaacgttttgtttacttggaaaatgtaataactttcttctttgaacaaaaaatttttaataactttcttaacaaagtatctgattaggttacactccgagtctccgaccataaatcggattgcatttcatttggtttcttgatatttatcagattctttatttgacttcattttcgttttgagactttgactatgtctatgagaagcaaatgtgtggttttgtaagtatcatgtaagatggatatattttaaaataatttagagccggcaaataggacaaagcaaatggttagccgtgctggaccaaacattgcctttctccgtcaccatttaagaatttagattattcttatatcgtatctctatcaatcatgatataaaattgatgtaattaataacaaagtaatcttatcaatatcgttttgttattgtattagataaaatctacagtaacttgaacaaatacattctttcaaatatcaatcgtttatggaacttgatctttgggctatagtttaaccgatccatgcaatttgaaaattgtgtatcacaaatttgttcatggttatcgaggatttaagattaagatggtactccattcagaaaaacttcctacatgtgattaattagaaaaatcaataggtgcatgcaactttattagtttcatttttaataattgaattgtgtgactaaattagcttcatgaatcatggatttatgatcggaaataatctgaattttctcaaaacttctcttaaacatccgatgttattatgagaaatggccaaatcgtttgcatgtaaaatagtcataacatttacatttaaacaataagaagagggaaccgtggggatgaaaatgcacgtgaaaatcagactaaaggagatggttgtggagccaactatgtctctatgttagggttaattgtaccctcgtgtgcatcacccatttctatatatacctccttacaaaaaaataaaatcttaaagattttgagaatctataatggagaacaagaaaaatcaaacgacagtactatttcacacaaataggggacaaaagaacatagcaataagattataagtctcacataccttgctggatttcacgattttgcatgcctctgtcattttctgggacgtgggctttctatataatttatcatatttccttcatgaataatttataacaaaaagaaaaaacaaatcaacattctggtacagtgaatgtatctcaagatatcgatcaaagaaggtgtctctgtaatttgttttatctaaagtattatgtgaaatacttaattaaatattgaattgggtgctttccgtagggacaataattccatgattgaatgctgatttgtattagtctatacatactaattgaagtcagtgtatattcccaaacaacacaacgcaatattcaatcgaactcaagcgtgcatgcgtgtgtgtatattataaggttttgctattcccattgagtcttaaattattgtattcaatgagacattcaaataaaataaaggaaatgagtcgactgaaagagagatgtaactcagtgcgatcaaagagacaaaccagacaaagaaagcaaaagagaaaagaggtcctacagtgacactgatttggaaccgaaccagacaccaaagctaaaaccaagatcctctatcctgtttggtcgcagtcgcacattacttttagcatggaggttcacgaggcaccgtatatacgtgcaattgacataccgatggtctcccttaggagtttcaaagaattacatattcataatgataaaatgtagcggagcgtaattagtttcgaccatatggtgaaatttcgtttttgtttgttttagttagttgttggcttagatttttttttcttttactaataatatgtaaaaatatatattctatcactttccttcttgaaaatatgttttgaacaaaaatcttttaacgctttgttatatattaaccaacgagatggtaagaaatactagagtcaagaactgtccactatctcgcatccactccctttcaatctaactaccaaatatatattccatgtgttattgctatcgttatcttatgtgcggctaagattacttctaagatgatcaactacaaattaaagtcgcgaatatctaaggtaattcagttatttgctagctatatgaatatttctgaaattttatatatacggttagatttagtgtgtgcatggatctaatccgtctagtccatgatctagtgtgtacaaatcaaccaaaagaatgaaaccaccactactatagtattttaatctattgtgtcctgatattagtaagaataatagctgatattttgattgatttatgagacttaaaacaatcttggcgcgtcatttatgtgctaaattacccaaattaaaaatatgcccaattctctctcaagaaccaattctatatttttagtggaaatgataaaaattgcatatatattactttaagatttacatttataaaaataaaaacgaacatgacatagtataccgtacttaatttcacgatcgcaaaagaaatatactaagctcttgtccataactaccacccggattcatcatgtgaaacgattccgagtcactcgaaccagtaactcgctcaaacctagccctcaaatacaacatctgatcctcctcttccgacggcaccactccggctccgactgacacagactgcatcatcctcaagaaaacggcgtcgttctccgtcacctttctcctcacggcaaatcccattttccttccgttacaaaacatagaccaaacaggaacatcaaagatcgaagacgaacgactattgctgcttctacgacggtcacactcgagggctatgcgtagaacaccttcctcgtccatttctttggctaaagctgccgtaggaacagctagctcgaggaggagcagcggtgaagatcccacggcggcgtcttgaaggcagaagctgactcggccacgacggtgtccgaagaaagttccacttacggtactgctactctgggaggaggaagagtggtctgaggatgaagacgaggatgaagtggaagagactgaaagggtgtcgttttggtatggttgttgttggtaagtgcaacagtatggaatcatgcattcgatgagtgaacgaagtgttcgtcggtgacggaattcgcgagaacaatccacggaggtaggagtggttatgatttgcatgtggtgatagttatgatctctttgctttcctaaatcaaccattgtcctcatgatttgtttctctctttttttaaaagctaagctcaaacttgatcgagtgaaatgaaagaagagaatattgagcttgtttttggtgaagaataggaagtgtgatggcatatatgtataggtggtgtgtggtaatggagagtggagacttttcgttgtttattcttttctttatatattttcaattatcattaatgtagtagtatactattctttacagtatatctctttttgggtctagtgcaaacggcaattaaagtgagaagatcgaccttatttgtataatcatttaaattcgtggttttttgtgcatttaaatcccagccacaagatcatcacggtttaaatattgggaaaacaaaatactactactataaacaaggtaaaatttgatgtgcaatgacgtgtaatatttacgtgcattaacttttgtctatttaaggaagtcttctacgtatgttcactctcttagctattatactatagtaacttttaaacctaaagttagaaatcaaaattcagagaaaatttctaaataacatcagaactaaatgaaaggactcaaaggaggcttgagcgaagacgaaacaaaagttgtggaggaaggagcagaagtgggatccacgtgttatgttataaaaacgagtgggatccattttgttaatgtaatatccaatcgatgtgtttggaaggaagcgaatggtgcgcgtgcgtcagcccaattgtgaagtcccacaccaacttgacacttccatccatttttcactgttatcatttataaatcgaattatgatttataaacttctctactaacatcaaaatagccaatcaaaccacactaaaaccatctctattaaggatatatcataagaatttctcacaattaaaaaaataaaaataatgaaaatgaaagagagagtgtagaaagtttctcacttgagaaactctgagatattctctacaacccatcatgacaattttcatcttattattagttcaattttttaacaaaaatacttttttaatcaaataatcaaattataatataatattaatattttttttgtttgagaaactttgtgggtttttcatggatggagatgtcctaaatctctggctttatttgctttaggtcatgaattgatgttgaaaacacaattccagtggtcttcttactcacctttttaaaattttcaaagaaaaaaaatacacattaaattgaactaattgaaattacttggactctttttttcttacgatatttatataaattggaatattgttctcgagaatatatatgctttcctctgtcactacaaaaagatttagatgcttttaccaagaaaatgtaacatgagaataatgatgtagggcgtgagggcctaagaataagcatgcatagagcaatgattaaaacccaatcatgctacggtattttttatagcatttcttgaaatgctctttataatcattgcttatatcgaattcattatagttttgcgcaacgaataaaaatatgatgtagggttttagcctaatctattgataacattcacagcatggcagtgtggcaccttgagaaagaaaatttcgaaaatcatcttcaacaacaatttttttgcttttatgttcaatttcctacgtccgtattgttatatattgaagggttaatttactgaatgaccaaatttgacatccttattaagagaatgaccttctcccagaaaagttgggtatataacgtttttttaccatgcgaaatatccgatatagcctctacggatgggcggcaaaaccatattcccgacagcagacttgtagatgtaggggagctagagattgtagggcaatgattacaacgtatcaaaaaaaaaaagcatgcattacttatgcagttactactaaataaagcatgaactatttatgagtgtagatctcaatttagagctttcattactacaactttctaagtttgtactgaacgtttcataaaatacatgcaatttacaactgcagcagcatgtactatgaaaggatttatttcattttttttttaaaaaaataatcattaaaaaacaaaaaaattagtattgaaatggagtatataccacgatattgggctggtaactttttcgggtgagtattgtactggattgattattcaacaaggtgaatgggcttttaccttgaatctatgaccagcagaagtactacgatttggtaaacagcacaagtactacggaaacaacatgtgatgttttaaaatcacaataatcatatcggagcaacttggaaagaaaacataagagaaaattattagaaaaattcccggatgtgacaataaaaagcgcgagcaaagagagatggagatacgtatcagacgcatttaatgcggcgtcagaggatatacagcttccaacgtaatatattgttgtatgtgtaaacccttttctttagtgtagcactttttaacacaaggtttgtgtgcttatgctatacgctacaaaatggcaggtcgataagttgacacgttggtcaatgacgtcaagattacgaataggcaagtgggggcagaagatatactgaatctatacctcggttcacggaaatgtgtaaagcaaagactaagtaaatcacatggttattttgacgataacatgcaatacaaataaagaacacttaacacttcgatttgacattggttaattgtgtaaagcaaggtttgtgtgcttatgctatacgctacagaatggcaggtcgttaagttgacacgttggtcaatgacgtcaagattacgaataggcaagtgggggcagaagatatactacctcggttcacgaaaatgtgtaaagcaaagactaagtaaatcacctggttattttgacgataacatgcaatacaaataaagaacacttaacacttcgatttgacattggttaattgtgtaaagcaaggtttgtgtgcttatgctatacgctacagaatggcaggtcgttaagttgacacgttggtcaatgacgtcaagattacgaataggcaagtgggggcagaagatatactacctcggttcacgaaaatgtgtaaagcaaagactaagtaaatcacctggttattttgacgataacatgcaatacaaataaagaacgcttaccacttcgatttgacattcgtgaattgtcgcttcacgcctccctcgggtgttgggagggaaatcataccgttttgaaattcgcgtggctgcaaatggttaagcaactgttactagaaatatctttagttactgtagccctaaaaaacaaagttaaccttttctataaaagaagaaagatggcaagatatcatctctcacacctctacttcttcctataaagcacacactacgtatccaacaacatcgaagaactcgatcatttctgttttggtatgcaattaatgaatgttcttttggtcgggtttgttgctatttttaaaaaactcatggttgatttatctctatttaatgcaactctattaatgtgtaggtaccgatggtggttataaccgaaataaccgacgatcgttatgtcaggacggtgagtggctcctgggcaatcggagctgatggaacatggttattcatatccaatcacaataatgcagtgaggaggttgagcattggggaaggggagaagttagcatctgtgcgccagcttgttagagaagcgtacggacaggaatacgttgaaggcccactacacctgacttaccaatggcctgattggatggacatggaaactacctttggtgggcgcacgaagccagtaagcataacttcagaggagacaatgggagtgtttctagctatgcgttttgagttggaggacttgagtttgtttgtctccaagcaaacggtggatgatggttccgaagatggtggaacaagtcagacttcaagttacggatttgcagataaaggcaaatcacctttatacgtcaacgctgaacgatcacctaactacgagtccgttgtgtggaaaaggcttatggatgacgaggcggtcctccgctggatgcgttcaacggaaacagaaggtcaaaacgttggagactcttctaccaacgtacaacaacaccctgtgagaccagctgttgaggcagcttccccgatgttaacgactgaaagtatggacacagcgactgaagatggagatcaggtaaaatattctgcgtttattaaattcagccactcgaatataccattacagtactaagacatctatttacgcaggaagaagactcaactgttgttgaggcagatttacttaaaaatctggggttaccgtcaattaatttagccactgaatcttacgactctctcagtgaaggggaagcgtacaacgacgaaaacgactatcccgggggcgagacaattaaggagtgcaatttttttgggccttccgcaactaacttggtggaacctctaggtgtacacttggatctcgcggtacctctgcatgaggctcttgaagacatgtgccttaacttcgcatctttcaacagggatgcagcgccaaccctagacgaacaaggggaagaaggtaccaattacatagcatgttgtttttaagaacaacacatattgcaagagtgttctaataataaccgtcatatagagtaacatgttattcgtataaataccatgcaataaaaatttaatttcgctgaattcctgattagtcgtacgaatacaatcttaatatccacatcatatttgtttagtttaaataacaaattgtatttaatatcatgtaatataatgatatgcttacaaaccaacacatggtttcaatttacgttgatatccctgagatatccctaatcaaaatatagagtaacatgctttaatattgaacatcatgggatatagatattatgttggtcaaagtgttactatttagtcatacaaatacatgctttctacattcacaacatgtgtacagtgtaaataacacacgaactttattgttgtgtaggccgcgtcggaatggaattagcaattcgggatgtggtctacgaaggtgatgaactgtttgttggccgggtattcaaaaataaacaggattgcaatgtcaaattagcagttcacgcacttaatagacggttccatttccgtcgtgatcgttcctgcaagaaactaatgactttaacctgcatttctgaaacatgcccttggcgtgtatacatcgtcaagctggaggattctgacaattaccaaattcgaagtgctaatctcgagcacacttgcactgtagaagaaaggagtaattaccacagagcagcaacaacgcgggtcataggcagcataattcagtctaaatatgcgggcaacagtcgggggccaagggctattgaccttcaacgcatcctattgaccgattactcagttagaatttcctattggaaggcatggaaatcaagagaaattgcgatggatagtgcacaaggatcagctgcgaatagtttcactctgttgccagcctacctacatgtgctgcgcgaggctaatccaggttcaattgttgatctaaagacagaggttgatggaaagggtaatcaccggtttaagtacatgttcttagcattcgccgcatcgattcaaggtttctcttgcatgaaacgagtcattgttattgacggtgcccacctgaaaggcaaatacggtggatgcctcctaaccgccagcggccaagacgctaatttccaggtttttcccatagcgtttggcgtggtcgatagcgaaaacgatgacgcatgggaatggtttttccgtgttttgagcaccgctataccggatggagataacctgaccttcgtctcagacagacattcctccatttataccggtcttcgaagggtaatccttaaaattgataattttaaatgttacatgttatatacagcatatggctcttatttattttagaacacatgctatctaccaatatgccctgctatatacgtataacacatgttaacatgcaggtctacccaaaggctaagcacggggcatgtattgttcatctgcaacgaaacatagcgacctcatataagaagaaacacttgctgttccacgtgtcaagagctgcgagggctttccggatctgtgaatttcatacatatttcaatgaggtgataagactagatccggcttgcgcacgatacttggaatctgttggtttttgccattggacacgcgcttatttccttggggaaagatacaacgtcatgactagcaatgtggcggagtctttgaacgcagtcttgaaagaagcccgtgaactaccaatcatttccttgttagagttcattcggaccacattaatttcctggtttgctatgaggcgtgaggcagctagaaccgaagcatcgcctctaccaccaaagatgagagaagttgttcatcgtaactttgaaaaatcagtccgatttgcggttcatcgccttgacaggtacgattacgagataagggaggaaggcgcaagtgtctaccacgtgaagcttatggaacgcacatgctcctgtagagcatttgatttgcttcacttgccttgcccccacgcaatagcggctgcagtggctgaaggcgttccaatacaaggactgatggcgccggaatattctgttgaaagctggagaatgtcttacctaggtaccataaaacctgtacccgaggttggtgacgttttcgctttacctgaaccaatagcctctctccgcctcttcccgccagccacgcgccgtccatcgggacggccgaaaaagaaaagaattacttcaaggggggaattcacggtaaacgttatacatttggaatttactgtaacacccttagtgttttaaattcctaacaattgctcaatcttcatctcagtgtccccagcgacaagtaacacgttgttctcgttgcacaggcgccggccataatcgcgccacgtgcaaaatgcccatataaaggtacaatgttattttataccgtatcatgctatagatagaaacaacgttcatacaatttttataatatcatctgcagggggtgttgtgtctcgcgtcttcttcatgagttatatgttgtgttatataagcaaggggaagtccatcacatatggatattatgtaaaaggaagggtcacttggtataatgtacatattagcaattagatgtggcaattagggtggcaactaaaagctacgttgagaatgcaatcaagggaccccaattccagtaagtgccgtatagaagaccaccttctacggacaaaggataatgttctgttttttggcttttgtgtagaaaaaaactttatgttcccccttttgtaaacagactcatgatattaagtaaagacgcgagtgtttaattattaatacgtggtgtaatgtaaaattcagatccacagacaaggggttaaatgaggaaatatatgaaacaaatataacgaatagatatagcaccattactggcaaattaaagtccataaaaatgttcagccatcatgaactgacattttatgtcaaggattccaacaagatgaaatcattccaaccataaatcaaaataagatgctattcgagaaaaccacatgtgatgtttagcaattgcgtgaggtaaaaccgggcaccgagagttgaacagttccacataggattccttatgccacttcgactattttctcagaacccaataagtgcttctgcaccacacatttcaccccccaactacgccacataaatgagtgaatatatacactaacaatattggactatatatacatattggctatcaacatctccgtcaataataaaacgtccttcggcctacttacacatgcttgcaagggtagaaatgagacagtatcgtcagaatccagtactcatgcgggtgggtgggctgttcagaaaacaatttgacgacgcattggaggcaaataacccggaagcacattatcttgaagggctaaggtatgcttgttgggagaaagatttagtcatggcaaaaaaacacatttttaaagctgtaaacaaggtagatgaggcgctgtttgttatggctatgttgtctatttgtggtggtgagaaggagctaggtgaatttttcactgaacaactgtttgccctaccttgggccgaagtattagctatgggtgattctttattttcagctcttgaacgaatggctgtgcgccatggtacagcttacaagcttacatggaatggggcccatcctccatgtgtatcaatccacaacatatataatagatgcgaagagtgctacattttcttttgttcaaaagaattctgtcggcgatgttagatggtacaagctgcacccaacgtggaaatctcgtaaccagaagggaagcatcctttaaaataatatgctgttattttatattaacccgcgtagcatctataaatcacattctgtttgtaaaaagtacatgttttatgtctaatgtgttagtcgttatgataatggtgtcaaataacgatattacattaaaatggcgtgatatgtacctatattacatgttttatattgactttttgatcatgttaatctgtctaaggtgtataatccaaaatatttttaaacgggtcattattattgcaaagtttacaaccgggtaagtcctaaatatcaactaagccacagttagaatgcatctatatttaaacgaatcatgaggtaaatataaaacgcacggtacatattagaattgcagtgacatatgtttactacacaaaacaggtgcatagaaagaacattaggtactcaactgttaggtgtctaatatattacagagtcaggtaatagaaggtaaacacactagaacatttgggtcagacaatcccattagctaattcaaaaccggcaatgaaatatttattagcagcagtcaccacatcagcatgcttcacttctttgcaagcctgaatcccaccattggcatgggcttcaattaaacgagctgccatgactccagaatattttacagaatctgcctgtggaatatcattttctctgtgaaccgcaagagatttcaaacgaagtttcttttccccagccattttaatagcaaatcgaaatagatatggtaacatttcagcaaggggcaaaagcactttcttcaattttgtttcacgccataatcctgtatagcagtcgaggacgctaatgatccttgcactcatatcaacacaaagccctacccaatgctgtaaatcaatgagaaatggaatgtagaccacagcagaacctgtaggggtacattcaagtaggtcgtgatcaaacccatacattcccttatcagcagacttgacgaattttgggtaatgcttggataattcaaccacaaatgttgaatcaatgaatgaaacggcttggtgcttttcaatgatattatttgcacaccagttaatccttatgctattaatgaagatgtccataacctgtaaatagagtagaacgcatattaggtgtttaaggcaaaccctatgtttatagagcactatgtaatcttttttacccacatgatatttatcataccattttgggtacaacggtcttgaactcaacaatctcacgcaactcaatggcggaaagtgttcgacaagccccaaaatcaatgtccctaataacagccatatgcataagttttaagtaatatgagtcaaacaaaataaaatagcataaggttggaattaatacccagacatgccatataagcgatttatcttgttcttacggctaacatcatgcccaaaagtaacagacctaccgcttgtggaagaggctattacggattcatgttggagctgtgagcaacgtaaacgtgattagaaaatcagatgttatcttaataatcaggaaattagagtttgcataatcctaaacattctgtgttaaacttaatggcatgtaatttgttctaaaaccttgatgtttgtacgggcaaaacacttacaatatgacaaaactttttaaatatttttttgttatattaggtaaaaccctgaaccatgctgaaaatacatgatgtatcgcaaaatataaccgtgtgcatattaaaccagtgttttgtttttaaaaaccatgaataagtaaacttgacctaccacaaaactacgaaatccatatttaacaatatcttaaccattcatgcacccaaactagacctaacacaaaactatgaaatccatatttaacactagctaaacgcatttatgcaaccttgccatcagggtccacaatatcatttgttggggctggcagggacggttcagatatcatcggcatttggcttaaattggcctaaaataagaaacagttgcatgtaattagtttgttagtggtaacgagagtaaaaaataatgaattatatgatctaacattatcggctgtagcaggtgggtcagcaagtccttctccatctttatctgaagcaccgtcatcaaccattggcccgggggttgacttacattgggcagtcaaatcagactctatctgcaaggcaaacaacagacgttagagccaatacacggaaaaaaaaaaacataaaaactatatgagaaggtttgaactcactatgcatgggatggtgtactgcaactctggctgacctacattgtatgcaacaccatccatgtcaacaagcaccacatatggatcagggaggctgggctcagattcaaagaactcattgacgtctgtgggaggaggaagcaaacactgagtatgactcgctgcagccggaataggtttatcagggctagtttggatatcatcaaggccctctccacctatcccatcaccgggggcatcaaccaagatattatcttgatgggatacagttttatcaccagaaacagacttttccgcaaacatatcgtctaattctttagccggcagagtggaagagccaatgtcatgaatcccatctctagctgactcatcctcagtggtatcagtcaccacccctccaactttgttgatattgacagcttcaggggatacatgtttatcagcagaaacagacttttcagctgaactgttgtctactgctggcgtcaggatggtggctgctgttgggccattgttgcctctcttccgtttctgtttgttatgaaaacaatacttgaattaggaagaactctcataaaatacagaatatttacaaaactgttaaacgtataccagagaactacgcaatccaggcctagtcggtggggataagcgacctatggaagttgtagtctgtgtaggttctgcgtcgttaatatcatgcatcacttcacctaagacttgatcaataaatccagaaccactgttctccttcgactgggctaccctgccattatccaaaacaacaagggaggatcccttcttcccacctaatccctcacccacatctcttgacttaggaccactgtgacgcttattcttcctgccatggctttccctcaacaagctgctcaatctagcctctgaatcagctatagccttcaacatacgcgactccatacgcttgtctttcatgtcaatgtaatttttaatcgaatctggtatgtgaacctgccctttagttttacggggtttagaagagccaggcaaggaagcatcaggttgtatggtatcctcatcaacacaatcataagtgctacatacatcactgttgtcattcctttcatcgggtagcgaatcagggacaacaccacctgaaaacatggaccccttgaatatgtgctcctcttttattagttgcaacatgtagtcaacagatagatcttcttcgtcctcgacccaacctgacttgaaagcgtcaccagtcggtgttccactccaaatagaaacgactttaatctgaaaaacaaagagttagactttagccacatgatattatgttttattacatgtactaaaagtatttatactgttactaacagtgaaatatagattatgtacccatgtgctccttaaaaacaacatgttatttcatcatataaccagatgttgtaatgcataccgccatacgtgacttactaaggtaacagggtatggttattaaaaagaactgtgatcatatttaaaaccatgcagtttttgcataaatcatgatataaataataaatagtaaatcagcacatattaaaaaaaaacttaaccacatgctacacatttacagccatgttatgattattctaaagaaactgtgatcagatttaaaaccatacaatttatacagaaatcatgatataaataacaaatagtaaatcaacacatattaaaaacctaagccacatgctacacgtttacacagaatgatatgaatctataattgtatgtttttgataggaaaagaagaggttttcatgataaaaacgagcatatgaaaattaatttacgagagcagagatgcattgctcacctgagactgccggtcgactttccaaacaagatccaacttcaaactccataagcgctcaatttccgtatctgtttcctccatttctgagtcactatcttcaacggcttcagggaattgcaattctctgattcgaggaacactttgcagtagcaaaagttggagtgcgtgtgggaaaccttgaacggtgatagatttccgcataagtttatcagctccccttgcagtaacactcttcaacgtcattaggaatgacatagtcccccaaggaaaatttagaaacatgtctaaattttctgccatgtccgcatggaccggagagattttacttctacccgaggttgggcataaaacgccatcaatcaaggccagcacagcgtaacgtaaacgaattccttgatcttgaaccactcgcttcttcagcctgccaacaacccactcaacagatacatcactgcggtcaaataggctgtaccaatacttgccaggcgccaattttcgtttccctttcctctctttcatacgaggcggtttgtcgcagttcaaaccggtaacattttgaaactcagaaatggaaaaccgaacaggggatccagagaaaattacccaaatttcttgtttcttcctaacaacaagctgcctcgttagcaaaaagtgaataagcttcccagaatacgcggcgctttcggagaaatcaaataatttcccaaactgagattcccggagaattttcatgtcctccgcatctaacgcgttagcgatgtcatctatcaaagacagttcactgtaggactgcactctctcaccgttgggctcggatccagacctaaacaatcgacggggtaaagagttgttcatcatctacaagtcgaacccttttctgcacaaaatagaagtttataaatcagaaacagtatgtacctaagatttcagttaatcggaatatagattggagaaataaagaagttgatggcgatcgagaacgttgaatagcttaaaccgcatatatttgtgaaattacctgtagcccgatggaattgattgcctaactgcgagattgaatctaaagaaacgatatgtatgagaaacaatatagatttgaaatagatattcggagagtttgcagaatctatgggtagagaacggaagacgtttcctctcggaaaaccagcaaatgaagcggcgctaggtttttttttggagctcctgatatttcaaaaaattcgataataaatcgatttctcgaaattaaaatctatatcgtttgcgtccacatacagcattgctcttaccaaggttttcaaaattcaaatttctgcaatcatacgcctatacacctatatgtcccctaaccaagaacacagttatagggggttgcgggtaatttcagatacgtctccgacagacactatagactcatagttagtttctatattattattgatttcatggtcatctagtgcatataccctatattgaaagacttaatatttttaggaaacaaaaacaacgttcatttatccacatagtattgaaagacttactattgaaagacgtaatctttttgttaaccataaatcttgataaatagaacaaccatgcatagattatttacacaaaattacatatttaaaagcatgcatcacatcagtataagtaagattgcatgcagtccaatatctcacaacgtagattctcttgtcttggattaaattatggggtttattgattaggttattgacttcataaccacagatggggtgattggaaagagataatgaccggagttgtacaatacttctaaattcttgatagtcagtatctaatgattctaatcaatcaactttttctttggtggtactgaattttgccaatgtcaatttttttcttcttttttagtttttttagtttgatatagctcacatacaagtttaaacaatattgataagatgtagtatcagaaataattacaatttaagaaataaaataataattacaattgtatgttagaattcagaactactgttaagagacttatatatacaactaaaaccaaagtgttactgcaaaatcagtttttacacctacgacaagtcacaaccactatatactctcttatatttgattaaacatttagtaaaacaaggtaaatgataaacaaacatgcatggcacaaaactttatttggttttggatcatatgaaaaaggaacaaacatgaaaagccaatatatatgtaaatcctgtgttcgcatcaccactttttatcctttcactgagattgtcggctttcgtttcatagtgtatatatgtccattctctcaacattacagaggtttttggtacacatttttgtaacttaatgaatatcgcaaagatatatatgtatataatcacggaatcaacaagttgcatgatttctattatatatcttcattcattattaattgaagtcatcagaaaatgggtttagttcacataaatacactacatcagaagttatatggatatgttagatacttaagtacttaacaaagataagttttaacccaaaaaagagagggtaatatctcaggttttctagttaagggtaataacatcatcttgaaagtttctactttctatgcaaatgttaaactctccttttcggaaacggatgatgaaaaacttcagttttttttaacgtttcatttactttgtaattttaatgaaagtaaatcataaccttatggctcggttgtatacgtagcttattaactcataataaagtcacaactcacacgtaaagtggaaccatttcaccgcccaaatgtccaatccataacctaaataattatgggctcgtttcttaatttctttgctattcgtctcaatagtttccttattatatatatctcttaggtatacattaataataatcaataacgatttttgtaaattgtcatatttgtcatgttctaacaagatggctgtttattactacttgtgagctagataagcatgatttgagtggtttagtcaaatcaacggcatactttggagagggggaacatgcttttaaattattgtaatcaaaaaccactttaaaactgttacctagttttgtatatcaaattattaattattgttatcaacaacgatcttgatcactgcaacaatataaggcatatagagctagctatagttacttcatattcttatatatatgatatataacacacgattagtgggaaataattaaagctttatgttttctgacaatataatggcttcatgatggcatgaattatcatatgcatgtttaattatgtgcactcagttagtggactctaaatacatactattcaatattttttatattatacaacatattttgaccagccaaaagcctaattgactggtaaatgaaatacatgtgataccatgataatacattaaaaaacattaattatcaatcaaggcactatataattaacaaaagttttgactttaaacttaatacgtgtcccctatcatatggtttaaaatttaaatcaatactagatgattccgttaatctatatcaaatatgattccgttaatctatatcaaatatgattcaaccttttttaaggctgttatttatttgcagttttgcatgatgtttcatatgcttttcgccgccctccctatctacattatctgattgggcaaatacattacttcaatgggcctatcttaggcccaataatagaactgtgcatggtataataatgggcctactgtctgatttgcgcgtagagaattaaaaaatcgttatgtgttttgttttttttctaatatttacttaacacaaacatctatatatctgaaggtttgtttataatgtgtattatatattatcgtagttcgacttatatgacaaaaccatcacttgcttactaatagtttaataatcagaaacagcttaacttaaattaaaagacgacgatattaagccacgtacacaaacaagacacccaagtggccaagccatgcgtacacaaacgatacttaaatagtgtagtatcgaatttttttgttttgataaataagtgtagcatcatttggaaaaaaactaatttaattttagcgtttttttttttgtatagcaaattctatccttaatcggaaatcaaattccgtaaaacaatttgtttttttacccaatatccacatgagtataagagctaaatttttatacaaaatagataagtcgagatcttatcaacatatcaaagatccgtgagaaatcttgacgaaagctcatgataactacaatacattgaaaataattgctcgaatagacagcgattttgaaagtgaaaccccttttcaatatatgttataagctttacgccccaaacattaactaagctttccgccccaaacattaactaagcatgttcaaaagaatttgacattttgagacaaacgtttttataaacttattagtccaatctagttattgtttttagaagtgtgcatcattatataattagataataccatgtttgtgtgcacaaaataaagaattactacaaaaaaatcaaactttattttctatataaatccattttactctctgatgttttgtataaactaatgaggaattaagaaatttattatcggcttggtcttgaatacttaacctctctacaaaaatctcaacccaactaattattttcaatccccactgatttcagcagagagttatcttccttttttggataaaatcctttgatattatatattgatctttttgataaatggttttgtagcatgttcatttcgtgaatgagaaactcagatgacttggctagggtctagaccagtgatgttaagaggccctgaccgacaagccgtgcatgaagtttttcatgtatatttgagaagtatttgtttgttttgtatggtttttgtcattaaaggatgtatggatgatgagagggaaatcaaataattaatgattgagttgttgttttttttattaaagggtgaacgattgagttgcttatgaacgttatttgcctatttttgtgcgttttttttctcaacgagtttgtgaataatgaaaggaatatcaatgtgtcattgaattgttttcgtatcgtgttttgcttcttctgttcttctagtcaatgacgctgtatatgtggcaggactcttacttattctaccaaattttgctacaaattcacacttatattaatatagaagactgtgctctagtcctgtgttggtagaatggtatatcttgtgtagttcatgacaaaacatatctttttctacataccaattatatcaatcaacaagaagtcttagaaacttaagaacattttaatttatttactaaatgagaatttgattttggtgacttgggggataaagagctaaatttttgcaatatgtggaagatagaaatcccaatatcttacgcattaaatttcaatatcaagaccagtttattttaaatagaaaaggtatgatatgttttaaagtcgcatgtgatctatgtgcattaattataagtttgaaaatatgttcatcgaaaaagtttgaagcttatccaaccggaaccatatttcaaaaactagtgtatatacatggttttttggtcaaaggaggaaactattcatacattttagaaggtgcataaatatataaattgaaaatgtacgtatttaaagaatcactcaaatctcgtgtagggactcgccaaaactaaaactaattcaataaaacaaaacacaaaataacaaacgaattggagagttgacttttttatttgtctatcaatggattcaataaggcgaaaacacaaggtccaataaggcgatttggtcactcgtctaaagacttgacgccaattttttgggtacatatcaacggtctaaatctacgtggcaacatagacctatctctcttctgtacacattagtatctttttttcattgtcaaatgtactaacaacatgactagaacggaaaatgcaataaaacctttatggtaaacaagaacagtttatacacaaattagattcagtaatcctagaaaatagtatatactaatatataacaaaattcttatcatactaattagtgggagaaaaaaagagtcataccgtatttatttccttttaatcaattacttcctaattttatatggtaataattactgagaaattaatttagttgtatatttttattttagtatatgtattaacattgttataaaagaattgatatagttaagtacacctcgcctacatataacctgtcattgtcggaaatttgcaagtcatgtcggaggatttgctattttagaagcgaaaagaaagaacattgatatcttaacgttcacaccaattaccaaataagcacccacaatgttcatatcatcatatgataccaatacggcctctttttttataaaactgtggtttcatagtgcctagtggaatctatatactattcacaccacctctctcagttgaatatactttatctatagaattctcttgattacatcagatatttattgcttttagtttatattgcatggtcacatactatttaatcactatattcattaaacacgaaagcacaagtgcacaactcaacatacagtatgctgaaactacatttgtaatgccataaataattctatgctagtaaaagatcgaggactaagcaaaactaagatgacttat

SEQ ID NO: 12 - DNA, 108365 bp, Arabidopsis thaliana
gaattcatcttacaatagaggataacatctttaatcttctcatctctgtcttcctctaccatcgaactacaaccggaagaattagccggagaagattttattgagtggatggaactgctcttccttgtcactttcttagatcttcctcgttgctcaccttccgccgccacgtcaaagcacatacacagccgcataaatggtttcaggaatccaaaagttcttccacttgtttttggttgtgacattgttcaaagatgaaaactacaaagatcgctcaagaaatggaatcttaagaatacgaatccacgacggtggtgtctagagtcgagagatgtaaaatgtagaagatttaagtgtatcttttagtttcttacagattagggataatgactatatataaacatacaaaaggtaattacaattttgtgttttgattctttcgttattttgtttctataacaaaaagtagggcattttctgaaaattagaaagttttggtctttctagagattttttgaaggaccgtgatgtgtgttagtaatagtaatagttatttccttatttgaatgagcttattaatgtattttactaatttgttaagttttgaattgatgttaccggctaaatttgagaattcaattactgttaccacatttgtgggatacaaaatctgcggtataatatcgttattcaaaaacaaaaagaatgaacatttattgttgagaaaaatattggcgaaatcgatgctatcctttgattgaagcaatcttatagcattggtaagatttttgtttccaactactagcttttgctaagaataactatccgactttatcgctatcttttcgacttttttcgtttgcaatatattagcaaaataaatcatgcatgtaataataatataactgaaataatgataaatgatgttataagaagaaagaaagaaaattacataaatgctgcaagagtaacttgtctgtccaaaggtatgaaaataaaaaaggtagctagggcccaaaagcccaaaatacatgctgcaccatgtttctaggtcaaagcagcaacgcaatctcgagtctcgttatagtattccacttttcattgcttcatcacacgatcagatctagatcaaaggtttgggacatttaccacaacaatgtggctcttcctatatcaatcagctcaatgacggttttgtgtcttattctaataatctatatataaccgcttgccattccaatgatgaagagggtagaaatctcgaagagcaaccttttcgtaaacttgttgctctttagattttgatgaaccgcacctaagttcttagctgtcgaatctagcgcctaattaagcttgcctctcaagtcccaacgttttcaacccttcgatagatagcgattagcgaaccaacatgaagatcaatattaattggtggaataaattcacaaatatgagattttaatgattagtcaatgtagttaaaatcataaacccaaaacttttatgataacaaaacttgagtaacaagtaatattttttgtttgtatcaactaaatatacgcaagtactcctatcacaattaagtcaaaatcactttcgagtcaaactcgaattaataatacagctatgatgaataaatgccatccggaaaaaaagaattaaggtttgacttcctattatttcacaatttataagtaatttgtactcgtatatatattttaatcctaacagtactacattatcgtcaacccaaaataatattgggatcggagcttaccatagatctagtttttaaggctgcccaatcaaacttgtaggtggtgatcgacgatgataaaataacaattgagggttgttttaataataataaaatgctaaaaaataataaatacagaagagaattctacttgggggaataagaaagaatgaggattcaacttcgtagatttgaagggattgagagaaataagagaagcattggtcgacacgaaggtagaagcacgtgttctcccgtgcgtgtggcccttaatcttggcgttaatctatcttattaatcttactacattattatggttacaaaatctatgctcttaacggttaataatctacatttgtactttaacttgacagataacattttggttagtaatgaaaataatacaagtattccccgctcttccaaggcggatcatactcattaaatacaattgttttctcttttcttttcttaactatcagtcaagatgctaaattatttgtaacaacaatatagttgaattgatcggacaaatatcttttgttagaaactcgaacttaattcgttctttatttgctatcaaagactatacgtattatgcatgtaatagtaacttattggatttgacggtattaattaagtaacttggcaaatggataaccaaaatgatgtcaataaatcaataataatattgtaccgacgcttggaagtgttaaaacgatagaatgtagaagagagtgcaagtgatcaaatgttacgatgctttgtttactaaatttgtggtgtcttgcggttcacgagaacaagatgctgagaatgtaagtgactaaatcatttacacacatactgtatataatatgatggctccacgataatattttaagagagtgtaattgtaggatatatcttacaatatcaataattcatatttttcttaacgtaaaagattaggtcaatcaaacaaaaaaaagaatgaaacgatttgcatcatccaaattaataaatattaagacatattttaaacaataagtttttgttttccgataaactttgaaattatgaaatgcatgtactcgataataatactcttatgtaaaacaaaaaattatgaaatgcatgtactcgataatcaaagttgaactagtgatggctctcaggaacactcttacgtaaaaatgtgttggatagtttagtaaccaagagaaaacgtcaaaatgattgcacaaattcatagactctaacagacgatgaagacatagtgtgttggaaggggaagggagatcgcttcaaatcaactttcaacacgaaagaaacttggacggccataagagaatcaaaaccaagagcagagtggcaccaaggagtttggctcaaccaccacaaaccgaagttctctttcatgacttggcttgcagttagaaatcgtttaagcacgggagatagaatgttacaatggaacatgggggtgaattcatgctgcgttttctgtcatgctccagtggaaacacgaaatcacttgttcttcgcttgtcaatattcagcagatgtatggactggattatctagaaagctcttatctcaacggttttcaacagattgggacatgatcatcaaactcatcacggatacatctctcgggaaaggatgtttgttcttggtgagatatacttttcagctcacagtgcactcgatatggaaggaacggaatggtcatcgacatggagaagcacccattccctcctcccaattaacccgccgtctcgataagcaaacccgaaacagaatctcttctattcgcgagttaggagatagaagatatgaagactatggcgatttagtttggctcaagataacatagacatctctcatttttctaaatttgttaatgctctcaaattttgcttaaacacaagccgcacttaatgtaaaacaatttttttagaataattttacataatattcaaaaaaaaaaaaaatggtttgtcaggaaaaaagtatttttttaattcttatgaaacccaaatttcaggtcgaataaactaaaaaatcttagagaaattcatccaattgtttaccaaaacttaataggaataaatctaacaaggaccaaattcgaaggtaacttgacgaagaagaaacggaaaagaagacgcacggctcggcaaccgcccacgtttacttcgaaacaattcacacatttatcgatgcacctctgcttccacacacacatgctcttcctcacctctccattcacacatacacacccgtatatatagagttacatgaactcaattatacaccaagtgcccacttgctagatctcacaatctttcacacccaaaaatcatataagagtacatgaaaaatgttgccgtacattggacacaacagctaccagcagcaccagtttccgttgccggagatggaaattccggagaagtggaagctttcttacgaacaagaggctattactgctccggcttgtcctcgttgtgcatcgtccaacaccaagttttgttattacaacaactacagcttgtctcagcctagatacttctgcaagggttgccgtcgttactggacgaaaggcggttctctccgcaacattcctgtaggtggaggctgtcgcaagagaagtcgaagcagacagaacagtcacaaaaggtttggccggaacgagaatcggccagatggtcttattaaccaagatgatggattccagtccagccctcctggttctgatattgatttggctgcggttttcgcacaatatgtgactgatcggagcccttctagtacagataatactactggatccgatcaagattcaccgataacaacaaccactcatgctttagaatctttgagttgggatatctgccaagaaactgatgtggatcttggattctacggggaattcaataatctaactcagaagaccaaagaggatcaagaagtatttggtcagtttctccaagaagatcgagaggagatcttcgagttccagggtttactcgatgacaaagagattcaagagatcctggaatgctcattctcagaggagccagaccagttagtttctcaggggagcttcatgatcaatggtgataactggagttcaacagatcttaccaggttcgggatttgaccaggaaggagaagatggtgtctttctttttgatcacatatactttaatttattaaatatagaaaagtactatttacactaaaactgattcttatattgttcataaagttatatcatacatgaacaatcccacaatataggatccgtggagtagattttactgtatattagtctcgaataatggatacaacttacactttctatgttcttctgctttgcattcttctatcctttcagtttcgaattttggaacatacctgtaaaattcacaaatccttactatatctatatgttaaaaagcaaaatcttgacagttctacatctcgttaagaaagaaaggaagtttagtttgcacctctatcagaacaaaaactataattaacacttttcatcgatcttttgttagttccgacatactacggacctgagtctatggaacataattgatatagaacaagcgacttgcctgaaaataatgctatttgtaagtacaatcatgtcttagctcatgactttgtttctgggtgccactttatgctgcaaccaacacttagataccaaatgcaggatatcagttggtcatcaaaggctatagaatcgaagaaaaatgtatcagatttcagtgtaccttggcttttgatttgatggtattggttgacagctaagggaaagatcaatcgccaggcttagatccctacgcacatatataacaggttaggttttactttaagacttctctgaaatatgttaaaagcagtaacaacgaacctcccggttactggtgagttactgctaggccgggaatcatcaaattgaccatgatagaccagctcaaatggtctacgaccatcctgctccatttgacaggcgagagcaagttgagatagagttgataaacaaaacaagacacaattttcataagaagtattaaatgtttgagcttataaaggaattcatgatttatctactcccaatccaacaaatggctatcttaagcatatatccataatactatatttcaaatacaactttgtgagttaatctttacatgctttagcagaacaaaattcatagaatacccaaaaagtagacactgcaactgacttatctgctgtcaaaatatatgatcacaaattaccttcttatacaagaaaaactcaggtgtacaaacagctccaaattctcttgcaacctcttgtgactgaggcaagagagaaaatgtcacaagaagatccgaatatgagtataatcaactaacaaccctgaaaaaagcattgaatagacaaaaagatacctcatcatataagtaaggaaatgggtatttgaaaacttttgcatcctctgccatgaactcaggcccatcctgtgaaaatgaaacgaaacttaaagaaacctcatctcaacaattaaataagcactgacactacagagtcacacacacaaacctgaggatgagttaccacagaatttgaagatattgcaacaacagcaagacctttctgcagaacagaacaatatagctaagattcatataccaatggatataacaatggagaagcaagtgttcggtaccttcatatagaaattgcatagctttacaatgtctttttttaaatgaatcacaaacgggcaatgattgcagatgaacattacctagcaattgtaacagtatcatgatgaacacaagaacagagctttaaatacaaattatggcaaactgaatcaaacagattaaagatacactcaccagtagagacggatacagttcaaaatcttctaatttccataagtttccagtgagcggctccggaagctaaatagttcactcataaacacacacacaaatctctataattagaaactccttgttttttatgtttttccagcgacgcgcatatcacagttttacctcaaaattgggagctctagctcccagttttactccggctgactcagttctagcggcgcgaaccacgaggcgcctcggcgatggtgcattgactctccgccgcagattactgaagtccaacctcgacggcgagaatgaagaaaacctccgggaagagactgctaatgcagttcgtgaaggaagtatagatgaagctccgtgtgtcacggtggttacgacggtggaggcagccattgtagtctctggtgatttcttcaattctaccggagccataaaacacgcgtcagtatcttagacgtttctagatgatgggccgaatagagataaggcctagcccaatatgttagcacaaagtaaatgaatatttcgagaaattaaattgtatcttcttttggtccaagcccataaacccaacattattttattaaaaaaacaaattagtatatctttttttcttttgttttactttttagtttttacttcttctcaatcaaacactttttatatccgaaaacagaaattaaatagttattgatggccgactaaaaaagaagaccaaaaaacaaaacttataaagtactattaaattttagcatctagaagagaaaggaataagccgataacgtaatgtcttaggctcttagattaagtgattgatttattttaaaacaaatctacaaaagtatttcaattcatgatacaaaaaatattgtgattaattaaccatgatatgataatatattttgtttctagtgatgttagaggtgacgtataggccttttgctttcaaaacttgcaatatatatgcgatttacttgtacataactaaatgtatataaatcacacacaataacaaaagtttacaaaacattagtgaattgttaaactacgaaatttttataaacttccacccacatatttggaactcgttggaactaagataaattaatctctcataaagttttcttgtttctataattgtattataaagaatgtttatcaatatatatgaataagttctaaattgtgtaattgtatatatgcgatatggacttaattttcaaatgataaggcaccttctttataagttataaatttataattaaaggatattctctaacttttcgtcgtctattaagaatgtaatcacattagggtcatgatcgggacttaggaagactttatacgctactgcaaattcacgttttagtctgatagaaattttagttttatacaattaaaagtataatagtgttagtggattagtttttagttttgtctcttttgtttttgaaaagggttgtaagtttgtcaatggagggtttaactcgagtactcatgaaccatatatgatgcggtggtacgtcaagagtggagatataggattagatatctcgtagaaaaacaatttaaattttcttataatttacgatcttaaatacagtatcgtactgagaataagttcttcttaccaacatcataatatgtttactttagatataaaaattgttgagaaatatttaaaatcgtaaaaaaaaacgaaatcaattggtggtatattacaaaaccctttttcgttttaatatattacaaaaccttgttaggttttaatcgcttaagagcttgtttttatttattgtgatggttgaaatgtatttatattttattgtatgtacttatactaaaggtacttaaatttttattgatataaagtacagtgtgagtaatgtttgatacaggagaaattgtcgtattatgtaatgtaattgtgaagcaaattgagctttacatgaatattcaatatctcaaaactaaatttcaatgtaaacctttcacataattatatactaaaatatctatataacacttatataatatgtatagtggtgtaaatgattggattcatgaagaagagctgacaatccaaacaattaagaaattgagagaagattccttttatttcatccttgcatgccttatgatcagccagcacatctaaacggaaccctaaacccattaatcaatattattagtgttttcaacagttagtttaatcgttgatatcaaccattctattttatttaaataattggatcgattagaaccataaaacaaaaaaattgaggtcaaaaagtgggtcaccatcatcataatctaaggaatctaaagcgattagtcgattactattttcatgccatacccatatattatatgaatatatgcataacatatatatgagttataccctctttgctgttggagtttacttgtctccgcttctaacccaaaactatattattattatatatttttggtttaagccaaaactattttattactttcatcaatcatattataacgaggaacaattttagcatattaaagttgaatgtcttttctttttccttatatttaattcttctctttataatacaaaaggtaacaccaacttgataaagtctttcttttttttggggcaaatacttgatgatttaaagtcaaagcgatgttttacattaatatatatataacgctggtcttgtaataaagtagaagattacaaagaagaaacagagagaagagatcatgaagagaaagagatacgagatggagaagaagaagaagacagagattcaaaccgccattgaagagctctctgttttcatcgtaactaaacctgcagataagactgaggctacacatatacccttgaggcctattctctccttctgcagcttaatcatccaagttcttggtatctttatttctagttttcgtaggaaattatattattttgattaattgtttcatcgattttatatattttcctgagaaactgaagttcaaggacaactcaatgattgtcattgtcctgagctgcttgtgttttggtgcttgcagataagataggaccgacaatggctgttcttagacaagacattgatcaaaatattcaggtaactaaagataatgtaacctcatgcatgcatattaagacaagacaaagagcttttatttatatttttatttgtcctctttattgattgaaactcatcacatcatgtgtacgtatgcatgtaatgtatggtggccggtgggtctaaactaatatcaataaaatagtctatataaaaaatctgttgaacttttttgctgataagaacgcccaatagatatcttctcaatgcttttgttttgggtaaagatctcttcaaataattcaatgtcaggcttgtaatcccttattgagtctatttttaaaagactttctagaaaatctcttctttccctctttttctcacacttcaattatcatttacttatgtatttattatttgttgatttgggtggtgtagagattagagaaattttatgaaacagattcctgtgtttactcgaatttggctgagattctgaagaaagaaaaggaggagggaacatccaagatggttgcttagttgtggtagagctcttttttggctcactaggtaggtatattcacttcttcttttttttgttaaaaacccttcttcttttttcccggcgatatttaccttaattaatgtataattcatcacctaattacagaattctcataattgatatgcatgcacattaggattgtattctaagttctaattcataaactgcacttttcgtaattagtttgtccgatccatcacgaatattctctctattagcactccgtactactagttacaactttggactttaccatatatggaactaatgattagttaatgtactatttagtgcttaattaggtgtatgactctttcttactatattctattacataggacaatggattttactgcgggtttactacgattgttgtcgaaagagatgtcgtcgaaaatggaagaacttgtagaagaatgctacatgacgactttaaaaccgcatcatggatggatcgcgtctgctgctttcaaagtatacaccgtgatccctctcattctagctatgtcatacttactaacatcattttcttgttatatcccagcaaacttattttttattattatgaaataggtatgaacatataaattaaacttttcttgggaacatatattacatgtgttgatatcgtgagaatatgtaataatgaaggtgtgtttgaagctggtgcctgacaacaagacgttcatggaagcgatcggtgcaagagacgagagctatgataccttaagagaagacattgataccttgagctcattgttgacacctattctcaaagaaatctactttgttctggtaattaccattaacttataatgtagtatttttgtttatatattatacagttaaagtcctttaatttatacgttttcaatttttcggtttatatatgtatatccatcaattgattagcgtgcatggtgtttcaatttctgtttcaggaacaatacgggttgagcagattaagatcgatgtaggtaatggaatttagtggatattctcccaaatgataattttacttttaagaaaaatgtatatatctatgtatatatgtatatcattgttgtaagatttatttatttaatcatccgaaaaccaaaatgatttctctttctaaagttagagctagatatatgtacatctctgtatcacgtgtataaagatgtgatttcttctgtacatgtcacggatcatgtcttaagctttgaaaggactatgcaaatatagaagtgaaactgtaatgcacatcatcgatcgggctctcatatgtctcgtagtattgatattggagtctattgcaatattaaaaacatgtgacatgatgccaatgcaaatcgactaatcacaacacgattttgagtaaaatcgactaacacaacaacacgattttgaacacattatttattcttcattaatctcgtataaaatggtaaaaaagattatggaaactgatgataataaacccattacattactatataggctaattacatatggaccatgatgtggatctgggcttttaaaacttccatgatctcataacaaagtctcttcctcgctcacgtcgaaaacatctccccgaagtttcttattacttaccttgttcaaatcgttaattgtcctttaaaacttcgatctttgttcaacaaaaataatctcagactctcggtcaacggaatcgaagcaaaactctgcctctagttccgtagaattcaccggagactgaacaaaaatcccgtgagttttttagttttccgttacattctctgtctcaattctgaaacttttcacatgggttgtgctcaaatttcctttttaatggttgtcgagatttatctataaagtcaatgatctgggtttgatcaaagtctcaatctttctcttaaatttcgaatatttgatgatcccacgagttagtctctctaaatctgatctggctatgcttaatccgccacattgttgctctcaagctctggatttgattgtatcatgaaaagttatccaattggatcgagtaaggcatttcatgcgtactcaagaagcggtgatttcgatttagaatcaggaggaactatcagaaaatctagaaagcctaagacttcgttttcgaagatgatcaaatctcttgggaatcgtcttcaccacatgttcaaattgcacccggttctcgttttcgtcgtttgtgtctcgtttggtatcacagttctgatacttgtatcgtcgatttacgggaaccgtttaggatcaacggttagttattataagaagaatgatttggatagcgatggttatccatttgctaatctgaagaaccttgtgatggttgctggacattctgtttatacgagtagtgattgtggtaaagttgagaaggaggattcgtggttcttggagtcttatcagaagaatccaggtcaagctgcaacgttcttgagtcatatacaagaaggtgttgaagcagcagcgaaagatgatgagtctttgcttctattcagtggtggagagactcgtaaggacgcaggacctcgtagtgaagctcagagttattgggctgttgctgagtcaaaaggatggtttggtgagtcttattagtttctgctctttattgacttgatggcaaaaatgtggttttgattgtttggcttgtgttaatgaacaggtaagaatgaggtgaggtctagggccttgacggaagagcatgccagagacagctttgagaatcttctctttagcgtttgtcgattcagagagctcacaggctcttacccacagaacataacagtaaagccttttgctttcgaattttgcgctctttagtgagcgaatggttttccattcttgtgatattaatgtatccctcatgcttggatcaggtagtgagttatgattttaaggaggagagatttgcgcatttgcatcgttcagcaatgggatttccggaatcaagatttttctacttaggaacaccagcttctctatcatccaaagaaggcgctctaaaaggcgaggctttggttagatcacaatttcaagaagatccatacggatgtgttggttcgctttggcgtaagaagctgaatcgtgaccctttccataggactataccttaccctattggttgccctgaaattggaggattgttcaggtactgtggttcagctccttttcctggctctctcccatggggctaatctgtataagatctatacttaaagaggaatcaatacttgatcaaagagcttgttggtagagaaactctttttctttttgttactgtccaacatatttagattatacagaaaacttcagaatctttgtattctgctttcatgtgttgtcgaaaaaccgagaattttacttgtatcaaatgcaatttacgtaaaataaaattttgacatttctatccaataacagatctctattcactattttttttatttggtaaaaaaatccatgttcagtcaaaggaaacaagtacacaagtgaaagaaaaaagaatagtaaaagagtagttgtttactgaagtaacaactgccagctctgtctcaaaacggtttgttgttctgattgttgggtttggaggaagaagatgatgatgtcctggtttttgcaaaatccatcaggtctttaaaaaggatatcctctggtttatcatctttctttggtggagtaacaggagcagcagaggctgttggattaagagagagattccgggattgtcccaaaagatcatcgtatgaagattcagaggcactgcttgagtgttgtggaacattatgctggaagtattctggcctcttgttggttctagcagacattgagggtggatacttccggggctcctgagtctcccatggagcaggaggcaattgttcagtttggtcatagactggtttggtgaataaagcatgctcaggggatttgctctgaggaactggttcatcgaaaataggagcagaatagtcatggtttgatgattgggatgtactcggaggctttacattctcgaaggtttcttgaggtttgtagacatcaccactgaggaagtccatagcaccagaatcaacatgtactggcctcattgaagatggtggaggaggaagaatagggttgaaattcccttgtccagtccctcgtgcactttctcttttcgacctgcagatatgagttcaatgagttctagcaatcaaagccttgggattcaattgaaacgagtaagggatgatggacattacctatgagctagctgtaaaaaatcatcatctgactcatcatcatcgtcatcatgattgatgctaacaagcggtattggagtgggagctgttgcaggaacagagtttccctttgccttatcatcatggtgctgaagaacgcgctgcagattgtcattcagtgccaacccttgacacataagttcctcatctctggaaaaaggaaggagcatctctctcagtattaacaaaatctataaaatggaggagacaacaggtggatgagggagaaaacaaacaaatccttacgaagtagtattcacaagagccattacacgtctttgataagtacgacattgctcgaccaagtcaactataagttcttccttcaaaccctgtcacagcatttagaacagagagtattaaaaatcagatcaaacaacaaagccattaaacctaatcatgttactattctacctctggatgacttggatcaagagccccaagcatgtctgtcaaaacatcaactgatccctgagcgctttgaatctcttccatgctgaaaatgtgaagatactaaagtctataacacggaatacaaaataattgaacagaaagagaacttggaacaggaaatctacaagaagagtatacctgagtgcagaagcatcatcactttgcagagaggcctgaatagcagcatcttcatctgatgcagttgcctgagcaacaataggctgagtctgaggtggagtaaagaacggtacactgctctcggttcgaggtgggaattcaattccagcagactaaagtgttttcaaggcaaaaggataatcaaaactcggagtcataatattaatatatacataaaaggctcgagtactataccctgagttcattataggcattgtagtactgagggaatcttccgccgcttccaccaaaagcttcttgccatgtatctaataaactaagtatcttctccctcacagtcaggtctggctgtataaatttgataaatttccaggttaagcagattggataacagaattgaaatataacaagcaggtaagagaatggtaaacaaaaaccttcttcttcactattttgaccatatcaggtaaaatatctcggtcaacaatgagctggtacacactctcgccacaattcttactcaaagtttccaaagcctgaaccaatcccccaaagaagatcaatacaataaagagaatccaaccaaagcattgtatgagtaaaaaggtaaacactcacataaagagcaagaatctggactttagaatttttacttcctaaccgtttcttgagcaccttcactgcttcttttgcttgactagagaaacaaaacaaggtcaaaactttaagcatcctaggctcctagcctagactcaatcaaatatcagtagatctctatagtcattaaaacgacttaccttggttccatgttgataatgtcacacagttcaatgttgatagcccaatctggaccgatcagcatatcgtttgtagccctctcagcacaagcagccgcattattcgccatcgcaagattgctttttcaatcaaatcctaaagttccaagtttcctaatgaacacaggttcaaaaaccattaacataatctcttaattccagatataacatgcaagttaaagatcaaacactttatcaatatcactgtgatcagactctgaaaacaaacaaaggctatcacaattcacaaaccagcttgtaaattagaccagatcacgaagccagaagcattcaattatacaacagactcttaaaagaaggcaattcaatagatacacaggacagattaagccatcaaataaccaaatccaaattcaaggacaaaacataaataagaaagtatgaatcaaagtattggcaagagtttcaaattaaacccataatgtgtctacatctggaaaacaaggaagaagagaacacaacataaacagaaatcataattgaactaaaacaaaggcaaagacctttacctgactatagactctaaacttgagaacagatgatgaaagacgaagcgaaaatttatgcgtgtgaagatccaaaagttgaaacaattataagggttctcagaaaaatctaaacttgtaatcgaacacgatcggagttttgtgtcaggtcatcatcagccttagccgtccataaaatcaactgcgacttctttgttctattatttttgcaagacaatgcaaaagttttgtgctttggcttttgtctctctatatgataaagtaacagtcggtgacgcaaattaaaataagaatcttaattattcttttcgttaacattagtggaatataataagtttaggtcgtaagtaatgatcattagccaatagcaactgtataccaagaaatttcccaaatcgctttcattgttgacttttcttatcgcaaaccacggtaaacgcgtttcccaaacgcaggaaatgaagacgcgcgtttggatggaacaacaactccaaaacaaatattctgtctcataagtccacaatgggaccactctcgtaccaattctttcacagcagctttctctttgaacaaaaacatgacactccttttaaggcaaagattgttattattggttttaggcttttgataactaaaggtaaaaaaaaaatcaagtagattctaaacactaaacaccactgtacattagaattcaaaatccaagagttgtgagagactaatcagtgcacaactgcacattaatctctatttacataacttaaaaccatatccaaaaggatacttaggcttttgcagaagcaaaaatttatcggaaaagtgatcatctttgtgtccgttctctgagctgttcctcctgaagattagactgcaaacactgactcgagtgtatgcgtttatcaagctctgcttcttaagccaataaatctttgtttcagatactgaggaattagtttcttgaatgtaagaaaagagaagcagctacttttttcatccctgcaaaatacagcagacagtttcaaacatcaaacctcgagagtttcaataaatggcaacaagatttgcataatgagactaggaatcattcagatagatattcttgaatcaaaacttcactaaaattgtagtctagacagtttcatttctaacggggaagataaagagcttcactcacaccattcacactctttcaaaaggtcatcaactagacaacaacattttcatacaaccaacaagatagtaaaagactcacgtgatgaaaaaacacaatgaaaaagtggaaacaatcaaaagtcagctttttcttttcttggcaaacaaaaactttcatcaaatcttattagcaaagcaaatccaagtagtattgcgtaagtaagatatgaaagatgaaaactttgattcttcagtttgaaaacataccttaagctgcttcggctcctaatactgttgttgctactgctactaccactcctctttgtgctcgattcagacattctattccaccattctttatcctctactttcacagtctcctcagagatcgaaggtctcggtgaaaccttacaagcctcatcctttttcttcttcttcttcttcttagtcgtatccttcatagctcctaaactaaccagaaacataattttgagaagaaacccactattatttcctcctccactcctattcggatcaacccgtttatcactcttcgtcttcctcacaactttactctgcctatttgctctcttaggcaattcatcgaacaccttccgttcattctcttgattcaccttaacttcaacaagatccttcaatgaaagctcgtaacacgactcaggcatcttactaaccatttccataagctcccgttgaccacgagcaatagcctgtgctttagaatccggcgaaagactccagtaatcttccggccggtgaaaaggaggaggactcttcgggggactggttctccacaaagtaggcgaacagacaccggaatctgagtgatcatcattgggaatactcggaaaacacaaatgggtattgaaggatttagcagaagaaggatctaacatcgtcgatgaatttgcaagactggatttttaaaaactcaagttttattgagaaacaagtttataacgattaacaagggaaacaaacaaaaaagatatcttgcttgacccgttctataaggattattgtattactaagagaaataaagtttcttttttctatctttgctattggggctttaatttaaaacgtcacgttgttctcagagtggttaaatagtccctatttaatatgaggacgttgttgttgttgctgtccaattttggggtttaatttaatttgcagatcgtattcgtaccggatttgaggaagtgtttacttaatggattagagttgttaaaagtcaagtgcttctagatcatcttcccataaaaagtcatcaactcttctagagtaattgattagtgtactcgtcaattgtcattaattgatgttcgagcatgctcacacttaaacaggttagaagagtatattttgtttcacgattatggtaaattcttagtattacaattggattgacaataaatagttgtacaattggtaaactttcaggagcgttgttggcctttgtaatgttttgagtcttttaatgtttgtgaaaagcataatcgacgattaagcgtgttttagacttttagtactagaagatgcgtgtttcattactttattccgttgcagatttcaagggaatctgatatactaatcattcaacgtgctcctcgtttatggccgtctatagttgtgaaagaaatagagaattgactttgggatgttgttccaaaataatgttatgaaatttagtagcgagaggcccaataaaatcttagaaaggcccaaaaaaaaatgggttagatccactcgaaagtggagagccttaaggtcaggacccgaaggtcaaccccgtctctgtcagaggagatgccaaccatctctcctttctatgaacacaatcgaatccactagtctttctatatatatacacaaaccaaaaactaccaaagttccgatgcggtattatttatatgagtttgcaagaaaaattccactactcatgccacttttaagatttcttttctgtgtcgttaattttggacacgtgaatatattatagtaggaaaaaatcatatcatataaatgaaaatataatagataatctagcattaaagttttttagatattgatgaattttttataattagtataccaccacttttaatatatttgtctaaatatcaatcatttagttagtttaaatatgaaaaaaactttcacaaattaaaatatggccaagaaatgatagagttccacgcgtcaactcttttctatttttacattatgcttttaaatggatgagcagtataaataatacatgtacatcttaaatcttaatcaatcaataatacaacctatagtatttacttttaaaaaataaaaaatacaagaagtagagaaaacaaaatgaggatgaagaagatcatgagtgtggtgtggatcacgatgctactaatggcgttatttacgatgggaggcgaagcaaagtcggacaaagagtgccaagtgttgtgccataagcactgtctacccacttcctttgttgcagagtgtctcaaatgtcttggaatatgcgggaggactccaccggttgcagttggaaccatgaattctggtgaacacaaataacaaaaatatgatttttatcttataatatagggcgagacatgtctaggcttccttatattgttatctttatcctaaaattcttataattcaatattcccatttaaccatttcaataagatatcgactcctaaatttcaaacattcgtgcgtacttaaatcggtgataaaacatttttagattatataacttgaacactttggaacataattattttagttagctatgatgtcattgatttcgactcagatatgaagtgttgaacattaagttagactgaaaaagtgtttaatacaatggtacaattagatgtaatggcatggaactggatggtaaaatagttttgctacaaatgagcaagaatttgaggtaattggtttgttcaacaaattgaacaattgtgtggtatactagtatgtcattaaataatgtggaatttgctcaaaggagagcatatcacacacactagttgattaagagatgcttccacagaatcaacgacaatctgaagtcagtaactctgttcccacatttttagatacgaaacacacaatctttaacaaaccccctactagtgatgatgttagtccaagccatacatgatacataccagtttaggtccaagaaagctttactgttaggttagatgttacataccaatgaatctttaaataccaattccaccatcatcaaatcgtttatggtgattgttgtgtaactttcaactacactataaatggaaaaatgttttctcgtggtatcaataaaaaagcttttttttttctttgtttttcacggacgtcatggaaaattcaaagaaagatataaatgacacgcaagtaggtgactttacaattttgctatcgttggataaagatcaaaattcaataaaaagcacaagtacagtttggtttggttgttgaaaaaatctttaaatgatttgctaatgtaggtgttacaacttctgtcaatatttcattttgatttttttaatttttcaatagtatttgtccactataattagtgtaaaaactaaaaatcccaaaaagagaggaagataaataatcattttaagaaaagaaaaagaagttggagatggatacggatgacatgtcaagtccgacaaggaaatacatgcacttgtcgtccttctaatcctttgcccttaaacatcgttaaaaacgacaacttctctcttcttcttctctactcttctccattttcttctcttcttctcttctttgtccattttttgacagatatggcgatctggtttgctagatccaaaacccttgtttctagcttgagacataatctaaatttgtcgacaattctcataaaacgtgattactctcatcgtcccatcttctatacaacttctcagttatcttcaacggcgtatttgagtcccttcggtagcctccgtcatgagtctacggccgtggagacacaggctgatcatttggttcagcagattgatgaagtcgatgcccaggtatatttattagccttttattttttttaataatcctactttaccacgtgattatagttgttattttaaattgggattagttcataaagataagctgtgaatcacgcacgagtcttttaattgtgtaaagaaagaaataattagttcttctgaaagcagatgcttcggtttaaaggcgtttcaatccggttaatcattcccaattttggatttcttggtttataagctaaatttaaaccaaatttaggtgaaactggttgcctaggatcaaaaattcttgcaatgagtctcaaaaactcgaacgtagaaaagatattaaagattgaagattattcagtcttagaaagttagaattattcaaatttacttggtgtgttggttttgatccggtatgggatgatcgcatagtacaacaacaacaacagttcacatccgcacaagtcatggtaaaggtagggaccacgtcgcatgagaagtaaaagtggggacctcaagttacacgtatgaataatactaaatcaagtgctatatgggtcccacttgtgtagttgatttgagtacgtgtacgtctcattcattagtcaatagtcactgcagtctgaatcttccaaaaaacagacactaaatttcactatgatccctgtaattattaaactttcatatatgctcccaatatgattagttcttaacacattaaacctaattgaaaattttccaggaactggatttcccaggaggcaaagtcggttacacatcggagatgaaattcataccggaatcatcttcaaggaggattccatgttaccgggttcttgacgaagacggacgaatcatccccgatagcgattttattccggtacagaaatttcgagaatgtatatcaaaattgatatgagtttggtttagttctaaccgataataatttatgactgggaaggtgagtgagaaactcgctgttagaatgtacgaacaaatggcgacgctacaagtaatggatcacatcttctacgaagctcaacgtcaaggaagaatatctttttatcttacttccgtcggagaagaagccattaacatcgcttcagcagctgctctcagtcctgacgacgtcgttttacctcaggtaaaccgttgcgttcacctccactaatctcatttgcttctgtttgattgaaccgggaagttcaatgtttggtacagtaccgagaacctggagttcttttgtggcgtggcttcacgttggaggagtttgctaatcagtgttttgggaacaaagctgattatggcaaaggcagacaaatgccaattcattacggttccaatcgtcttaattacttcactatctcctctccaattgcgtaagaatctctgaacattaaccattttgattgttcttttgtttacatgtttttgctgaatctgttttctgatgttgattcttcagcacgcaacttcctcaagctgctggagttggttattctttgaaaatggacaagaagaatgcttgtactgttacattcatcggagatggtggcacaagcgaggtttataatctttattaattctcatttctttccataagaatcaacatttcaagaattgaaatttatttagtcttttggggtttggttgtttgggactagggagattttcacgccggattgaattttgcggccgtaatggaagctccggttgtgtttatatgtcggaacaacggttgggcgattagtactcatatctcagaacagtttagaagtatgaaactaacttaacttcctctgtttttcattacaaattagaccaaaacaaatcctctgttttaatgtgagcttatgtggtttgattacaggtgatggaatagttgtgaaaggtcaagcttacggtatccgaagcatccgtgtggacggtaacgatgcacttgcggtttatagtgctgtacgctcagctcgagaaatggctgtaacagaacaaagacctgttctcattgaggtaaaaaaatcacactagagatttatctcaaagtttacaactcttgaatttggtgaaataagattgttgttgcttttgttttgcggcagatgatgacatatagagtaggacatcattctacatcagatgattcaactaagtacagggcggcggatgaaatccagtactggaaaatgtcgagaaaccctgtgaatagatttcggaaatgggtcgaagataacggatggtggagtgaggaagatgaatccaagctaagatctaacgcaagaaaacaggtagagattctgaaaaccgctacgttatattgatgttgagattgaaattattttaaccgttttaatcggttgtgtgtgttttgtagcttctgcaagcgattcaggctgcggagaagtgggagaaacaaccattgacagagttgtttaacgatgtatatgatgttaaaccgaagaacctagaagagcaagaacttggtttgaaggaattagtaaagaaacaacctcaagattatcctcctggctttcatgtttgaatctagaggaactgtgtggttaaaatacctcatatagtatcatgtccatatcgacttctcattgcagactatttatattgtccacgtatcgaatagtaatcaagtatcaatgtagagaccagcatttggagcatcatgaaatggccttgagaatgttattttcatggtccggctgacccttaaccggttcaaactggagtaaatgagtgaatgttaatgctcgagaatgggtgaggctccgttaatcgttaagaaaaaaacgtgcctacctagccaaatgacatcttcctcttttgtgtttagcacaagtgaatgatccaaatatcatctacctaatatgacccataaaatagtatgtgattgtctttggatgttatcccataacataacttaaatttgggatgcatgcatatattatatacttcatataaaatgagtggacctcataagttgcggtttcgatttttatcaaaaacaacagttgtccactttttgattttgacacacccacattcaagcatctcctttcttctatattattactcaaagaataacaccccctaaggataacaccattacacaaatcaattctcagttaatcatttgtttcaatatatgttagtacttaagaaatattcgaatagttttacgtattcaaattttataaattcaatgaatgtttaattaccaagtcattttggcttggaatctattcaattattcaaaaaaataaataaaaaatactgcattttaacgtatcagccagtcaatatattacacgtgtcataaagcattacccacacgtttctcctgcctctttccctttcatttttttttttcattttttttgtttcttctcttgttgttgttatcttcttctagctagctctgtgaaacacttcaaatgaacaaatatatcaaataataatagtgtaattaagtcggaggaaaacaacaagaacccagaaagaggaacgaagaaactaattcaaaggtatgatcttttattctttgagagaattatgttttctttgtagcaaatcctctggtcttacgtttagtcactgaatttgttccacttctggaaaaatctagacaccagagcaatctatgaactttaatttccaatcactaccgtcttttgaggttgtaaaatcggtaaatggcagatttttcactctcattcctttgtggtgataggatcaagttcaccgcttcattttagtcattaaacaaagatggtgatgggaggagaagcatccatggaactggaccagtgttttcagaagatgaagatggaaggaatctcgatcaaagagtggaaagatatccctgtggagcttctgatgaggatcctttcccttgttgatgatcgtaatgtcattgttgcttctggtgtttgcactggctggagagatgctatctcttttggcctcactcgtctccgtctatcttggtaagaatttctatctaacttataaaccctttttgtatttaggactcttctctgtgttggtgttttggatttgaagtaggagttgagtttctagagtctttattgtatcttgtgcttagggtcatgttgatttattgtctatttgtgtaagatcagatctttttttgttgcttttgttttgaggaacattttagcagtctatatatgattgatttggctagattgaagaaagtgaaaaagctgtttaaatttttgatggaactcttttaagatgatagatcagttttcaataggaggtgaaaccaagttctttaatccagaagagtggtctgaagatgactcttaaatctttgaaccactagaagcttgttcttgtcacttccagtgtattcagattgatctctgtctactacactctttgatgttgtttcttatttttatactaggtgcaacaacaacatgaacagcttgttcttgtcacttccagtgtattcagattgatctctgtctactacactctttgatgttgtttcttatttttatactaggtgcaacaacaacatgaacagcttggttctttctcttgttcccaagtttgtaaagctgcagactttaaatctaaggcaggacaaaccgcaactagaggacaatgcagtggaggccatagcaaatcactgccatgagttacaagaacttgatctcagcaaaagcttgaaaattacagaccgttcactttatgcacttgctcatggttgcccagacctcacaaaactcaaccttagtggctgcacttcattcagcgacactgctattgcgtatttgaccagattctgcagaaagcttaaagttttgaatctttgcggatgtgtcaaagctgtaactgacaatgccttggaggtgaatctttgtttttctttaatgttctctcccaaacttggttttactcctttggtcataagtgtggcagagttgatagaatttgttcatgttgttgtgtgcaggctattgggaataactgcaatcagatgcagtcactaaacttgggatggtgtgagaatatcagtgatgatggggtaatgagtttagcttatggctgtccagatctcaggacccttgacctctgcggctgtgttcttattacaggtacttcacatagttaagcttactcgaagctaagatcattagttttccctctgcagagaactatcattggataaactgcattgaaataaacaaaactagtaggttgttatagatggactccgaaagccattgatcttgagactcaattcggtttgtcttgtactatttcgcagatgagagtgtggtagctctagcagactggtgtgtccacttgaggtcactggggctatactattgcagaaacataacagacagagcaatgtactcgctagctcaaagcggggtaaagaacaaaccgggatcgtggaaatcggttaagaaaggtaaatacgatgaagaaggactgagaagtctcaacattagccaatgcactgcccttacaccttcagcggttcaagctgtttgcgattcatttcccgcacttcacacatgctcaggaaggcattcgcttgtcatgagcggctgtctgaacttaacaactgtgcactgtgcttgtatccttcaggctcatcgtgcacacaatgcggttcctcatcctgctcattaagacagaggaatagttatgttgtatatataaacatcatgttgatggagattagtattataaacgaagtagcttttttaaggtttatgtgaaaccttagaagcttttgagttgttctttctttgtcttgaaagatcttttgtatattttggtgctatgttcataacttctttagtaagacctctcgttgttaccactttactattgaaagtagaattcctcttaccaaaaaagtcgtagctaagattgttaaaatatccacaggttatataatctttggcttcgaatggagatgtttgatgaggattgtacaaaaatgggccttttcaagtataaaaattaaaaagaaaggtcctaccgggagtcgaacccaggtcgctggattcaaagtccagagtgctaaccactacaccatagaacctttttgttcaagatttaatattcaggctatatgtaccaatattataacatagttttttcaccctcaaaggcaagatccgtcttccatttttagtcaaacttcagagtcagagaacaaactttaaatcaaaacagatcttttttttaggttagttgtcaaaaaatttattgataagaagaggattttattttatttttaagacgattatttttactttaatagaccttcaaaatagcatgatatttatttttaagacggttatttttttttttttgggacaagaagctgatgtcttattgaaattgatgctatctgagattctgagcaataactgtaattcataaatggggtttatattatgggcctacattttgtcttgccctcaaaattaaagtgtagtgtgatgagaagtgacgttatgctgaaaacatcataaacggtatttacgcggctccaatttgaagttttaggtcgaaatgaaggaatagttgttgagatgattcacctaatatagtttcttaacacttcacagcttcgtttgtcagtctcagatttctaatttcggacacaaacacaaaacgacattgaagcaatattatgccttgtattaatcatatccctacgaccctaccatatctatgtgactatgtcgtgcttcattttttcttccgtactcgtatatactcgtacgtaagtacggaaagtgttatttcggaaattaaatattatggaaaagttaattaagaagttttgaattagagtacttaaggaaatcttataatgacaaccgtgtgttgactcaatctaaagactactttcacacatagcagatcacttgccaaaatagcaaaattgattacaaatcttccaacatatcctatgattcactacttagagtaatcaacttaaaattaaacaatttaattacctaagatttttagtcatatatatatgtgttgacacttgacagagtaagtacagctctgcaattgagttaataaattacacactacaacactgacaacagcaacaacaacaagatggagaaagaaatcaagattctggttttgattatcggtgcaggaccagccggtttagcaacatcagcttgtcttaaccggttgaacataccaaacatagtagtggaaagagatgtttgcagtgcctctctgtggaaaagaaggtcttacgatcgtctcaagctccacctcgcaaagcaattctgtcaactccctcacatgccattcccctcaaacactcctaccttcgtctccaagctaggtttcatcaattaccttgacgaatacgccacacgtttcaacgtaaaccctaggtacaaccggaacgtcaaatccgcgtacttcaaagatggtcaatggatcgtgaaggtggtgaacaaaaccacggcgttgatagaagtttactcggcgaagtttatggttgctgcgacgggagagaatggcgaaggtgtgattccagagattccggggcttgtagagagctttcaaggaaagtatttgcactcaagtgagtacaagaacggagagaagttcgctggaaaagatgttttggtcgtcggatgtggaaattctggcatggagattgcttatgatctatctaagtgcaacgctaatgtctccatcgttgttcgtagccaggtgagtctacattacaaatgaacttggttatgagttgtaacaattaatccgaataacaaacatttttatcgtgtgtttaaatataggtgcacgtgttaacgagatgtatcgtacggataggaatgtcgttgctcaggtttttcccggtaaaattagttgaccgtttgtgtctattactagcggagctgaggtttcggaatacttcgagatatgggcttgtaagacccaataatggcccatttctgaacaagctaatcaccggccggtcagctaccattgacgtcggctgcgtcggagagataaagtccggcaagattcaggttgtgacgtcgattaagcgtatagaagggaagacagtagaattcatcgatggaaacaccaaaaatgtggactccattgtcttcgcaactggttacaaaagcagcgtttcaaaatggcttgaggtatttttgcaacttcagacacaaaaacagagaaaagaaactctgttcttggtttttaatggctctgatgtgatacacaggtcgatgatggagatctgttcaacgagaatgggatgccgaaacgcgagttcccggatcactggaaggggaagaatggtttgtatagtgctggctttgggaaacaaggcttggctggtatttcaagagatgctcggaacattgctagagacattgattctctggtttgtgggagaagcagcaagaacaagctttccaaataaattagaactttttttgagtttttacatgtcaaaacacacaattattgaatattgatacaaacaagtgaaaaaagaagataacattattgatgatacattgcaagagcttcgattgtggacagagtaatcagaatctcattattttgtttcccctagagcgtttctgaggttagagtacttggtttcgagctcataccatgaatccaagttcaccaaacggttaaactcttcgaaagttatcatcttttctaagtggtctttggtggttcctttctccttgagaatcttaagaacatcgacaagagctcgagtcgacgcatagagcgaggtaagtgggtgtgcgatcaagtgaaaacccatttctttaagctcatcaggcgtatgcaatggcgtgcgtccaccttcaagcatgttacacagtctgtaaccttttgtgcgccttccgatttccttaagctcgtcatcgtccctcggtgcctcaacaaaggaagcatcagctcctgcctgcacatttttccaatctgtctctattacccaccattatgtcttctcaaaagttaaagctttaataacacaacatgatttagtagtaacctccatataaagattagcacggtcaatggcgtctgaaagtcctgtttttgcggaaagtgcacgagcatcagtcctagcgattagaaaaaagtcagcatctccaatagcgtctcttgctgatgctattttagcagcgtgttcctccgcaggtatgacctgtttccaaattagaaaaataataatcatctgcactcatggactataaagtaataagtttcaatgtatagattttggtagcaaacgatgagggaatggtaccaatacctctttgccacgcatatgtcctacacaaatgacaaattgagagagcaaacgagttaaaaccattattggacattttgacaatagcttataggtttgcagaggatgaaacagaaaaataacgtctcttaccacacctctttggccatgcctggtcctgcaagaaacccgaaattagatgagtacaagtcaggatgaagaaactgtttttgtagttactctaatgaacacaacaagtcaacaactaagatagcacaagaaagaaagattaacacaacactatgagtgattaaatctaacacacatgaaaatacattaaaaaaagtagagactagtagtttacctcaaggaagcaaccagcagcacctgctgcgattaagtccttgacggttctttgaacattgagagcatttcctccaccagtatctgaacattaatgtcaaagaatatatcttttgaacagaacagaacagaacaaacttctgatattttccaaatcacttcaagatattgaaaaatgaaaattgcaattatctctacgcaaatagagatcaaagtaatcaactatggttaaagtcatttagagcagcaagagaagagtgtttgagattgtgttcttgcctgcatctgcaatgattggaatctttggagccgcagcacacactgatctcgccgttgctgccatctccggaggtctaaaacgacaaagcaaaacgaataaaacgacagaagataaagtttctactaaagaagaccaaaaaaaaaaaaggcgcacgttatcaaaccgaaatctggttttcccaaagttacggcggagagggcgtaaccggagattaatgcggcggagaatccggtctgctgcacaatagccgcagataatgcgtcgtagactccgggaataagcacagcaccttgctcttcaatcagacggtgaacacgtgactgcattctcaccgtcggataaaccgatctgacgccgcgagggttttgccctattttagctgaaattgtagggtttgagctaaagagtgaagtggatttggccgccattaacatcgacattctcgaagctctgaagatagtacagaaccgttggagagtgaagaagacaagagatcagtatatatcaatcgtaataaataagaagaagagaaagtttactttaattcaacgatatccacgtgtcatatgattattagctattaattgtactgaggctcttaatccataatttaaacgaatcgtgttgatatgaaagttataaagaaaaaccattgttgcaaggagagactatggttaggtacgcacgtttattggggttagttatggtcgtggagttatgcgttcatcaattctacttccctaacttcgtttgtgattcaattcaacctcattatactttaaagaagagtttggtaagtatgttcctaaactgatcaagggatttagaccgagatcccttgtgtggagttgatgtaggacagacttgttcgtgaaactgatatcctctcttactcccttttattaggtgtgtgtattagccatgttaagcttaccttgacgtatataattccttttgtataggaaaaaagattataaacaaaattatggtcaatttcaatatacttatacaatgcatatcaaccaaaaatatcattatattcagaaatttcgcatttactttcgtctttatcaactttaatttgtattttcagttttgtattataacccatatattattttcttatagaaacctactatattttaaatctatcgtttctctacaaacttgggttaaaagtgatgaatcatgattatttttaccaaacttgggttaaaactcatgaatcatgattattaattatatatttactttcagttaaaagtgaagtagataaccatttagacaattaattttggttgataaaaaaaatatatgcaatataaatcacatatatactcaaagagttttctctacatttaaggtgtctagccatgaaagttttttttacatcaaaagatattaaaaatatttatttaatctaaatctattatatttattgttacttataataaatgtaaataaattaaaggtttatattgcatattatttttgactttatagtagccctgaaagttcggtcagaaccgattaaacagaaccgattaaaccgaaccgatcaaatcttatcaagtggtacataaagtattttagatcgtctacttgtcacataatcattcttggtctttgaggaagcaagacaaccatgaagaggaatggtcttgataccaaaaaaaaagaataagataatgaacggtttaaggtaaatatgatagtccacataaacaattgcattaatcaaatagtataatcaaatgataatctgatgaaatttttcaaagaattgatgattaatgctagtattacttgtgaacataaattgctcaaacaattcaatgacttgcaagactaaacacaataatattcacatgtttttttttttttacatctcatgattgatagatttattaatttgtttttattttaatatattgttaaatatgttatttaaatgtttgccatgcaatttctttatcaaaatattactttttaaatctatgttgatttttttgttgatctgctagcttatgtaatgtatcttgtttttaagttgattattgttagtgaattcatgataatgtaaaatcttaaatacagtttatcttccataatttaaaagagagtctatgtacttatgtggaaatcccataattttcctcaactattttactttttcttttttaattctagtatctctatcaccaaacacttttgtttctaaatatttatctttatttttttaaaatcaattgtcaaacacacataaaaggttttcaatatataaagttacgaattttaaatatccgaatttttcttaccaaatttgtatattttcgaatttcttttttagacaaatttttccttcaattaaaaactacaaaccggccggtacaattgttctaagagcaaactttgcaatctcatcagcctcacgattgtggcttcgagaaatgaaagaaaagctagagaattgaaatttagaagatagaatcaggatatttcgaatttctattatactaaaatgcattgttttgttataattgaaaataaaaataaaaatagtaaatcactaaataatatgaataaaaatcgttccactatttttcttgccattgccatttacataaattgatagaaaaatgataaacaaatatctaaaatgataaaaatcgttccactaatcaaggattttccatcaaagttttactttaaaccttgcttctttatatatttgcttctttatttaaagtttgtatatttgcatctacaaaccagctcaacccaatttcaattatgggcttgatttttacacacaggttacgacatcttgtcttcaatttctctgtctcggcttcgtcgggcccaaaagctctttgatttgtagaaacgtggagttgtttgtttttctctatagagtatagactacgactttaatatcctgattaatactctacttgtattctttttgttggtaacttttctttacaaattccactgatcatcattcaaggatttccttcttcttttagttactttcaactctaataacttttacttcttctttttttattccctgtcctaagatatattcccatccgtgataccttgagagttaagacgaaacaatactagtagaataaattagatcatagaagaaatctatgtagacaacacggggatttcaatcttttgtttttaaattaagttatctagtgcaatattagtgaaatatagattttgtccttaagacattttatccttatatgaatattaatatttgatactaataagtaatgactaaattattagagcttttgaaatcatgggacatgctgtcggagactaataaatatgaatccaaaacaaaattccatggcgcagccggattttgcatgcgtttagaaccaaacatcccacttcctagtgaaaatcttttcttaattcataaatcatggagaagtaactgtaatttacatatgtacccgtaagcatatatatatgatcagcaatttgactcgtataaattttcagagttcatatttatgaggttagagaattgcatttgtaccaaaacaaaaacgaaaatgtaatctcagaaaaacgtaattgcatttttaacaagctttcatttcaaataatcttgaattccaaagaaggctgttgttctgcagaacattattctattcacactttaataattcgtcaaaagaacaaaagaaacaacaaccaactagctagtaacatcatttgtttaaagaaacttccatttgaattccaatatggtaacattatagcatacgaaagcaccttagtcaatgagatttgcacttttcctttggaaaattaagttctgtataatggttgaatatataatattgtgcgtgggataatccatatgtgtactacaaataaaatgaaaattgtattgtaacaaataaaatcagaagttacgtagtggataagattgagaaagagaagaagtcctatgtgggtattgcgaggataaggttgataaagactctgcgtcaaatgtttagtatcctcattcttcatcatattttaaataaaatacaaaaaaattcttaaataaaataaacaaattgagattagattctttacatattgcttaatgatcattacttatgcggtaaacaatcattttatttggagactttatatgtcccactaaacttcggaaacttgtaattataaattatcgcccaatagtgtgtaactcactaacttaagctattgctaaataacatattttaaagatattcaagttaggatcagtgtttaacgtagaattgctgttgtggattcacagttgaataagaattgtaatcaatctaattaaaccggacctaataaacaaatgatgttaagaaataaaaaaaaattgtcgatttttatgaatcataatttgtcaaaaaaaaaatatccttgaagttttgttttggattagtataataaaaaaacaaaaacagtaaagaagataagtaagataacgataatacaacagaaaatttctggtaaaacataaagtactttctcaagttttttttttttttttgttgataaattatactttctcaagttgacaaagtagctttgaatatttcataagaatcaacacgttaagctgcactaacagcatgaaatcgtgaatatttatttagaccaaatgtcaattagtgcgtactgtcgtaggcaccttcgtcaccccacgatcgcttccgtcatataattttcaggaatatccaacggtttgtgtttttcctcttattaacggtttgtgtttttcctcttattactccaaaataaatatcataagacaaatattactttgcactaacaaaacaaaaaaaaaaaaaacaataaatcaatactaccaaaaaaaaaccgagtaacaatttaattggtcaacagaaattgatcaaaaccaaatcggacacggaactgctaattatatacagtagtattcttttccaagtgagatataaatcactaatttcagttaccttctggaacagtagagctagagaaaaattcaaagacttttacaaagtcttgtaagcaatttaccctaaacaataagatattggtattcttcagaaaacaatcaaaattctcttcatatcatttttttttgttcgttcttcttcagaaaacaatcttcattttttttgtttttgaattttttttggttcaagtaaaacctaacaccacacgagtctttaaaagtatgaatctttaaagagtaaacacatctttaaacaaagaccacaagacacagaataaaaccagaaaaatcagaacccaaagccaaagcgtttttatcatttctgtcttcttctgtgtaaacagtaagaccccaaaggtcaaacctttaggctttgtttcttcctttaaggcttttttccgacgtttatatcagatttcttcttgtcaatttcttcatttggacaacctccataatccaagaccgacccttttcctctaatctctcctggtaattgacttcatcaaccaatttttgtttcctggtcctttagtcttttctctaagctttagatacttgtttgattatgttgttttgctttactctggactttaatccttatgtaagctgtttaaaccagtcaatttgctattaagaaatagatcttagtgctctgattgttctgaattgggactatggaagagatttattggttaactggttatggtattgagaattgcatagatttggtaggtatcagaggaagagtttttttcaattgatttggtgagagttacataattttttttttcaattctcaatggatttttgatgatagtctttgctttggagaatcagctctgagatttggatcataaagtttcaaacttgctttatctatgatgaattagtaacaaaaggcttaaactttaggaatgatctcttgaagctttgcatgatttaataagcttttgttagaatcacagtgcttgaggtttttctgtgtgtgacattgataagattttgacatttgggaacgttgtagttgcagctgaatggtggaacaaactgtggttagagaacatatcaaagcgagagtcatgtcattagtgaggtctgcagagccatcctcatataggaacccgaagctttacacgttgaatgagaatggtaataacaatggtgtcagttctgctcaaatctttgatccagataggtcaaagaatccttgtctgactgatgattcttacccaagccaaagttatgagaagtactttcttgattcgccaactgatgagtttgttcaacatcctattggctctggtgcctcggttagctcatttggctctttagactcatttccttatcagtcaagaccagttcttggatgttccatggaatttcagttaccgttggattcaacctctacttcatctacaaggcttttgggagattaccaagcggtttcttacagtccgagcatggatgtagtggaggagtttgatgatgagcaaatgagatcaaagattcaagagcttgaaagagcgcttctcggcgatgaagatgataaaatggttggaatagataacctcatggagattgacagcgaatggtcgtaccaaaacgaaagcgaacagcatcaagactcgcccaaagaatcatcgtctgcagattccaactctcatgtaagtagcaaagaagtggtgtctcaagccactccaaagcaaatcttgatatcttgtgctcgtgcgctatctgaaggaaaattagaagaagctttgtcaatggtaaatgagctgaggcagatagtttctatccaaggagacccttctcagagaatcgcagcttacatggtggaaggtctagctgcaagaatggccgcttcaggaaaattcatctacagagcattgaaatgcaaagagcctccttcggatgagaggcttgcagctatgcaagtcctgtttgaagtctgcccttgtttcaagttcgggtttttagcagctaatggtgcgatacttgaagcaatcaaaggtgaagaagaagttcacataatcgatttcgatataaaccaagggaaccaatacatgacactgatacgaagcattgctgagttgcctggtaaacgacctcgcctgaggttaacaggaattgatgaccctgaatcagtccaacgctccattggagggctaagaatcatcggtctaagactcgagcaactcgcagaggataatggagtatccttcaaattcaaagcaatgccttcaaagacttcgattgtctctccatcaacactcggttgcaaaccaggagaaaccttaatagtgaactttgcattccaacttcaccacatgcctgacgagagtgtcacaacagtaaaccagcgggacgagctacttcacatggtcaaaagcttaaacccaaagcttgtcacggtcgttgaacaagacgtgaacacaaacacttcaccgttctttcccagattcatagaggcttacgaatactactcagcagttttcgagtctctagacatgacacttccaagagaaagccaagagaggatgaatgtagaaagacagtgtctcgctagagacatagtcaacattgttgcttgcgaaggagaagaacggatagagagatacgaggctgcgggaaaatggagagcaaggatgatgatggctggattcaatccaaaaccaatgagtgctaaagtaaccaacaatatacaaaacctgataaagcaacaatattgcaataagtacaagcttaaagaagaaatgggtgagctccatttttgctgggaggagaaaagcttaatcgttgcttcagcttggaggtaagataagtgacaagagcatatagtctttatgtttcataaaacataattatgtttttactgtaatcttgggttattgtgtaactggttaaatcatctccatgtattattaccagaggttaggggtgatcacaggtactaaaagctaatctaacacttatggaagaatttttctttcttttttttccctattatataaaaataattagagttttggttctaaacctatttgctaagtgtgaatgagtctttacatgttcatatttcagttcaaatggttaaatttgttaaggttctcacttactattaggcttatcagttttaactcttaaactcaaaagctcattagatccataaaactcacaaaaggcatcgtcattcttcatcaatcactagtgtatcagtacgaaactaggaaacgttacatttttcagcatcattttttttacattccaacgaaacgaaaaggaaaactctagttaagcagagttaatacgaaatcacataaccaaatcatcctcaaaagctcttttaaacttgaaggtcttgctttccattaaccacattctgcttcttctcatcatctttcatctccactgacttctcatctttctgagcatctgcagatttctctcctttgtttccacagtagatgaagtatagtatcaattgcagtgtccctaatgcacatccaaacccatttgggatcttcgcaacaacaaaaacccaaagttagaaacaaagttttgatatttaccaaagaaaacaacacaagaaggagaaattgtaacttactgcaacaaaagggtcacgaccgattagaccatagacgaaccacgaagtaccacagaggaagacaaagagtgacaaaaagaatggcataaactctacactcttcgtctttaccaccaatctctgtaaatcaatgaaccaaacacaaaatttaacaaaatgaatccaaaagtaaagagtagaactttaaaaagatccaatcctgagtttgcttaccatgatggagagtggagaagcgtacatgatgatggagaaaacagtagctgcgagaccacaaaagagttttctaccgtttccttgaagagcaaagagagagacgagagctactgttgcgaatacagccaaaacgcaagagaagataccaaagatcttaattttctccttctttggtgcgtagaaaagaaagattaacacgtagactgtttcgatcactgctcctgtgccattgattgtgctcacaagtgtgttgtcttttgacacaaagggaagtccatacctgaaaaaaacagagaaacgcagaaacagaggaagtaagaaacagagctatactctaatggaagattaaaaacgtaaaagagggaattttttttaccaagcagagaggagacagttgaggagagtcattggataagggataccagagaattgttcagtggatttgttcttgatgattctcttgaatgttatcctaatttcattcacgaacaaaaaagaatcttgagttttttttttccagaacagaacaacaagaaatcgaaagaatcataaatcggttcactatagaagagagaagtgatacgtacgaaggagccaagaaaagaaacagagcagttgcatttcctgtaaaaagtagaaaaacgacaaaaacggattagtagtactctcagtgatttctcatggaagaaagacgaagaagatagaaagacagagagagaggttgaggaaatgagttgctaccgaaaacgccgaagatagtgtgagcgatgttcatcttttgatctcaaaggtggctaaagattcttctttttttcttgttcgtaagctgagagagaaagtgagagaatatgagctaagtgttttctatcggcaagcgtatatatatcgagattcagcgtgtgttaaccgcttcactgtggaacaccaataattacaaaattaataaaagtataataaattatgaaataatggtattaaatattaaattttaaaaatacatggttctgttattaatttttgtagtatgaataaaatttgaaaaaaaagttatggttaagaactaatgttttgagaaaacctaagttttaaatttgagttaattgagttatttcttatataaaaaaaaaaaagttcccatgattttgaattctagtgtatatatacagattttttcttgataccaaattaatttttggaacgaggttttttatctgttacttgtttttacgtcctcgagaggtgaacctgactctttggatcgacgtttcttttgtagatagttatagagatatggttaaatacttaaaaatgaaataaacacctaaaaagagcaatgtcttttcttcttttgttttttgtttgatactaaaagtagctctgaacaagccagagtgttctgggcttgacgttgatatgtgactcgaggcccgagcctgtattttctgcggggcagtggctagtggttcatcttctccatgatgtgttactttttttttttcgttgccctctttaatagagattctagataaaatttgacagtttaggaagtttctggttacataagcgaaaccaaacctaacaaactgtcaagtttatttaagggcaccaataagtttcactaaatttcagttattctataccgttgaaccacagccgcaggatatactttttagtatagtgagtgatctttttggaatgttttctagtcaccacgagttagcttattcagctttacccaaaccatatcggttcattcatgatcattttaaccggagtaaaaccaacaaaaagaacattaggttatgattgtgaggctaaggttaatggatcaacgtcggtagatgagttgattattgaagatgaccaaatttgttgaattttttttttttgtaggaaaaaatcatgaaattggctgttctcgcgtacgtgttcattatatatttttaatacgtctagttcaagaaaacaatttagctatgtacgcagtatttagctaaaattcaagaacctatcataagtccactgcaaatctaatttagtttatgataccgtatttcatcaaatggcagatttttatcaacccattttttcttttttgtcgttggctacatcaatatttgttgagattttgatatttacctagaacaatgtgatctaattactatatgaaggcaaaaccaaaatttagcacagtaacatgattactagactgctagatgattcagtctgcatacttttatgctctctcatcttttgtgagttgaaaacaccttttaacttgttatccacaatagtcttacttttaaatccgaatctaaaatgcagaagcttgaaaatctttggatgtggacgaacaaatgccattatatattaagctttcactaggtaggcacaaattatctgataattgtaataaattatcaccaaaaacaaagaaaatcgaggattgaggtttggtttgagtccgacgtcaatgattgaaagcaaaagagtactgaactagagagaaaaggaaaagactatcagaagagtgaaatgatgatgacgttggtatcagcaagcaccacatggcatggcacaactcttcacacgagtcacgtagctctttccttttccagacatattcgaccttccttgtccaagttgtcctctctttcaaatttgtttttttaataagaaattggaccactattgtgtactttttggttagaaggatcgttaatatcgaaaaaatcagaatgaatggaacaagcggaataaataattaacattttctcgttttattaaattttagtgtattcattcattttcgattttattttgtaggtgatcacacatcaatatttaaataagagtttgcctaatacatatatacaagtgacctaacgattatgtaactctagagacgatgaaaaaaaagtcacctaacgtaacttctactaccttaaagataagctctagagacgagcaataaatatatacaatctctcgatatcgatcatcatattcttgatgtaacaattcagcagataaatttttcttttttaatcgaagttcaaagagttttcttgatacgatcgaatcaaacgataacgatatatatatataagaagggtacttacattcatcgattggggacacatatttatgaagagattgattataactcctcagaattaaatatttacttgccctcaaaggtaggggaatttaaatattagctttccctcaaaggtagggctctcttctcgacctttctaactttctatgcttaactgcatttctttgaaaattttgcacgttgtaatgtaatagtaataatgtctttgcactgctcttacctacttttggcttctagcttcttatgatatttttgtattgatggacttacagtaaccaccaaattgtatcagtcttatcatcaccaatcaatcatcacagagttgcaagttcgtccacgaaactttggaatcattcacctaagttttaaacttattaacgcttttggtatatgccagatttccaaagcaaacaaacgattcagatcgtacaaaagaattgtgttaggaagacgccacattgttgatgttccatagccacactaaacttaaatcatattacatgatcccaaagcggactggcttcgacaatacgtaaaaccttagaaataaaagaaaattgcaattgaaatgaacttaattcactagaaatgtgcacttatgaaaacgaaagatgtgctacgtacatagcgtttattcatcccacatctctttgtaagtccacttgttcgcaacaacaatgtgtgttgagtgtcaacagctccacatgatctgcttttctttttggcctgaagatgaaatatctccacgcatagagcctttacctcgccacgaagcaaaccagcctgttcaaaaactcaatgatattgcttacgttcagtcactaagagcttattaagcaaagtcactctttatcgactggaatctatttataatgcaacttttttcttttacctcggtccgcatgttgctagcgtttgcaccataattggccagagactgagcagctaaacatctttcatcgctaagcataccaagcagaagatgtccacatccaatacagtcatgccctatcaaccgaacaaacgaacattagaagaaagtcacatatcaagattttgaatttgacagatacaaaatttgtcagataactgaccaagtttccgagcttcctgacaactcaagaatgtacttagcacggagtccaaatgggatatttattgccctgatttccatcttttcaacctcaataggctcattaagtcctcgttgcctatctatttttattgcctccacacgcacatctttggcattgattcctatggattaatcaagaacctttgcagcaatatttcgggggccaagtagtagacccacaagtatgtgatcagtcgttacatatacgtggccaaacctgcgggtttcctctttggccagcattatagctttcattgtttcctcggtaaaccgctcaaacaacatccttaggaaaagtcttgagggttttcttaatagcagcagctctttgccccgagattcaccgtaaagctgcggccttcctagctgcgattcacttggaaaggctgcagttgataagggtagacaatagatcataagaccaccatatctatatctctatatatgtatagggctaaaaacaaaaacaaaaaaacacaacactcttgaagtataagttaatccaaagctaatgttatttgaaacacaagaataacttcctcagcatgccaattcacaaacacagcaagcaacacaaaggaacagtttttgttagttctctaccaatcgaagccgagaacaacctaattctcatggcacccacctaatttgcgaaaccctaaatacaaaaagaatccattcttccttttttttcccaaatcatattcactgtgcccaagccacaattgaagcagaaaatcaagttacaaaatccatagagcttactttaaaagtatgtccatagcgtgacctagactctttttttgtgtcggccgtcagagtcttgtagaagaagcaaagaggggaagatgttaggttttggttagagttacaaggaacatgcctattaatttaaaggatactcactagccgaacctaatttggctttaggtctcatactcactagccgaacctatttggctttaggttttttcagttttttttgtcaatgagccatttccccattttattagctgaatttaggtctttgaaatatctggtaaaaatgattatcaaataatgaatttctatatattattctgcaatcttcacaatctttcatatttgaatcgaagctaaaagagttttcttgttacgatcgaatcaaacaataacgatatatacaaagaaggcacttacactcaacgttcggggacacattttaatgaagaggttgattatagcttcctagaattaaaaattagcttgccctcaaagttagggctctcttctcgacctttctatgtataattaactgcatttctttgaatacaatttgcaccttcgagtgtaatactaataatgtctttgcactcttcttacctacttttggcttcttatgatccgtttgtattgatggacttatagacttatagtaaccaccaaactcgtaagccttatcatcaccaatcatcacaaagttacaagttcgtcctccaaacttcggaatcaagttcataaactttttaatgctttctgtatatatttcctgatttccaaagatcgcttcaaacaaacgattaagctcattcaagaagatttccatgggaatttttttacaatcgaatcaattgttcaaaagcagaataattgtgttaggaagatgtcaaatctttgatgttccatagccacaccattatttgttacttaaaatagaaagttcctatttactgtggtgagctgtgtatacacggaggcttgtttttggattaacatcaccgatcactccaagaaaacagatttggactcgttctgatttccgtgtggaactctgtttcgtgggatcatattattggttccttgtcggtagattactgaacaaaactttgtccttccatagacaaccatctctttcatctatctggatccttctattcagccaaatcacatgtcggccgaaataaaactcagtgtcctttgatccgtccagatcaatctacaggtaaaataatttacaagcagatcaatatagtatgcactgtgcttgatcaatatgtggatatgattctgatttctcaaacgatagctttgtaacatattactctgccttcttgttgtgaccagtttagtctctgcataaatcttagatcattcccatgagagatgcttttgtttatggtactataaaccgtaaacatcgaagagaagccatcaattttgttggttcgtcatttttctatcaaattttagtcaaacaaattccactgaagagtgatatgtacaaaaaaatcaagttcacaaaaaaactgtactcaaatgtatcattcattttgtttcgtaaacacaagatattctagtggaatgttgaaaccggtcaaggtagaggcataggaggtctccagctactgaactggaccagttctctattcacaaaactgccattgtgcagccaaaacgtctcagtcgattgctggaaatgtctaactttgcgttgaagctcccatagaatccctttaaccgcactgcagggtgcggaatctggaccgtacacaaacaaacatctaatcttccgacctcgggctatcattccttctatgtctctatctgaaagacaagccgggaagaagttcttaaatctcaagaatctgagcaaatccattgatattggcgaagagaaagcggttctgaagtaacttaatgttacctgatattgaagctaagtaatcaagaaactctgagcctattcgagttgatggccatttgatcgatacttgggcatagtcgataacattctggaaaggcagctcggcgtggtcagataaaagaaccgggacacattcctgaacaagcacaatcacaatattacacaacgtaaggtaagtaataaagaaagtgaaatcaaaagttggggtaaagagaaaatagagatcagaccacaaagaatgattcataaaagcgaagtgtccatgatgattccccacgaggagcgaggcagaacttggcattcctcagatgttcaaaatatgttgtccttccaaacttttcagttccgctaaacttcaaatctggacattctagctgttcacaaaaccactcatgagaagcaagcaaggaaaagaaaacatcgaaataacaagtaatagcttagcagatcctcgatggaaaatgaaaaacgtgtataagtagtctttgaagaaataatgtgagactaaccttatctggaaattgctttgataggtcaatcaatttaagtcgaccagccttcccttgtgcacgacctaaataatttgctaaatacttcctctttgacagaggcaaaggctgaacatcaggttgtccatttttagtcatagcatcatcgacgtttcctggtatgattatatctttccatgaattaaaggcagttgtgtctttcttgtcagtccggtcagcctgcatccacaatcattgaagcattcatgtttctgtaaaacaaactctaagaacctagctcaatgattccattgtatgattctacaagtaggcacatagaccattcagtttattcgaaaccacccctaaaaatgtccaatgaaaactctgaaagccagaagagacagatatggaccaaagaactttcacattagcgcttcactaccaaatatacttcaaaatacaagaaactcctaagcagagagcaagctaagtacctcgggagtgaggataatagagcggttgataaatgttgaccaggatctaaacaagtgagctccagcaccactacaatagcataacaaagaaaagtaatgtcaaagttagtataaaaagaatacagttcatcgagaaaactttatatactattgattaagtgccacatacctcggaaaaacaaatatatgatcacgaccaccagatcttcggaaatacggcatttgactcaaaacctagtgaatccgaaacaatgtcaataatacatatcactgtaattcgaaacaacaaaataaaacatcagcatcaacaatttgaatgagtgagtgatgatttcgttaaccttgacataggtctgattgatctccttgtcattaagacctcccaacattctcacacatttaacataagctggcacaaagaacaaatccgcttcatctttcttaatcgtcctaaatttggactccaaaagcaacttgtgaattttaacctatcatcaacacaatcgtaagaatcacaagtagctagcaaatccacacttaactacattgctatttccagaaattcccagattgaatcgttaattcaatgtgaaattaagaaagaagaagataaatcacctgagatccccattgacctttcaagcatgcggtggtcttaacactaccatccctaccgtacaacagctctttaagaccgtcgatctcattctcatcataaacgtagatcttcagcgagaggtgagacccataacctcgctccggccaccgtataataccgttatcagttttgattccgtaagaagaagaagtacgacggagatcaatcaccggagtaacggaattggattccgagaaccactgatcgaaaagcctagtgacgaagaaggtagagacgacgagaaaaagagctccaatctggtgcgtgcgagtgcagggagtagcgtagtgactatacgcaccaaaatttctaggcttattactagttaagctcgccatttctatctctctcactgtttcttcgttttgcttcttcaaatgttttaaggcatttttttttgttttcgcttagatcttgcatagatgatagatgacgagaacataacgtttggtgttagtgaaacggcaacgttctcatggaaataaattaatttctgagaaaggcccattatgggctcagaagaagagttcgtatacggcccgacgttcctatggtcagtcccatctgatcttgttttccgcaaacctataacaatcttctaatttaatttaatgtcttaaatttaaacctataacttctgttttgtcggttgtttactaaatctacttctaagcccataataggcctatttataattttaaacgacccattatgtattatcaaacgttatacaatctaggcgtttgtgcaagttcaaagcaaaaaaaaaaaaaacttttattgataaaatgggagaaaaaaagtgttcataatctttcgtatttgttgggtagtaaacagagaaccattgagaagattaggaaagattcaaaaaccctaatctcttattctcattttcacaaatacaactgtgtatgaataagaaagagagattttcgagtgtttgagactctttctatggtgcagtcaaaacactcccacattgcattgaaactttagccgatgggcgttctagtgttactctcttctttgaagataaagacttcaatccaaactggttcgatttcgatggtaacttcaagtataagtttcatcatctcttattcttatttttgtgagtcttggatagatttactaaatttttctccttacatcatacaagattaataggagaagatctggatttttaccactgctccagaatcagttcatgtcctgctttgcaagaaagatccacattgcccgcttgcaggtttctactctctgtctttctctctctcttcaaacgttagaacaagaacaaaaacaaaataaaatatgctatgttataaattattttagcttacataacaatttctaatgtcaatgaaacttatttttctttatcaaaaaaacaactaaattctagaagaaaaaaatcgtaaattcaaatttggaaataataaattacaaacgaatttgttttatttatgtcttactataatagtttatttggtttcttttccgtttcttcttcgtcaagttactttcaaattaggttctttgatagatttattcctactaagttttggaaaacaattggataaatttctcttaatttattcgacctgaaatttgggtttcatacgaattaaaataatacttttttgctgacaaaccattttaatacaagaaaataaaataaaatacaagagtctatgaatttgtgctatcattttgacgttttctctcggttactactacactatccaacaaattttacaaaggattgtaacatttagtgtttctgagagccatcaaagtcactagttcaactctatttaagaggtgtgattaacgctttaaacgcggtattattatcgagtacatgcagtacataatttctaagtttatcgaaaaacaaaaaaaaatattgtttaaagatgtcttaatattaaactagtactcactaataaaactcaataaacgtaaatatatagtgttattaattagtcaaacaaatgttttcggaaaaaaagcataaatgttctaaactttctttttaacaaaaagaattaaaatacatagcgaacatgcattaattaatctaaagatggctattatgattaagttgttattcataaggcaaaacaattttatacagcgtcgattggttgttggctactaaataccatttttttttttttaaagaataatattttgcaattgaatctcttttctcatcttgtaatttgatttgcattgtgatcgtgaccttctatctgctctgccttttccttaacttcttcttctttttccacacgctaattgataatttatttaaccaaatttgggtataccttttgttgttttatgtcaccatcatacactactaaggttctcctccattgaggaaccaggagccgtgtgtagtgtgttatacaaatcagaaatatttgtactttgacaaaaaaaaaagctttacgaaaggtggtttatattcagatatctccacgccatatatataacgatggcaattaatgtatgcatgagcggtgttcatgttgttaagcgttcattactcatacattggttgagatcatagattcatagttggaacatatctgagtatctgaccgtttgtacgtacgtacgcttttgcatgacccacttttggaaattcaatgtgaatatgtcaacagattttaaaagagatatatcataacatatatgactgtttgcctaatgtcgtttatgtgatacaagtcagaaatattaagagacagagagagttataaaatggaagtcctttattaattataagagagagagacatcttaatcttaaatcttttttttattactgattaattagttaagagtgtctataacagtgaaacgacaacggaagtatctatacatgactaagcgaaaccacgacggaattgtctatatattacgtgcgcaaatttaaacgacaatgtgtaactaaaataacctaggaaacagcccatcgggcttagataccgttacgggcaagccatttagatagaagggcttcctcaactccttcgtcggaaatagttgctacgagacggcgtatatcatcgccggttccgacgaacgcgaccggcacatccttctcgaggttttcaggaatttccatgacttggtgaagcccgtcgtacatatctatgtcggcgatcaaccgttcgtttgttgggtaatgtatgacttcgatgatgtcatatgtctgcgctttgccgtcatcggacgtccatgacgtcttgataatctctgccacgtggtgcttttggcggaatagatttatcacctttgtcaagtactgtgtcctcagattatgtaggttgttggatacgtactcgtcagctaacgccgatttgcatcccctttccatgtcccttttcactccgtcttttttgaaagcaaattctaatccatggatcttgatcaattcgttgagagtcttggctgcattggaacgcgaattaagagccgctgatatatatgggcgacgcgacgtctgcgaggaagaggaagacattttgtttggtaaatatctttcgtaaattttcttagtctttttgtttgctctgtgtaaattctggtgagttatgtgtttagtccttgctcctccgatgctctgtttttataggcaaaattaatttaaagacacacgcaatacacaataaaatcatacctgggatccactagctaattaaaaagtagtcgctttgaaatgtataggaacgagaccaatgaacgaggtataagtaatccgacgatgtatctactagactactactcgctttgctttataggcaaaactggcaatggcattgtgttcacgtctctctaatttgcatattaactcgagggttaggtggaactacggaaatatatttacaactacacgaatcaacattcccgtttaagtatcttccccaaaactgcaacgttgaaaaaccaaagaaactgaaaaagaagaatctctaatcatcacaaactcaacacttagcttgtatatatcatctttcgttgttaagtgttattttagtttaaaacatctctcaagttattataaaatatctactgtttttatagtcacgaaatatttgttcgatagtaaattacaaccttttccagatagtacgtagatgcatgcagtgtacgtaatatacaacttttccgagataatatacaaccttttagatgcatgcagtgtaataattaaattatatatacaaccttttcgaaatagtacgtacgtagtctagaaaaggttacagaaacattgtcccaatgctcatatttttcttactcaaccattcaaatgtaattaaacgcattcttccgaatttcatttattttcatgtgcacaaagagattgagtagactttatctttgtgtatatatgatccaaatataaagatatatatatacatctcatagtttacccatataaaattacaaatcagtattcagaaaaatgtttgaggaggagataatggcgcaccacgagcaaaatcaagtagagctgtgctagtatcaccactaccaagctatatccatctatcaacttgcaagtatcaaactttatgcattattcttttcaagattttaaattttcctatttattaatttattttagtacaaattaaagattcttttcatttatttttatttttcttttctgggctttgattttaatttgggcttagaacccatattcctatttgaccaattgcatctttgatgtgattcttttttattagcgtgacgaaaaattagtaaaattacactgtgcggtggcgtttatttaaactacgagcaagcatctataactgaatatatggacatacatttgttaatttacacgtgcattagtcttccctctagagctcatggtcttagttaaacttattcaggatcaaattatttattcatctgatagattaggacacgaaccatcgtgaagagttccggtgtcgccgatacgatcggatacgtgtggtcagcgacttgtttcccactagataatgcttgattttttggagtagtgataacgaaaacaagttgatgaaacagagtaacaaaaacagagtaaaaaatagagtacttcgattgataaaacgtaatttgatacaatgttcataaaacgcgatatcaacttctcacttgcaagagtctccttgagagaacctccggcaaaatgatgaggaaaagtctagagagttctagagagaattacagcttaggaattcagcgtaaaaagtacgagcataacatgttgctttttataaagtaaacgttaacaacgtcttccgtcaccatccaacgtcggtaacgccaagttgcatttgccagctcacaaacacgcacgtgcacttcttcttatccatgtgtgagctgaccttctagatcgctatatcatagtttgagtagccgttattgtgttgttgttggaatatctgtcgttgttgtgcttgatgttgttggagtacgtagctgccgttcttgggttgactgtgctggtcgcaggatgtgtaaaggagcgttagagcaaaggttgtattaatgttgataaccgctggtggtgtgtgtgtttggtgaggcgtttctcttccatggtcagcatcgagcgagcttcaatgaactttgggtatgaagaagaagaagatgatgaaaatagagcggagataggatagatcgcgtctgataccatatgtaataagattgtgaaaacacagtagagaattatattcataagataatgttaatatatgttacaataggcttggcctccaaatatctatacatatttgatcttgttgatattatttctatattgtaggatatttatatgtatctaaatgatattatctaacaaaattttggaaagggatcacaaaagaatgttggccatcctacgaataaaaatatacatatataaaagaaatgacaaatatacatacataatatattaataggattaataaaagcttctctagcgaatatgaaccaaactgggaacataattatagatgacaggctctttataatggtcgacttttttagcataaacttccgtacatttatagtcttcaataacgtaaactctatgaaccccttcttttttatcacaaaatacaacgactttgttctcttcgtcctgaatgaagaaattaggcaggttgaaccgaatatcaaagttttcagcatcaattctcatgagtttgctccaagacactttttgtccatctatcacagatcccgtcatccaaatttccacagaatatggatgacgcgtttgatgtaatatcgaaattctatcatttttaacgaacatagaaagatgatcttcacaaggatatgccaaaaaaggcaaagaaagacgtccaaacatctcagctgaaaaatcaaatgtcacaatgacaccttcatgcgtattttcatctgcaccaatccaataagaattcccattcaaggatacccaacgagtaggaaattcaagaagaaaatcaatttcaacgttaagaactctccaagagttagacgtaaagtcatatatttcaacctctaaatatttcaaacagaatttacaggaatgccagctggctgctggaaacaacaagatcttgtatcgacgatcaccgtattttttatcgcacccaaaagcatatccaggagtattagtagtacgtactttatgtatgtgtcgttcaatccactttgtttgctttaaacatgggttccagactataatttcaaaacatcttgtgaggccgaagagtaaaccgtcgcaatgaagaacttcaaacacttcacatttttttttacaaatacattctgttagattaagtttacaactagtaacgttgtaaggtacaatcccgtttttggagttcacaactaatcgtaaaaaaattcaaatcaaggaataagataaacatattttgtttcatggcattatcaaagtgtttcttagaaaatccatgatcgtcaaatagagaattccatcgtttgcaagtagatcggagtcgtatgagagattttgttggaaccctagaaagtatttcatctatcaaatcatatggtagattagataacattttctctcttttatctaaactcttatacaatgactacaatttagatatattgtgtgcaaagagtactaatatatatataccagtcgttgaaggaaataaactaatcaaagtaaactatctgcctacagttattatatcattgaatgaaatctaaatgatatagataattagatatcatatcactgaattcttatatattaatgatatagatatcatattagtgttgaaaaagtaaaaaaattatactttttctgttccaccaaatttgatgttgtggaattttcacacaaatcaagaaaaagttatttttttatatttttaattattaatttaataatattaactttatttttattttctatttattggtttaaataataataataataataatttaatttatacataacatcaatctttatgaaaaaaaaaaaccacaacatcaatctttgtggaaaacatggaataatattttaggtaggagtgaatttttttttaatattgtgtgttgcaacactgtaatttattaatcattggtgccaagtgttttacgtatcattagaaatattacttaagaaataagagttttgacgcgtggttagttttctaattgtgcaactactaaatatgacatctccaaaaaaaaaagaaaaatcaatattttctcagaatatgctagctagtaattgaatttctatcaactactgtatataacatttccaaaaaaaacttatctcttaaagtaaaataataataatgttttacaataaaatatataccctttttcaatcatatttgaaaatttcacaatttttctttttcttttatataaatatatattacaaaatactagttaagatcttacaacaaagtaaaaagataggagaaatatatattattgaatcattcaaatctgattcatttccaaatatgctacaaggaaagaaaaaaattggtttccaaatgtgctcttctccggaaattatcagctcaggcagtcatctatagcatttagcgacagcgaaattatgttttgcataactccattcgtttgtccccgtttgttatcttcaaattggttgaccgtgaaattcgcaacataatcactttgagacgtcatcggaagtgttggcaaaggttaatcctcctctggattcgttagtcaccccaagtctttccttctctattgtagccttgtttttattcttttttgtcttggctactctttcataggttctactcttatttataatgatattaacatatttagcaacaaacaaaaaatgtgctaaaaagaaaaaagaaatggtttcacaagtcagaactataattttaatagatagttttatatgttttcaactataatagttttacttatttacatctataatgtgttatgctataaatgtctaaaccgtccacttagctcttaaacactcttgagcattggtaataagtgaaaaatctttacgttggaaattttaagtcgttgagtttaattgtataaaatctgtattttaatttccaacgtaaagccgacaacacagttcatttggaaaagtaagtgtaaattgatgataatataagttactttttgtcttcttcaaaatatgtttcagctataaattattctgatttccgagttttgttttgaaaagtttcataataactaccaaaaaattgtgtaatctaattgtgatgatttctgacaagctagaatgcttttgaatttactaccacaaaatcagcataagaataaaccgaaatatagtagtgaattaacatcatagggatgaatttggtagacagatgaattaatggaaagggtttaaattgttgctcggatgctattctgaagaagaagaggatggttttgcttcaacaacaggtttgcctttctctctaagtttagcaatggaagccttcatttcttctttacgcttcttactcgccaataccttggcctgaactccggtcacggtcgggtctttcttctccttaggtggtggtggaggcggccgtcttgctgccgccattgcctcctccttagcggccagagcgttccaactccatagcgcaccgcctagccccaccaaaattgtcctgcatagagattcttccatttatgattttgtttaggaatcttacaacgatcacggtactaaaagcaaaaaccggagtcaaagtggatgtgaggttgatccggtccaaccggtctgatcgaatttggaaaaaaaatagttgtttttaaaataaccaatattataaaatattaatcagtaaaaacttaagaaatatgtacgtttgccaaatggtaaacatatttaaacaattttacaaatataacataaatttaacaccgatttgaattaaaacagcccggtccatttagcccgttttgatttgagaagagtgttttggccttttgggttgatgaacaatgtgcttttggaaaatatcagtgcggattggatttttaatcatcgacacaaacacttaagaaatctaatctagtacaaaaagattgtaattcactctattcataaattggttttgatatatatataaacaagcataacaacattcttagactttgattaattttttccaacagttatctatttgatcacctgcgattaattggtggaactgcaaggacgacgggaggagcctgcggcagtgaccgcggcgatggagaggagagtctggcggcgtgagcagccggtgagagaggaacgagtgaatgtgccaccatggctaattcaagaaaatgtaaaagcaagagatgtaacaaaaattggtaaacacactaatagaagatagagtgggatagtgttgtagtagcattgcaatttatatctgcttgttcattggttggatttggataagacatcaaaatagattatttttttctgtctaccaagaaaataagactttcaagaaatccaaaaacgctgcgttttcctttttaatgaacaacactttcaaggtccaaaacgcaccgtatgtcgttattctgtttttcttgttcgctttttaattgcatttcttttcttttagaatttttgaagatttgaaagtataattttttaaaaaaaaacatggcaataattaagctcccgtagctgtattcaatccaaaatatttcaaaagcatacagataaaaagtagactttgaaaaaaaaagttaagtatgagagttatgatctacttgatcatcacaaacctacaataaacaaaagaaagtgggaattgtctcaaacaattacacaacatatctgtttacacaaacacatcttcaacagaaacaataataaaaatcaaatgtttctccttaaagaaagataaagcaatccaaatcaatcaaaggattgccaacttcttcaaatattggaaccactggttccctatcttttgtgattacttctctgataattgtttggtcgatcttagaacttatgcgatgtattcgaggctctgatctgttgctcatatgacaaatcttgcgaccagacagatctaaactatctttccttacacaagaagagaccgtcaaactagccgcggctacaccaaatctccggcttggagatggtgatttcaagaaatttccctcatatcttctgcttggagatggagatttcaagtactttcccttggttaaggagtttgatgaagaagagataacaactctttcttgatcttgacgaaagctcttttgtcgtgtcaatgaacgatggtttggtgatagctctcgagttctcttagaacaatttgatcctcttttagaatcttcatttgctctgtttggtgttgttgaattccggcttggtataaccggagaatcaaaccggctaggatatctcggttttgtggttttcatagatagagaagcttctcgtaaggaattgattcgagcaacatgtgaattctcttggtaacaagcacgcaagaaatcattggagaaagatctctccttcgaaaccgaaactgaagaggcggtcgaaagtgacgagtttgatgagctgagagaagagttgcttgtggttgaaggttggattggagagaaagatgccaacttcacaggagaagggggagggattactttacccgggatattgataaacttattcgggacagggataggatgaaaccggtttttctccggaagattaagtggagaaacacgacttggacaacgagacatgaacatcttctctggaacagaacagtacttctcgtgaggttcttctgcttctttgaaatctttcgactttggagagcatttgctgatacaacaacccattcctagagtttgatttcaatacttttttcgaaaaatctgtacgagagaaagtaactattaaaagggattggttacaacaggaaatggagatgcttattgtatataatgtgtattttgtgtgtgtgtggactttttagctaggcgtgatcctatattaaaaggattaaggaagaaaaaagtggaagagagaaaaagtgaggtagtttttgaattttggttggcgggtatgatgaagcagccgttagtattattaaactgttaccgtttaacttcaaatacaaagcccaataaaagttggacttattttggaagcccagatccatttatgttagtctataaacaacagtctcgagcaacaacacaacacaagttactaagttagtaagttacacatttttcaggcatgggtgcgttatctcgaggttatatatagagttaattatcaaatacagtatacttacccttaatttacgtgttacttaaatatgtcaaacatataatgtctattatagtatagctgcgatgaagatctgactctctcttttttttccctcatgaagaagatctggactctatacgcaacaaaaagttaagcctaagaaagaatattttattttgggcgacaataatagtatatgttttttgtttatatccttgaatttgatagttaaggaaattattactccgaacaaagaaaactatttttagtagcaaaacatgaatatgctttcatgtccaataaaaatcggagattcagaagcaatgacacaccggcagcaacgaaactggacttctgccacgtcactaatgacgaaaacctttctactatggatctttggtaggcccccaatgtcctaattgaagttgacacgaaggtttgtgtttgttgtgttctttattcaacacctcgtggtctcgagtcttatttctttttcttttttgagtttttttgtttctctagtactttgtcaattacatgtttcgactaatatatattaattgtttttatctttcgttttcaaagaatctttaattcacatatacattcaagacaagacataaattgtacgctgcttctttaaaataaagttgtaaggaagtgttgttgacaaaaatatatttgtaatggggtttcccaaaacacagtatatatagaggaaaatagttactcttttttttttttgtcataggaaaacaattactcttgttttcgtatatttgtgtttttggatgcgaaatatatagaagaaaacattgttttatttccgatactttggtcaatatatatttatctgttaacatccaataatttcaatatatttcaaactcttaacttactgacaattccaccaagtccacatataggacaagttttggtcctacgcatgtcatgcataatttgtacccgtattaatgtcatgttaaatattccaaaataccccttaactttttcatatttacttaattactatatggattaatggatgcctattatagtattaccgcattatccatttaattgtgtttgtatatccactattttctttttctttttttggttttaatgtgaaatatatccactgccttttcgtcacttttcttttcttttctttcttaaatcaatcattatcacataaactctgaatttcgagacagcacgtttgcatattttatattcaaaactacaatcacatgatgataatcaccatgaaaacagagtatgcttttttttttcttaaaatgataaaaacagtatgtaccataattaatcacaacgcatcatggtcaaatatagtactacttggttttacatagcaagagtattaaagatattaagcccatcattcatcatctccctttctcgtagactgtaaaaagaaaaaagcaaagagaaaccaacaaacaaggaaaaaacagaaaatctttagcctaattaagtttataaacaacagaaaaacagaggaggagaagaacccatttaagatcttgacggctaaaatatctttaaacaccacgaaaaagaccgatcagtagcgagtgggatacacgcgcttgccgtcatggtcaccgtcaccgtcacgggatggctgagaactctgtttaccgtcgcaggatggacggaacaaagagaaaatggctttggcggctttagtcttcaccaactctctctcctttgggatcacactcccttctttcttcttgaacggcttcagttctccggagctcatcttcttcagactataagtaagaatgtatgtgtttgtgtgtatgtatatatctgtgtgtgtggctttgtaatttttgcagagaagcagagagtattgggtttatatagagaagagtgaccactgttgatcaagaattacaagacttgtgcgctaagttgctccatgttcacactacgtgtcagctcttatttgatgtatacatgttatcaacaacttctacttagtattttagcaactaatgacgaggaaaataaagtgaaacttacagctaattttcataacattttattggatatttatatacgtaacttaataatcaacccgccagttcaaataaaagaaaaatatatattattataggaaaatttcatgcatccccttcattaataattaattatcttgtattaatgtatttcaattttcatatattagtgaaaggcacaaacttgggaactaaggctcactctcccatcggtgcaaggaacttgtaacaaaagtttttatccaaaagaagaacttgtaataaaagtttatatttttgttcacggctcttttctgattatttaattaatcaacaattagtgaagttgagaaacaacaagtaaagctaattgttaactgaagaacaagtacaagaaagtccagtgaatgtgactactagaccggtttctaatcttagctgtatatagtgttttcactcttttggcatttaaacatcaatccaaaatgttttatgcgttccaaccaccgaatccatctaaattttcaatacacgaattcatattcatgactaacttgcttgattaataacaatattttcaaatcctttttgacgttgactattgaccaaaagtttttttttccttactgactaaaaagttaaatgcactaaaagaaaaaggtctcgatcattatatagccgagagagaccttgtagaaaataagtgcgtgtttagtttgatttgtcgatatagttcaatgaatctaacaatatcaaaacttttgggccaatcatgtctagatttatagttaaaagcaagcatcctatatatcataggctgttgctatatatgtgtttatttcccttttttagtaaatctgatttgttgatctctttgttttctttatggtttatttccttatgctcagtccaaattaaccaaaatatatcgtttgatcgtaaagcattacaggcaggattaagccaaaggtcatttttatcttgtggaatgtggtagataagagactataaagattttgttgtcaaagatgctagtgtgaagtgtgaacgttgaacgggaagattagtaggaaatcataattataatttggaagattcttattttggaaacagttgtggagtcaaagacaatttttttaatcgcggtaaagtaatgactttctttttaatgtgaagaccaacgaccgaatgtcgagataattagcctgctccaaataattgtacttctcttctatagttctatagattcgaaaactgtagtaatctatcttgatatcagtgttaaagatctattgagacatatattccagtttaagtctggttcggtttactaaactcaactatggtctagggtattcgtattatttaagttttctgtaagtttattaactggaatgaagacaaatcttctccagttttttttttttttttttttttgtctatgttattttggatccgaaatgcgagaagatcatgttctacaatgtgttacgccatggtattttgagtatattcagcaggcactaaccaaaactgcatttcgaaccatttatgtcattggtcaaataggcttgacatattagctctcgtgggcctaaaatgtttcctacctggtacaaatgatatagtaaacctgcagatttcttatgctcattgtttaattttaatgtgttaaggtaaataagttatttcaaaatctattttcttataagttataaaaacatgtaatacattttggaacttggttacaaaaaatattatcgaaattgtagggaagtttccaaaaacagttattgaaattaataaaataaaattttcattatataaattcttcattcgtcaaaagattcagtatatgctatatctgactcacggatagtacaacaaaagcccacgcacatgctttaattccacacacacagaacaagtctggtcaaagcattttgtgctgctcagctgtgctcacaattagtttcacgacaaaacctaattgagagtatacccctatttaacatttacaaatctcgattatcgagacatcacggtggcatattgaattagagtttatcaatgataaacaaaaggagtgaataattacgactaataccataaacacaattaaccgtcacaatcatcataatttgatttttgtttacaaattaaagaaagatatcataatctttcgtcacccagcccctaccggaaactgaatagtagagaaaacatttaaatctttaagaagaaagaaagagagaagcataattatcaaaagcttataattatcaacgagaacaccaacatttagatatataaaaaaaaaacataaaaagaaaacccataaacgatcatgacggcatatatatcttcaatcccaagaaaatggccgatcaacgatgagtaccggggtacacgcgccctccgttacctttgccgtcgccggtagagtcagagtgccggccacaaccggatggcgtgagagcagagataatggctttcgcggccatagtcttcaccagcttcctcgtaacgggaatcacactcgctacttgtttcttcacctccctctccgccgtagaactagagccttctcctttagaactcatctttaggctgtttatgttgataagtgtatgtgtatttgtatatatgtgtttgtttgttgcttttgtaattgtgaggaaccatgcacactatggctcgggtttatatagaaaatatgagatgagaatcaaacttctgccataagtccattttcaaaaataaatgaaaaaacttaatttctaagttgctccatgtccaacgtgtcagccacccattgctgcaaagaggaaatttagttgatatcttgtacttatgatttaagtttaagaaaaaaaaacaaattaagcgaaacttacatttaatttccataacatttggatattttctgggatatcagtggatacgtggaaccctgaagaaataaaataaaataagataaaacattataatagaaatttccatgcatcgccgttattttgttaattaatttatatttatttacttggctgatgagttggcgccaccatgggaatgtagtatcagtcttacgttagtacaaggcaacgggaagacaacattcgacatatatgtttagtactttattatttgttattcgtgcctcttaagtcttatctaaaaagcaataaataattatgttaactacttactgttatatttttttctaatgatatgataataagtgatgtcttactattaatttatcatatactaataattaatgactttttactgttaccaaattaatcattaaattttaacgaatgatactaatcattcgataatttctttgtttagttaaatgtatagttcagtacagtaataaccaaaacatcttctatttcaaaaacctaaaatttataatagaattttttaattgaattgtcttttaatcataacgtttctgctgttttggcgttcaaaatgttttgtttcacggagtaacatatttacaaggaagatcaagagatgtgaccttgttgaaaataattgtgtagagacaataaacataacaacatatgtagattcgattttgtacaatggatctagactatatcattttttatctaatcgtgtcaaggagaattaaagttaggattttgagtaaaagccccttttctacatttgtttctttgtttttcccataattgttttttgttctttctgtcaagttttaaaaactttttttttttgtttgtgttcagaccacaccatatacctgtatatatatatgcttggtccttaggaacagtacaaagatctgccaaggaccccattttattttttggaaattcacgaatgatatgatctagaactagagactttattgtcaaagatttagatttgtgtggaaaaatgaaagaacatgatgattgatgaagattgaattaaagagaaaacaaaattatgatttttattagtttcatttttatttttatttttttgtgcaaaatttttattagtttcatatgacaataactacaactccagataactaatggctagcggctgtgaatttgcgatactttttccaaataaaaattaaatcaaaacgaaatacaataatttgagagattccgattaacaatatcgtgaaacagctgtagagtaataatcaggcgtgaacattaaagtaatgaagtggttaaccaataatttattagttttcattcatatatcaccatgattatatttaataaaatggatgaaccaaagacaatctttgtgtataagtttataattttttacatcacaatctatatgttagttaacgaaatatttaattttattagacttccagaataaactattgaactggcaaattgtcacggtgcaacttttttgccaagaagacgttaattggtttataattaattaagacgaaacaagaacatatagtacatgatcttacaacctctttcttatgaaatagtttttaattgcatttccttttttttttatatataaataaatattgaatgttcctaagaaattatcaaggtggtgtgtcatcatgaggaggccaccaacttggaaattaaggttggatttccgctgcaaacagctaaaaggatttgaaggtgggcaaacgaaattatcaattaaatcatcaactcaagacgtgataattgttatgaacatattattagtattgtaatttatccttattacagacataacggcataatattatttccattggtttaattaaacgaccaacgattatattgtctgcgattctacaaataattctcatttcttttattgttttaaacattgaacgtgttatatctgtggacgaattttgggaaatgacttctaataatttggtttggtaatttttagttaatgcattgtacttaaattctaggtttagcagatctcatcaataaaatttgttcatatattaaaagttcagagagttttcattttccaattattcatttaactttcaataatttttcaccaaaaaattgttaatttagcacgaaatgttagtgtattcccgcaattttttcgtttgtaaacaatgttccatcggcttatttaaaccaactaagtaatatactgttgttgacaaaataaataaataaattttgaatattaaatgagtaattgatttgacaaaaaaaatgatagtcaatattttgtatgtttggaccatatagacagtgatggcacataaataatcttctaatatattcgttctttttttcttcggaagcgactcgcgtgactctgttcatattttttttattttgttaacggaataaaccaaaactacatctacttgttccttaatcgaccagtttttattttcctatgagttgtttcaattcgatcgaatttaaagaacagaaatatattgttataatgtttttctgtctttcgaagtgttttagttgcagcttattgttttttgtttttttttttctttttgttaaaaggttttagtttaaaatttagtaaaccataaccccaaacttaaaaacattcattggtatttaaaatctttaacgcgtttaaagattctcgatctttttaaattcgatttttttttttttttttatcaatcattccccacgtggcccgggcagatatgttaagcttcgtatctaagaaccagttatgctacaattagttaattaattagtgactgaaagccacttatgcttgtctgggttaatcatcaataaatatatatggaccaaattggataggtcttccatttctcccttttatttctttccactttcacctttcggccgttaagaagtatccctaattccctataataatttatgtcttatgttacgtaacatattactgtcattataaattttgtcacatatgaaacatgagtgattagcccaaaaaaatatttacggatcggtatgaacattattagtagttccaaattaaagctcgatctgacggctttgagctaccttgatttttactggcattataaatttctaacatattgactaatcattaattatcattgattagttaattctataatcatcatatatatatatatataagtttaatccaacatatttttttaataagtttaatcaaatttatagacgaatagatagctagaactacgatggtaactccatttccacaaaacagtacttacttttagttcctaaattgatagatatgaaacaaaaaggttagatgataatgaacaaactgataaaattgaacatttcttaaagtctaggagcggtggacctgaatctttgagaatgaccgtgttgactcgttttttgggagatctacatatgcacctcgattgtttcaaatatctagttattattaagtgaaaagacgcaaaaacatgtaatataaaaagagtgagaaaaagagaaaatcatgtaatatgatttagttaagcgttaattaaaaatgtttctagtggcaagaaagaacactaagcaaattaaataggcaatataataatgcctttgattggtagatattttacttatgtagtatagggtttaactatttccacggtaacttattatcaaatcagtcatccaaaaaggaaagaaaaacaaaataatagtaatagttttgcagcaatatttcaactttgtttttttttttgtatcacttaaacttacaatactttgttgcatctatgaattaatcctgatgatgatgagccatgtccatcggtaatagattgagagtaacttgtctattactttgcatgaattgtttttacttaattcttgtaagttgatggtcattctcttaattttaatcagattattttgccattgataaattaaaatttccgtatatagaatcttttaaaattttcaacaaaaacagaaaagaaaaagcaaaacaaccaacacgcacatatgtctattaaaaatcaatgattatgtcgatatggctagatccgtacatatagtaaaaaatctaatatacttgtattttaacgatggttatttcagaatcttacagtgaacgttgaccaaatagattctgataaacaggggcactgagcaacatatataaatagggaaaaatcctttttctcagtgtacgtcaaattaataatgtctggataacaaaactcgtagccttttctatattcgtgttatgtttagcttttctctaaataaacatcacggttcactaaaacatattttcaggatatttcctataacatttattttttctcggctatatatatttgaaagaactttaaatttgtaatgaatgtggtggtcagatcatgatggtctatgaatccagactaaaatctttcaaccaaccagtagggtcgttaagtataatttattagattaatataatctgttattatattccgaagtgataactaactctctttttgttttttgggtttggattaccaacttaatcatctataaaggttttcactaattctaaacaatcaatatatgagcgaataaactaaatttccgattactaattgaacactcattggttttaggcttttaccgtttgaagcctctcactctcttctcacgttttgatttcaatgaaaacaatatagagatcacgcattaaacattaatcgcagtaaattataataagtcttatcttaacactaaaacgccaggaatcaatacaaagaaactattgaacttagagaaaaaaaaaagcatcttatattagtacaaactctttccagaaagagagatcattcggtagacatatacaatataacataatctttcttaagactcataatgattacccccgaaatatcattggaaggctaccggagcgtagactgcacgcgcttgttcctcggaagctccactatttgcttggactttaaaggagatcgagatgaaaagagagtcttcataatcattgacttcaccagcatcctcttttttgggaacacactcccttgtttcggccccaaccgccactctccatcctgtatcgccaccacctccaccgctttttctaccgtgctcatcgatattcactctctatctaatcctctcttttcgtcttaaggagagaaaaaagctcttagatttgccctcaatttattacttgatgagacttgtggtacaagctaacatgtaaaaacaatagtttattatatgaatcttgctatttccctcacgtggccttgtataataagttttcatttgagaaccaattagttatgctgcaactacgtataaaactaattgagatactgattaaagccacttattccttttccaagttaatcatgatttggattattggcttcactcaccttttttctacctttacctttcggccgttagataatttattaaaacagtatcatattacttaagtatacataattccgcacatgaatcacgagtcataactcatagtttttcgtttgatagaaacactgtaactaactgaaaatctaataaggtagcaaattaaaacacaaatgacgcgtgcattcatatgaatgatagctaaaatgaattaaaaagtacttcaaattttcaattcacacatctttttcaaatatccatgtggaatgattaaagtgaatacttccaaatttactcgcccgttttcaataaaattatgtcaagactttttttttcgagtactactgacgaatgactagtaaatataattatcgtaatatatatagataattatcaccattcatcatccatatggcattagtattatttgaaaatagtcaaaataccacgaaagttgcaaatatgaaaaggtaggctctggcatcctgtggttcccttcatcttaatggcttagttcaagatttgtttctagtttaagtgtttcggttattgagaaagcggaaagaaaagcaaccaatgcgacaatgttaagaaacaaactccaaactcctttatttcttaaccaaaagttacaattcatgagaagatgatctagaacatcatttctagactcatcttctaaatctcacacacgagattgtttacacaaattgcataaagctctctaaacaatgagagtacctatttataaccaaaaagcagtaaaagatagatgcggatattacctcagaatatcttctttattcttccttcgtctgacgtgtcctctgtcacactttctgtgctgcttctaatccacctgactcactagcagcttctagaacctcttctccacctgtcccttctgtagcttctagaacctttgtaccatttaaatcatcagaacttagtgctttcttcttcctcacgtaaaccctattgagcttatcaataccccccccccccttcggaactcagcttgtccccaagctctattgcaggaaactgttgccgcagctcggtaagtacttcccatgacgtctcatgagttggtaagccttgccactgaaccaacgcttctaacacaccttcagctgagtaacgagtatctaacaccttctctggcaccaatacccattcatctgaaggtcgcgtgttcgatccacgctcaccgcaaatttgttaagaaacaaactccaaactcctttatttcttaaccaaaagttacaattcatgagaagatgatctagaacatcatttctagactcatcctctaaatctcacacacgagattgtttacacaaattgcataaagctctctaaacaatgagagtacctatttataaccaaaaagcagtaaaagatagatgcggatattacctcagaatatcctctttattcttccttcctctgacgtgtcctctgtcacactttctgtgctgcttctaatccacctgactcactagcagcttctataacctcttctccacctgtcccttctgtagcttctagaacctttgtaccatttaaatcatcagaacttagtgctttcttcttcctcacgtaaaccctattgagcttatcagacaacgcatagtctgaaaaaccatacagtatatgttgtcgaacccaagattttgggccatatcacggttttaaaggcctattttacttagtcttacaaaagtgataaaaagagagttttgaacgaacctaaatcttaatcatcatgatagtttttgaacaataaaatcaaagatagtcttttatttaatggacttgttcaagacagggtcttagccatttgtcttagcaaaaacttctgaatttttcctgtggaagtcttgggaagttcctcctgaaagatcactttcctcggaaccatgtacttaggtaacttcgtcttacaaaactcccttatctctctctcggtcacgggaaccgaaccatcaccattgttatcacacttcaagctcacaaaagcacatggtgtctctccccacatcttatccggtttagccaccaccgcagcttccttcaccaccggatttgtatacagaaccgtctcaatctctgcgctgcttatattttctcctccgcatatgatcacatcttttgaccgatctttgatctccaagtaaccatctttgtgtataaccccgatgtctccagagtagaaccacccgtcctctctcatacaagccgcagttccttgagggtctttgtagtatcccaacatgactgagctgcctctgaaaacaatctctccaaccgaaactccgtcgtgtttcacactctttcctgtttttcgatcccttacatcgacttccgtgaatccgagtgttcttactccttgccttgacttcagcctagctctctccaatggatcaagatggtcccacttaggcttccaagcacatgacacaaccggaccgctagtctctgttaaaccgtatgagtggctgacgttgaaaccaagtgactccgctcgggagataatggttgctggtgggggagctccagaggtcataacctgattcaaaggtcataaaaccgaaacagagagaaatgttcattcataacgttttcaatcacaaaaaatctcaaagtaaagcttaaattgaatagacaaaattaaccggcagtgaaccggttttctcttcatgtacctgaaccgggttcttgagcggcgtacttaatggatagttaattagcatgttgagaaccataggtgcagcacacatgtgggtcacattgtgcttatcgatcaagttgtaaatagtcggtgcgtcgactctacgcgtgcagatgttggtggctccaaccgctgcggtgccccaagtgtaaccccaaccattggcgtgaaacatcggtagagtccacaagtaaactggccggtttggtactgaccaatcaagcaaggagctaacagtgagcatgaaaatcgctctgtggctaagtaccactcccttgggagacgacgtcgttccggaagtatagttaagaaccattggttgccattcggtttgaggacggatccacttgaatcttgaatttcctctctccataatttcttcgtacgtgtcaagaaaatctgatgcggatgaagaatcgttctcttggtcatcgtccaggaggacgaggtgaggtttctcgtgttgtgtgaataatgaaactgcttcaaggactaaggatatagaacggtggtcgacgaaaacgagtctggattcgctgtgacgcaggaggacagagagtgcgtgtgcgtctaagcgagggttgatgttgtttaagatggctccggacattgggacagcaaactgaagctcatagacggacgggacgttgggacccacgacagagacgacttggccttgtttaattccgatagaggaggaagttagagccgatgcgatacggagacagcggttatgtgtttcggaccaagtatgaacggtgtttgcagtgtggaggatggacggacagtcaccatagacggaagcggctcggtctaagaagccgaggacggtgagtggagttgagtttgatgggtgtggaagtaagagttccattagttagctgcaagaaactatagtatcgttatgattttgtgaaccactcaatgattttaaacttgtcttctatgaattctaagaagaggttccccttttaaagttgagttctgtcttttttattcgttgtatggttacattacatatggcccaacaaaattaggttgataaagtgacaaaaaaaaaatgaaaaagtgaattaaacaagtaagctaaattttcatagcttcttaacatatcaaagtacaattggccatgagagaatctataaaacaaggttaactataagaaaatgttggtgggcaaaaaataaagagcctagagacagtttacataaatttgagatgaaaatcaactaacaaattaggtccaactacttctacagttttacacataatccaatattagttttgaccttacctgtcatttatactaaaacatatcctaaactgatcatttgtaaagcttacttattttagtaatttaaccaacttaaaagctctataagaaacaacacattgaatccaaactcttactcaactcatcgaagtatgggctaaatttaggtttaatagtacatcgtacttgggacaaacaaacaaatttaggtttatgtcccaaaactatttaatttctatagtacggtatatttcaaaaatctatcatggatttgtttttgttataaacacatcttaataagacaatctatcatggatttgtttgtttttgttaataagacacaactttcaaatctcataaatatcaatccttaagatgtgtttataacaaaaaagttacaaagccaacaacacatgattttatcaaaaatattactaatatgattctgtaagataaatattaagaacttaccattaattcgcttttaagatactacatgaattcttaatatttattttaataagacacaactttcaaaacctcataaatatctatccttaagatgtgtttataacaaaaaaagttacaaagccaacaacacatgattttatcaaaaatattaataaccctgattctggacttcaaatcacagtcgaccaaaatgatctaatttagcaattaaaaagtttacattttaaaaacaaaaacacaagatcatggctacatattcaaagttttagttcaaaccatagaaaacataaccatgcgaattggtcaaacaagtatatttggccttacgaaaggcccaatacttatagcttaaggcccaatacttagagctgacgacacacattgcagcaaaaccgatatcgttttctatatacttcatatctctcttatgagatcacaaatattttagagagaatggttgtatgaacacaaacgacgaatgagatcggcaaaatcttagtcattgacgaagaagacgaaaataaagaagttaaacaaatatgtcatggaccagttcataatcacttggatcttatttaccctccgattttcctttcttagatcttctctctctgttttcgtactcattagcttgcacatcaggcgattctgttttgaagattttcctttttgttctttggattgatttaatggtatttcgtacaagaaattgactccggaactagatatagtcgatttttctgcttgatgcagaagttattctgaaattggttggagtgacactctgttctgaatagttcttcatatagtttcttatgaaaatagtagcaagcttgtttggaaactaatcccttcttaagggtacaacaataatacaacacaaaataaatgtcattctttacttcattcttggagattcttcttcatatcctcaataactcaagcgaatctttaaggcagagacttagccatttgtcttagaagaaacttctgtatctttccagtagaagtctttggaagctcctcctgaaaaattactttccttggaaccatatacttaggtaacctcgtcttacaaaactcccttatttccctctcagtcaccaacccattaccattactatcatacttcaagctcacaaaagcacacggtgtctctccccacatcttatccggtttagccaccaccgcggcttctttaactactggatttgtatacagaaccgtctcaacctcggcactacttatgttctctcctccgcatatgatcacatcctttgaccggtctttaacttccaagtaaccgtcttcatgtataactcctacgtctccgctgtagaaccatccgtcctctctcatacacgctgcggttccttcagggtctttgtagtaaccaagcataaccgaaccgccttttaaaacgatctctccaacggaaacaccgtcgtgttccacactcttcccggttctcgggtccctaacatcaacttccgcgaatccgatggttcttactccttgtcttgatttcagtcttgctctttccaatggatcaagatgatcccactcagccttccaagcacatgacacaaccgggcctccggtttccgttaaaccgtacccatgaccgacgttgaaacctagggtttctgctcttgagatgatggctgctggaggtggagctccggcggtcataacctgatttcagaaacacaaaacagagtttattcaaaagttcaccaaatgattttcaaatggaagtttttaataaaccaaaccggtattgaacatggatgtatttaataatacctgaaccgggttctttagcggtttacgagacgggtagttggttagcatgttgagaaccattggtgcggcacacatgtgagttacgtgatgcttatcgatcaagtcatagatagtcggcgcgtcgactctacgggtgcagacgttggtggctccaaccgccgcagtgccccatgtatacccccaaccattggcgtggaacattggtagagtccacaagtaaaccggcctgttcggaaaatgccagtcaagcaatgagcttacggttagcatgaaaattgctctgtggctcaacactactcctttgggagatgacgttgttccagaagtatagttgagaatcataggctgccactcggtttgaggacggatccacttgaatcttgaatctcctctctccataactccttggtatgtgtcaagaaaatctgatgcggccgaaggagacaaagaaccgtcctcttggtcgtcgtctaggaggacaaggtgaggtttctcgttttgcctcatgaacgagactgcttcgaggactacggagattgaattgggatcgacgaaaacgagcttagattcactgtgacgcaggaggacagagagtgcatgtgcgtccaaacgagggttgatgttgtttaagatggctccggacattgggacagcaaactgaagctcgtagacggacgggacgttgggacctacgacggagacaacttggcctcggtttatgccgagagaggaagaagtgagagccgaggcgattcgaagacagcggttgtgggtttcggaccaagtgtggacggtgttagtggtgtggaggatggacggacagtcgccgtagacagaggcggctcggtctaagaagccgaggacggtgagaggtgttgagttcgaagggtgtggaagtaagagttccatactttgatttttgttaatgttttgtattgtatgggtatgaggtttgtgaaaaggttagggggttggatgtatttataaaaatcttcaaaatgttttcaacttcatgaaggtggtgttggagtttaggtcattttgttttatttttggtaactataattgatcacttctggcccacgaaatcagcttgatgaagtgaaataaacaaatcttctttaatttcttaacttatcaaaatactaaatttggttaataaataagaagaaatctctctctttttttcttttaaccaaaatttattggtgagtgacgtgagtatataaaaatggaggtgggcaataaataaaggacaaagtttaccaactaggcaactaacaaaagttggacggacccaacgaactctctattttataaagcttccaaaattgtgacgacaagttcttagttgaactacggtcgaaggagctaactgaactaatgtttcatcgttccgaatatttattatattcattagtagaatatttttttttttcattcattataaaaaatgttcatatgaggttaagatgatagggaattatatatgcatgcatggatacatcaaatcaaacgagtaaattatttatggataatcaatctaaaatattctcgcgtgatgttagtttggtattacacatttggtactaaaaaagagcatcttaaattaaactatttgaaaaccttacacatatcttatagcattgatttctagtgtcaacgtccacactccacatgatgttagttttgcgtacggttatgagtacgcatttgtgaggattggttgagcgacttgtactttctcatatttatgtttgagtgttgactgttgagtattgatttttttttcttctccaaataactaagtatatagatatgatatgactcatccacgcaatattttccaaattaaaacttttgatcacatgaaatattaaaacagttgttctaattagttaaccatttttatagttttatacatacgatcaatactaataaaaaaaatagatctttaacaaccatatttcattgtacactgattaaccctgaaccctaaaaatacaagatgaataacacatcaacccaaactctagcttaggatatgtaaaccaacaatttaaatttaactctaaactcttttaaattatatatatcgtccactagaaaacaagattatttatagaaaatttggtagttataaaacaattacatatacaaagacacaactgtacacttgtaaccaaaattgaatatcaagaagtttgttcttatcatattaattgtcaaaagctgagtgattcttgtgacattgtgagcctgactgtgagtgtacacaaaaacttttaaacccaaggagatatgaatattggccgtggatggtaagatgattaaatgtagataaattttgggtagtttagaagttatatccacatttaatgaatctctgcatcacccaacacatacggatcctttaatttcatatgcacagaatcaaatgccaacctacttgccaattttggcatcatgatggttttctcatttgagataaaacttttaggtttttcttgagtagatagatactagtacttgtttacccacatggtctagcttcagttaaaaaggttacatatgtcatgttcgaaaattaaatacatatgtttatcaagttctgtagcatcacatatataatatcttgaagtccccaaaaatatttaataaccagttgtaccatgggaaccaagaaaaaccaattcatgtcggtttaacaagattagagaatcctaaaacgaaacaacataagatattcccaactaaaagcacacgacataaccatacgaaataaatcttcaattcatgattatggtatcaagcattatatactttgaacaaaactgaaataattagcagattacattgaaactgtttacaaaacttcttcacaatgatcatacgctaattaaacagtttttttgccacaaacttcttcacaatttttttgtaataaacagtttcactatattttctcttcatctctttcttggatttatttatgttagtgagctactaatctgattttgcagaaagaattaagaaacatatatacgaagccatttatgaagttagttttcatttgcaaattccgttttggtctgttaatatggctagtgttttttttcttcttttaaatgggtttgaagggtttattatatatcacgtgtaaaacagttgaccataatgctaaaaattatgcatcatacagagaaactactaaagaaacaaaatagtcaaatattcagctaattataacagaaatctagtcatatcgtcacaatgatcacacgctatactatttatcgccacaaccttttttctctccacatggcttgaaattgtcatagattatgttatttctgacgttttgtgcgttcatataagacttggattccctagaacttttaagtcgaacaatttgataaacaaacaaaaaaaggcaatcctttggacattttagcttaagctggattgaaactaatacactgaaaattgataatccatacatatatatctactaacggctttagtgagaagagccatttcattaccaaaattaataatttatcatagtataaaagctagacagtttatacatcaacacatcggataagcaaagatatactttacatatagtgattgcaatttgcaaataacacatcaaacatgtaaaaggactacacacacatgtcacatgtgtatcaccatcattagacatgtaagatcatgttcttgaattcttcaaagtcaacaaaaccatcaagattcttgtcatgaactcgaatcattctcccacaatcccaagcctttgcctcctcctcaaaccctagccgttccaacacatcacgaagctcctccgctgaaatataaccatctccgttcacatcgaacacattaaacgccctcgcaatcgcttcatcattatcagcaacaacatcaatattcttcttagatcctttgctatctaaaacagcgtcgtagtagaaccgaaggaactcgtctaaatcgaggctctgtttaccaacgatcagttcaagctcatcgggagtgtgttcggcccaaccgagtttatcaagaatccaaaggagctcgtcgagggtcacaagcccgtcttggttcttgtcgagcgtcttgaacattcttcggagatcgtttgtagttatgaatgaacaatccatttgatcagagaagggtagtttggatcttttggttatgttgaggaaatgtgtaaatctatttattgagaaattgtgcaatctttatcgtctataaaacatatatacacgtacagcaacatatttatatgattagtgtgtacggaagagattaaagcggaggaaggttcccggaaatgggttatgaaacgactaattttatgaaaaatgatgtttctagaagaaaagtcaataaacatgacatttagctaattttcttgtgtcaactatgacatatagctacttttatatgaaaatttgatagcgtatttaattatcatctttgattttttttaatattaagtaaaaacagtataagaatgaaaaaattaacttgataatataaccggataatctcatttactttctgccatagaaaaatgaaaagtctaacctaaatcgcaattttgtactaacaaagaataacacacctttgcgacattgcaaagctttctaaactatattattataccttgtattttgatagataaatagtattaatgtgctatggaaaaaaaaagttaaaaaacagtagattctaatactctatgtagtagagtggtgtcatcataatcttagtttgacatatggaatgttcggtaacgttctcgagttccgtggctaagtcgtacggtccccatttagtagatatttatcaccggccacatccacatacatacccatccacaattttccagtggatttttccctgtgaacagcaaaagcaaaacgataatgcttatagttttcatgtggattagataaataagaggaaaattatagcattgtctttgcatctccaaccaaatcctatttcctaccataattttttcatttaactatttatacaaaaataatgaacaaaagcctgagcccaatttacaaagttgggccttattatttatgggcctgaaatgaaataatcaattatgaccaaacacaaaagctctcttatgactgtagtaactaactgtcaatgtctctacagtagtacagtgagtcggaatgtgagctacggcgtgatgttcgatgagagaagttaattccttttctaaatttagggtttctcttcatcgagatgtttcttttaaatgatattcttcttctttcagtaatggaataatagcttctgtacgaaagatctttctggcatttgtaagtgaacccattccactcttcttgcatttgtaagtgttttctaaatttctactcctgcatgctctaatttggccccaacgagaatttgtgtgtttgagtggtcattgaatcgaactcaaatttagcatttttaggattttgagtcaattctagtttaggattcgtctctaatgtttaatttagtgaaggctatgtcattttcaggaatctgattgttttccgtttaaagatgagaactttgatgaattctgctgctacaatgagagctgtgaagaaggagtttattgtaatagacttagatgctgataaagatgaagatgttcgttgtggtaaagtgaaagaagagtatatgatggatgctggcaaaactaatccttccaacatccaacaggttgtttctgctgttgcttctgatgatgatggtgatgatgatgatgactggggtaccaaaatggattatcagtatataaagttgttggatagtttcagagaagatggaagtttaaatctgagtgacaatccactaaggtctattaggtatgaagtagataatggtggatatgacaagcgggagtttaaagcagtgtttacaaataagcggagtagagaagatcgaaacactattcgtgtaaccaagaagaatgttgagccaaagcctcctcatgttcaagcaagtacagagaaggtaacaaaagaagccggtttcaaattaaggcgaagagagagtcttgtgagtcagaagagtgttgaagcaatgcttattacaagtcatgtgagaagaaactcccaacacaataatggcgacgctagcgagaaggagaattttgaggatgacattgtattggatgaggtttacagatcttatctcaaacggttagtggaaaattcgaaaagttcaagaactaatcctgaaaaagagataaaagtaaagtgtgaggaggatcatacagtgtctttgtctgattctgattctgatattattgtggttggagattgtccgtttctggaagaagaggattctccatttgtgccatcaaaaagttataaagtgattgtaagtatagccttcaatcacttttgcttttctttcaagttcctcttttctatttcagattttatgtattaacattgtcgtttgttggaatgttacaaggatttggatgaagagagcagtgatcaacgcaattcttggtttaggagggagataatgaatgttctgaagcagccatacactgtaacagagctcaaggaacttcacaaggaagcatcagtgcatggagtgtcatccagacatatagaactacgagatggaacagagtttagctttccaacgaacaaaaagaaaccttcatatctcgataggtatccaggtacgttaccaggtggagtgctttgcttagcttatcttcttgaaacgatatcataaaattaataaattgatatgctaaattgaaaaggcttgtttctgattccatacacgaagaaacttcgaattggatctcttagaatgttagggaaagtgttgtttcatattaagttgtggtttggtttgattccacagacttcaaaaagcagtaccttgactctttgcgtgaaaaggatgagcgtaaagctctgaacctgttgcgcgggtttatcttttatataacggtaaatgatctggtttatctggtcttttcaattgttctaaagagtagagatactttgttatatatgatgcaactgatgttgttgtttctcagaatgtggttcgtgatgatgcattcaaaccgtggctcgatcaagaatgtttgaagatcagatgtgtctgacaaaagagtatcagcacttggagttctgacagaagactactaattaggagatgtaagacctttgtttcatgaaataagtttggacaagatttgcatttgtgtaaaattagcctcaccattgtgtagtagttcatgactcaagactggcccagtggcttcaggttctatgatgtgattatctcttccatgtccttaagtgcattgtagagagcttccaagcggacttattagaaggaacaacaaaaacaattaatccaatttaagacctttgacccaacaactcaatcaaaccttctcagtaagttagaggatgttgaagtcttaaatcgacaactctcaaattaaccctctataattgattagggggaaaaagggaaaacagaggattagaggaatattgattacaaaatcttggaattagttgataaaacgaatcagacccacacaaatcaattctcgccaagaagattgttattaatttagacaaggaaaagtgacttaccattacgtttccagatatcaaatttaatcacacgacctgttacatccaaagtagcaaaagtaaaaccaaagacaacacatagaacccagatgaggcagaaccaatacggaataaccatcctccacctcctcttcctccgtgaccaccaccatatcctcctcaccgccaacactgccgctgtatcctccttcgcctctgccgccacgaccaccacctcttgagtaaccgccaacactgccgctgtatcctccttcgcctctaccgccacgaccacctcctcttgagtaaccaccaccaactccatagccacaaccaccttctcctgagtaaccgccaccactgctgctgtatcctcactacctctaccacttcctcgtaactgagccattatcacagtgatgctgcgaccatcgagctcttgtccagccaatccctcgatcacatccttcatggatttctcatccttgaatgtgacgaatctgaatccccttgagcttacctttgtactcaccaaaacaaactgatgcttcttactgcatcagagctactggtgtgattagattgtatattgagattagtgattcactgtcactggagatagattgcacggtggctggatcattgtcatcaccggcttcatactcagcagtgccaagggttataaaatcgaggctttccattccaaaaacttcactgtcagtagaacgcctattgaataccattggctcagactcggaaaggatgttgtgaagtgaactaaagtaacgcctacgggcatttttctgtgatggttcgtttgttctttttctctttcttcctttgctttggttcttggggtggtggagcttgcatttcaatccttgagagcatgatccagtggcttcgaaaaccgggcagttgtaggaatgcttcttccgacactgtgaccattatgtagagacaatccgcaatcttcatcatgtgtttgcgaattgagatggagaaaaaaaatgtatgacataaagccagagagggatctctttcccttatactccttatggtattagtatacttaatatgctactgaagtaatcaaaagaattagataggatcaagggcactaagagagtcactagcagtgcaaaggaaaggtggatatgcatgtcaacacgtattagatgccaattttaagtggaatccttacctcgtctccttcggaacagtatccctttaaaaacccatcacatataggggcgatcggattgacatgcacatgcctatatggacatgcctcattgttgcataggcctgcattataggtattagtattgtgagtagccgcaatgggatcttagtacagtggaaattcttaccttgcagataataagaacaatcaggcatcctttctggaatgacctgtggaagaaataagttatccagttagagatttctgtaagtacaattatgcagcaatgacttagtaggaaaaccttgtgagtcaatttgcaatttgcatttgcacacaatccattcaaaaatttggtgcaaacagcaattttcgagggatcatgaacatagggacattttccgtcatctttgttgcatttcccaaatcttgtgaaaaactggcagtacttcttctttttagccaaccgcaaccgggcattgtgcaggctccatctgactttctcatttgccaacacacgagttcgtttctttggatctctgacaagctggttaccattcccgaaccgaacatatctgcaaaaatagattcaaatgttcaattgaggctccagaatgtggagtatataaatagataaaatgcattgagaattacgtactcttcattgccgatcaccaatctctttgggataaacggtcttttcacaccctttccattttcagaaggtccagagcacggtgaatcaacatctaacaaaaatttatgtttaagctaatgagagatacacaagggtaagacttatacaacgagagagttctcaaatccgatcaaaacattttgttgagaatcatcaatcacctagagggtgtgaccagtatataacacgtgtgtgtgtgtgtgtctgtcagttttcgtatattcatttcacatcaacgatatcaaactatagcattcatgagtttttaacttaagaatatcctaccagatattctctgaagagttcgtcttgaagagtccattttataacgaagggaaccaaacctgaaaacgcgctcccctgaaaaccagaaatcaattataaaaaacttgaggtttgctggaaacagagtcatccggccatctcaaaaatggcaagaaaataaattcaaaagaagggaaccaaataggtcatggatatcgtgaaccaacttacgtgccagatggtttctgctcgccgtactagtattattttgtccagattgcttttcactttctttctttgagtatgcagccacagccaatgtggcctcctgtacaaatatgaaaaagatacatttattgtcgacaccacattcaatagtcctaaaggagcaattatttatagacttaggccaaagacactgaggaaactaacctcattagcttttctcgagtctctctcaatggacttggaccattttaaatgcgacccaccaacacttaataccttagattttctgagggaatacccattagttgatcttgtgtaaattgtgtgtctcttcctcatcattgacaactttcggctgaagatagaatggccctgttatcatgtttgcaaacacaaaaaaaaaggttgcagcccaaggaaaatgagcacctttagatgctaacatacctaatgttgagagaagaaccatttcggaaagcagacactgagttcattaatcttctccagtacgtcactcttttccagggaacaagttgcggcacaatattctgatttcgcatgtgagctatgggcattcttggctgcggatcattttgcgtccaaaccagagaaaactttgattgcttaaatggtcgcatgacagctgccaatcaaaaagaaggcgagtaacttcatatcttgcttttgttatggttaaaaaaatgcaagaaaaaaaacaagtatacatagaaagggattctgatatgcatgttactgtaggaaaacactagatagtttattctcaaaaaaaaaaaaaaggactaagccaaagcaaacaaattattccttttccttttcagcgaataaaccatccactgtttatccaaatgaacagtcctgataagatgctcaacaagcgctaacagatatttactttgctttacataccagagtcagagaatgctgagctagatggtctttccgaaaccatgtttgcagctgatcgtgtatctaatgcatcatcaggcaaggaaattgactgattgcaacggctctctgaattccttactagctgatttttacttcgcttaaagtacccatcagaggaaggaatctggttctgacttacatcatgaatatctgaagctgcaaccaactgatttgcctttctcttgacatataccattctcttcaaatttgaagaatccaagtcagacggatttctcttctgctggcaatctgaagcataacccgtctgaatcagtgtatcagatgtcttcaatgtgtccccaccagaatgtggaaaattagcttctccagatgtagcagaatccatgatagactcaggtaaaccagtggtgagatgatccgtgctgtaagataaagcacattttcctgatgaagtagcgatggcatttgatagtttggaagtgctgctgtctgagggaggctttgactgcctctcaagagtagctatttcccctgttttaacaagtgaagaagcattatctacatcaaccatattggaagatcccgtgcttttgtcttccacagtgaaatggttcaactggatagcagatggaggtattccaagggcagcaccaggagaaccatgtgagggttttcgaagaagactattccctttacgtacgtaactattattagattgggcagtcactttgggaaacttctgttgtgtagacaacgtagacgacaaaggcttggcagctacaaaagaagagggagaagcatcggactttcgatgccaagtgtgacgctttgtgatatgaattggagggttagcatctttcttagtgtcagacacataaggcagggaactgggataacttttctgagtagagtaattgggtttctttttcctcttttctatttcatacttagaattcatagatgtcttactttggggatcccggtgtggtacagagactacatgctctttaacatgggtcaaagcaaatttaacatctgcatgtgagtatgatctggacacacgaacacctgaaccaccaggaatttcagttccagaaacttgtccatcagatgacactgcttcgccatcaaatgtatcagtcttagcaatgttccgtaagtctttttcttgagagcccacatcagaagttatatcagtcagtttcgctattggatcacccattggcttcataactaaatcacaatgcgccgaagaacctggctgggttaactcatgggaggtcataatttgctcttgtaaagtatctaaaagactatctccattttgactctctttaactctgttggtttcatcaaccatattagcaacatgaatttcactccgtaactgcctgaagctcagcctttgtgagtttgataaagaattacatggaaacactgaatccctactaccagcaacaatatcagtttccggagttctgtgctcagaagttccaccagaagactctattttctctatagatttgctagtttcatcaaccatagaagcaacatgaatttcactccgtaacggtctggacagcctaggcgagctggatagagaatcacatggaaacactgaatccctcctaacagcaacaataccaccagaaggcttggatttctcttcacctttgctagtttcatcaaccacagccgaaacatgaacttcactccgtatccgccttcgtgagctggataaagaatcacataaaaacagagagtcccccccactaccagcagtaatattagttaccggagttctgtacttagaagttcctccaggaagctttgctttctcttcatgagtttctacctcaacgctttcagtacaattatcttccttatgcttgatgccatcttgagaattactgtagttagctttaacagatattttgttttgtatctcctcattcactgccaccaatggcgaaatatgacaaggactaacagaattatcagatactaagcaagaactgacctttgaagaatccttttcaagatttttatctatagagagactccggacagaaccaatggcaccagatgatccatatccaaaacgatcttcaggagacaacttacatactgttgtacatggttgaatttcgtggagaccagattcagtatcagtaactgtttcattaccagacatgccattaattccaattgcaagagttgtttcagttacgaacgcagacaagctaggtaatttatcacaaaatatggcagatctttggctaacatcttgctcaacaagactctctctcgcacaatcagtaagatctttgctaagagaaacatttggctccaataaacaagttttcaaacctctactatcagaaccactatctacacaaggaatttctgcaggatgataagatttcaaaatcagctcctcatcagggacaagtctctcggtgcttacattttccatacacccctcagatggcactgccatagctaaatcagattcatcactatgcgaacagccaccagtcctctccacagacagcacatttgatgatccctttactccaacctttgtcagagatgaagaagtgtcgtttacacaagtctgtttaccttcttcactgtccatattgtcagccgtttctgcagcaacattaagaggcgtagtttccatgtatccttttccgctaacattctcaaccggtgcattgactgtgtttttgcagtgaggaagatttttactttccatctggaaaactacactcttatcaggtgacgtgaccataggattcatatatgtcccaacggtaaaactgttagcattagcaagatcccctgacgcactattatttgaattagcaagatccaatgaaacattagcaatgtccagagaggcaggggaatccagacccatggggcgacccctagaggagtcattttcaggagacaaggaatctacattcttatcaatcctcttgttgtcatcttcaataccaccgatatctgacttcgccaacaccttatcaccagggtcttctctattaaaatagatggaagcatctagatatggcttctgaaaatcctttcctccataacccaaagatccatcagatgaattaatggattttctttcttcaaacccagtatttacttccatcattggtatattccttgatggtatacaatccatgtcctcatcacaatccatatcctcatcacaatccatgtcctcagaacacccagaaagatcagcgacggttggccatgatacaggtaacttaccaggagacgtattgattgttgtctttgtcttcaggatttcatccatctccatgaccttcggcaaaagcgcttcgcctgcattacaatcagtgctcgttctgtccaacacatcttcatgagacttcagtgtactttgatttccatcaataacaccttcctcagtggagcaagcctccgtattgataccatgtttgacattaatgtcatccttggcctctatcaaagtctcacaaaaactagagatcttttctgtatcatgagttgaagcttcaggacctgaatcggtaagtttgactttgctgtcctgaacgacaccattaacaaatcgtaccttgtttagcttaccaccagaatcactggaagacggggttgagtgactgtcaggttctttttcatttttagatgcagtagtttgccttgtagaccgtctgaagccctcagaaaccgaaatctcatctgacaaatgggttcccagctttccatttctttcagttactgaaactttctcatttttatcagaaagcaaagctcttctagctttaatagacctaggtgtcacagacgcacccgaacggatgcctgcacttgtaggtgatgctacgggcttagctaccagaacattcgatttaaatgatatatcaagatccactggacttctccccctttgcttctccaccagtccacgatcagaatgacccaagtgttccttacccctatatgagttagagttaaaccttttcccattaccattatgatgattatgttgccgagaccattcattctctctactgtttttataggatcttggagtttcaagccttagcagagcactcttcttctgaacttgtttcctaggtgttcgattcaactcattgctcgcctctctccttccacgatcaaaatattgttcaatctcagaatgatagtaatcatcctttttctcgggatagagagtcctcccttcattacgtgtttctctagccccttcacggcttgctgatgacctagtcacatctcgacttactgtaagaccatatctgtcactgccataaccaacactagaggataaaaccctatttccatcacctaaacccctaacatatctatcggattctgattttaactgaccacgggcttgataattcccctctgttctagtgactccagattcttttctagcatatccaagactacgaaactcatctctagacctagaactaccatctaaaccacgattaacacccgacgagttacggctgtagtcatactgatagttacggcttggaccatcatccactcggcttcgacccggacctgaatccactgtccatgaatcaagccgcttttcattgaacccaacccaatcagactgagattccgtacattgaatactcgatgtcaacggctgtgatattctttgaggctcataactaacctgctgaggaatgtattgaggatgctgctgctgctgctgaagcgatagtggctgatgctgttgctggagcggtggcggatgctggtagtagtttgaagtcggctgattaaccaccgtattgggcggaagatcttggcgatgatgagagtattgatggaggtaatcttgacgttgaccattgctctgagttgatcgaccatataaattagggctttcgggatgagattgacgaggaggaggaggaggcggtaacggcggtggcggcggaagaggagcagagggaggatgaagatgaggagagtaaggagaattccatggatcgtaggtaggattgtaatgagaagaatccatggctgatttggattttagccttgagaaattttagatcttttgaaccacagcgtcgtcttcttcttattcttcgtcttctgatgaaaacgcacgcaacacgaaaacggcgataaaaatagtataatacacacgaatcaatttagttctcgaatcgttccgattttcggtaaccggtttttatatcttcttcgtaactctctcttttccctaatcttattgggccactgcatttattatgggccgtattgtataagtttccgttcttcagctaaaatctgtgtcaattgtctagattcaaatctaccaaatacacatgttgctgacacaaaaaaaaaatgtgggtacattatcaaagaattagttatcagaaaaattattacatccggtcatgtttctttcaaactcaatcaaagtttgaataggacaagaaaaaaatacttatgtcatctcttaccacatattatagattgactcagtcgcatatggttttgtcttccaaattatagagttatgataagattgccaaaatctttaagattgtgataggcactctcgaatatatgtaaaattgtatttcaacaagataatgttattctattgataacagtgagacacgttcgagcattacaagacaagaaaattcactttgatccattaggatcaaggaatacaaattacatgtctctgatgttcccaagtaaaaaacattgcataaaacacacgaaacctttgaacgctataactataacccctaaaccaagggagggaggagggcaataaaacccacacaaatccacctctcatccaccacccatgagaccatgacaatgaaaagaaacacattttcttaaatatacactttacactcactcacacacaggagaactcttttttttcaccatctcacattgttgagtattgcaattgtgatttgttgtagtgaacaaaaataatggctcagttgaagcttgatgaacggcttgtcctgcctttaagatactcctccacggagatgccttgctccatgcttcccatggaaagagagtcatcttccatgtcaaggaatgctaggtttagatgtgactgcagattagacctccgcaatttctcgtccttgagtagcattgaatcctctaacgggttactaacttgtagctttgcccattttagcatctctacgtcacctttaagaagctctaagacctgcatttccaaaagacatatcgtgttaataacttgtttgatatagtagccatctctaaaatgatgaaactggcaatgaaatggaggattaagaattgactcaccattcccatcgttggcctagtttgagggttatgtcttatacaaagagtggctgctaacgccatcttctccatctggtcactattgttgtcatcttgcaaactcgagtccaatagctgtgaatattctttatcatccagaattggcttcgcctgcaagtgtacatgcatgtctgtttagcaataacaaagaaagcttagacatttcaatgtaagaacattttgccggtagtatccacatacccacataacaagactgtcttgagcctttggagattcgctattaaccggttttcttccagaaagaagttcgaggagtacaacgccgtaagcatagacatctatcttattgttcatcttaccatacataaagtactctggagctaagtagctgcaacaagaaacgtagaacattttcaagattgttatctcctaaacaactttcacgcagcatcaacatatatatattttttttcctcacccaaaggtgcctgcgacatcggagcagattatctgagttgtggattccgacgcccactttgcaagcccaaagtcagaaagctgtgaacaagatttctctttttagtatctcgtgaatttttcctcttcgatgtaaacattggaaactaaaagaaacttacttgtggttcaaaatcatcagacaataatatgttagatgacttaacatctctgtgaataacaggttgtggagcatcgttatgcagatagtccaacgcttcagctattcccacggccaccttatatctctcgttccaacgaaatgcaaccaggtcttttttgttgcctaatctcaatctcaaaccttgattgttagaaccagaacacaagaaaatctgcaagtggctaaatggtcagaggcttaccgtgaagattctcttcaaggcttcctcttgagagataattatatactagtaacaggttattgttttcaaagcaataacctaaaagggaaataacgttcttatggtgtaaggttgtgataatgtcaatctctgccacaaaatccttcaagacacattcggttcgtttgagaattttcactgcaacctctcttccatttggcagataacctctaaaaacccggctgctgcctccttttccgatgaaattatctgaaagtacattgcttttcttatttagacaaaaggaaatgacaagagtcttaagaaagttcaaaacaaagcggtagcttaattatgagaagagaggaacaaaccagcacagaaattggatgtcaccgacacaagttccttatacgtaaaaaactggcaagatgtggagatccttgcctgaagaccctctacattctctggaaatctacctgagctatgatcaagagaacatttcacgatcatagattcatcaggaacaattgcttgcctttcaacgtttgagctagacaacttatcattttcttcagattcagaagaatcaaaaccaatctgctttgtgtctgagcttccaacaacagaattggtcctagcgggcagcttcagcacccactgcacaactggtatctttcggaacgaagaacttctcggagcagaagctaatacatctgaagaagctacacgacaaagcaaaggccaacctggtctaaattcaggcagttcttttaccagcattgtaatgaatggggtcaaatcttctggaaattttgcaggaacaagtgccattgccttgtgcaaatcagcattatcatcttgatcaccattacagctagacgatcgagataaatttccaggcgtaggcaaggaattcatatcacgaaccgagcaattcccaaggcatgcatacactaaagaccgccgaagactctgaccattggaatgatcttcctctgcctcttcctcttccacctcagaatggtttactactttggtattctttctcaatgtgacaggcatctgaaagaaactagacaaagtgttcctacgagcatcacttttacctattacaaaccaatgcccaagaaagaagaagagttcaaaaccctaatacagacacagaaatcatcacatacaaaagaaacttatagagaaaggccaaacctttagagtgatgaatgatcgatgaggaaccatctttctgaaacatgacttttccattgtcaacagccagaacccagcaatcttttgctactttcctagctaagtacttagccacggagacagatgaatgaattgtatggaaacgtctggagatcccaactacaactttggacgcagaacacatttttgcttctttaactagaatctttcgagtagaagaaccccgggataattttagcttcaattccaactattaaaagcaattcaaccatcatcagctagagcagagagaatagagcatgaaagttttccactttaataagcatacctgtttcaatttgcagaaaccttcataaacttcaagaacagaatcaaagtttttaacaatggagacgagagaagagttgtctgctcggtcaacgatctctacacaaatccaataagagagagtaaacatggaaacccatttccaaaaatcgtagctttaatacagagaaacaaaaaagtgttaccattgccgagtacatgaagagcgattacagtatcacccggttcagcaaccttaaccaaagcccaatcaagtagctcattgctcgactcatcgaactttacgcccaccataacagtatggcctcctcctgtaacgacgccgttttccgtcatctctctctctatcactctcttatcttatcacttcccagtttcctcaaactgttttgtctgaatttcaggtgaatacgttgtagtgtgatgattccacgaggcacaaaatcatcgcaacgctcacaaaagtgaatctctattctctctcactctctggttttgcagcttctgagaaagagagaagagtaagaatggaggagcagacatatgagaattttcatttcgttgccatttagataaataaaatacataatttaatatttagtcttcacagtacactctctcattaattatcaacctaacaaataacaaattataaaaaatatatatagatatatcttttcttttttttgctcattttaattaatttaaaaatatttcagatacattcatgaaattaactttatttattccctattgtagattattttatacaaaaaaaaaatatatgcaacacaaacattttcttttatctgaatttatgttacataattaacttaagagattggtaccataccaaacagtagaagaagaaatctacgtattaaatacggggaatatggtccaccgttatcgattaatagaatgttgtgccatgtataaaagtaccataaatgaggttccggcaatgagataacaaattatcataattatgtgattttattcctttgtttttatatgaatcattccttgtccattgtgtatgtattttaataggtagattgacaaatcaaagatgcttattagaaatgtagcccaccaaaaccatacttacttacaaattcaacggttgatgcacataccttatcgttatttttattccatttgactattctttctcacgtcaatcttctttattttatcgtgcaattcattttatcgtgcacatgtttttgtttcttcgactcaattgaattgttttaagatttgatcatttccttctctaccttgttggtttggcatatgtcaaatcgatcgttctgaccattctatcgcaattttcattccataatattgaacacaatcgtgttttacaactattcttaatttcttatatacctaacgaattccatatcaccgaactgttggtgcatttattttgttttacgtgtcattctaagtgattcatgtaatttttcaagtgtggcaataaataaagatatttgtattaaaaaactgaatagggaagttaatgttcggtggtcacagaatgggccaatggaaccaaccacacaacatgactgctctgtcggcgactttgacatttgtaatcccactcacgtgaaaatccaatcgaccgaacatgataccgtacacgtgtcttttcctgatgtcatcattaattacatcaaaaagtttagaataacagactacctgtcgtttttagtagcttcgtataactaaaacgacacgccggctacaagttctaactagtccactcaacaacagtcaacaccatcccaatttctcaaatacaaacactttgttccaatcttgaatatgaaaatatctcatcacaagaataatacaagccatcataatcatcaattgaaaacttgaattaaacacctcaaaacttgcaaataagctagcttctctagtcattgaatgttagtccatcaaactattgcatctacacacttttttctagaggcccatattcatctaataacacatccatctctgctgctagtgcagtacctgaggtcaccaaaattgtataccctccaccatatcatcgatttagatcatctgctctcgttttccatctcaggaagaaagttatgctgacttgtcgtttggtgtctctcgagttcttctagaaccaatttgagacactgaagtctcgtagcttcctgagatgtttctccatgtcttctctagtcttggtccactcttctctttctattaccgttgttgggtcatctctttcaccctgaaagaatggaaatatatagacatagagtgaagatgagtaaagctagatgaaggaatacaaatgactgccagatgaaatggatttggtcatttggaaatggaaaggtaccacgtgtatgatcttaaaggaggttccattatctcgtatcacaagcaagtcatccttcctatccctttttcttcctcccggaactgtcacctgaaacaatctaaaaccttaacatcggaaagaagattgtcttcatagctttgagctatgcacagtatttaaagaactcataactcaagatatctgattcagaactagaggcataaatagcactaatataaaccagcatttcattagtgttatagcatgaaaaatattctataagaatatgtcaaaaaacccaattggctatggtctacggttgaggtttgtgctcagactcggaatgagaactttgttaataatgcttaaataacttggaagataagaattagtcataccagaactctggctctggtgattgactttgtcttggaatcaataacatatatctcttcaagatctagcacaaattctggatcgtttgtccttctgttccggtaatgttttgtcaagaaaacctgcataaaaaataaacacgatgaagacaatttgtatcagaaactgtaactactaaactaagtagtttcgtgttgatctcatccttaatgcttaaaaaacatatttcctggtgtggtttccaaaaatgttgtcaaatcaaaactaagtacatccttgttaatacatgttgctcaagactccctgcatcaaagacctaatggatttaacatcaatgtacatggtccaatatgtaccttggatatctccctctcagatttgtacagtggatctctgggggcatcaataggtggttcagtgacattgtaacatccatagtcactcattgcacatcgaatatactgtacttgtaacatcattaaacaagcccttgttagcaccactcactcattgtaacaacttgcttataaataaaccttacaatgtaaaacatacgcaatcatgaagcagcaaagagtacaaaactggccacagaatgaaaggaaagtgactaaacaaacacccagctgctacattctgactctctaatcatactaaatgctgaccatttacggcactttttgagattatatgttcaaaattccagtctatcagtgtgagtagaagttccaaacaataccaaacgtgtacagctctgtgtagataagatttcttaagttatacaattactaggtagagtgaaggtatatgggttatacaattactaggtagagctctgtgcagataagatttcttaagtgatacaattactaggtagagtggaggtatatgggttcaattagcaattaagcacaatatgaaaagcaattatcttgctgaacaaaaggaagtctcagaacaacgcataggcattacaaaaacagcaaccgataaggataaatgactgaccttttgaggcatcggtgcaagaactctcggaattgagtaaatatctgtatccggaggagtaacatacatctgcagccacccacacaaaacaatttacaattgaagaatgagcacagactctagagaaatcgaagaaatgagcaattagagtcactgggaattcacacacctctctgaaatcataaacatcattatctggatcaggaggttttctgataaagaaatcacagtccattaagctgagtttatgaaactcatcttcgtttatccgataatcaaccaccatatccgaatcccatccttgtgtcgatataaaactcttactctgaacaaaagcgatatctccatcaccaccaccgcctgcagcggctatcgcggcggccaaggggtcatactcgacatcatagtccttcttgttgtcaacttcctctacctcctcatcatccatatcatactcgtccgctccacctccatcagcatcgacgtcatctactttaacgactataccacggccgcgtcgggatttcagtgttaaaggcgcgaaaagaccgtccgttctgaatgacgcaaatagccgctgagagccggagggataaggtggcttcgaggtgaatgagagtagagataaggaaggagaagcggcggaagacgccattggaagcggataaagctcacagagtgttctatctatctgtggattagatatttcgaggaaaaatacaattaaaaaaaaaagaaaaactatataatataataataatcctttttagtgaataaaacaacaaaaataaattaggaaataattaagagcgtcatttttggtatcccgcgcaactttttcttctcagtttcagtttctctacatcgattcatcgattccactctcttgattgctgtttagatcaatccgtctcgaacccaggggttagtatatagtggatcaaactgatccgacccgacccgacccgaattattaatgtcggaagttaatgagatgagtggtggttctattggcggcgaattgttgagagcgtcgccgaaggttttaacggccggtgatcggaaattactcaaggtggagcttcggccaggggatacgacgtatgtttcgtggaagaagcttatgagggatgctggtaaggtcaatggtttatcggcttcggttcccgacccgcctcctaatgctaaccctaaccttgagtttcgaattgcaccggtgagtttgatgttgtaggaattggtaatcggatatatatacttgtaggcatttgtgggtttcgtttgctgttattggagtaagcatttgtcttgtttcggggagttgtaatctttgttagggtttataaaggagctttactaaattcgcagattttcagatttatttgttggggaaaatgcttgaaatcgatatggtataggaggaattctgttgttattgctctctgacgtctgtgactagagttcaataagcaaactccttaaacggagaaagtctacaacctgatatatgatctttggcttcatttctaattgctagctacattaggctaacttcatcgttatcaatgtgaatatgccatcaattatacttgatctggaaaggaatttggttcacatagttgcaatggaaactatagctgtaatagtgaagaatatagagaaagttttattaatatctattagtgcaagagaatgaagcatataatagtggatcttcatttaagatggtataatatgcttgcagcttcctcacaatatattcttcttatgcatacaatatgggtggttaaaatcattttcaacagctgtattttcgtatataatgtaggggcatccagtagagattgaaacgaatgaacaacctcattctaaccgtttcaacgctgttattgagaagatagagaggctctataaggtatgctactctttgttaaaacacttttcttggtaggttgttatatgtttgatttttcacattcacaacatttttgcataccatgcaatagcactgttgcattcacacatctctgaaaagtgtatgcttacttcagagaataaatctcaggggaacgatagcagtgatggggaagagttagacggtgctcctgatgatgatgagtatgacactgaagattcatttatagatgatgctgaactggttggtgttgatatctttcaaatatttttgatagctgagaaatcatatctctgttttactctactccttgcaggatgagtatttcgaagttgataattcaacagttaaacatgatggattttatgtaaatagaggcaagttggagcggatgtgagttatcttcctcttttcattatctgatgtctcttaactctttggtggctttgtcacttttcaatcactcagatcatgtttagaataggcatgtcgtaagtttttgaaataaacatatgaaatcaccttgcttttcagtttttcttcctatttggatatgtgtagtctctccaaatggtaaaatatggttggcagtcttgctactactgccttaactaatgtctgtagggtgtttggtatgggtaaagtccatttttcaacttttctggttaaaaaacgttcatatagatgtaggttttgcactttcgataggatagagtttttctcattttgcctaatcatgctatatttcatttacaagttatctaatccctgattcattttcacaatagggaaccttcaacaacatctaaccagcaacccaaaaaacggcgacgaaaagattcagcaaaaccctgtcgtgatgcagttgacgtatccgataaacacaccaagttgtctataacagctaggaaaaaggtaacatcttttattgcaaatcatactaatttatgtcggagtttgagtctgataactgattatacgaatggggaagtccaggatcaatcaactgctcctgggtcctggaaaacacaggagtcacctttgccttctggagcgcaagatgcaaatacttcagtacctctggatgatgtgaagcattctgatagagcaaatcatcagtctaggaatgatacaagtcacaagtcaagggaaactggatcctctagtgcccttcatcagaaatacagcaacaaaagcttacaccaacaatctacgtccctgctaggaaaatctccccccaatgtctttgcagaggtaacagtagtccgtcagaaagaaaacaatggtatgcatcagctggcaaatgtaacgggaagcagacaatctagtcaagcgtctgtaagtacattccaactgtgtctacaattacataaaatacactcagtaagttggttgcattctaaggtcgtagttttgtttctccagttttcatctcggttctgtgatatttttctggtcaatctttgcttccatgcatttttcttaccacaaagtttacatcagtcttgctttataattctgcaataacctgtctctactcagaaaaaagatggttctaatgtgaagtctaaaacctcaatcctcgagaaagccataagggaactggagaaggtggttgtggaatgtgagttttaatatttttcaagtgtgaccaactagaatagcatttggtgattttcaacttacaagaatttatgatttataagcagcaaggcctcctgctatcactgaaaatcaagaagctgatacctcatcccaggcagtgaagagaagattgcccagggatgttaaattgaaacttgctaaagttgctaggattgcggtactagagcttttccatttgttcttctcatttttttgaaacttgaaacggtatgagaaaaaactaatatgccttttgtggcagcaggcaagccagggaaaacattcaacagagttaatcaaccgtcttatgagcattgttggtcacctaatccagcttaggtctcttaaggtaaaattttctgtctcctgtatcctagtctttctgttactaaagcagacttgttaggactttcgtcaaggtgtttaaatagttagtcttcttcaggacattcatgttccagtgaaaaactcttctgtttcaggtacaagcaaacaaaatatggtttcttactctttgtaatgcttattttgcagaggaacttgaaaatcatgattgatatgggagattctgcaacccgagaaaaggatactaggttcaagcaaatcaacaatgaagttcttgatatgataaaggccaaagtttctttgatggaatcacaggttctctctctctctctctgttctaatcttaagttgcttgataggcatttctttcatccatggcttttctatcttattacattcttggaagtgtcattaacttttatgaaatctggagttctctctgataatggttttccgtagatcaagctcttcattcttttgttttcgatgttccctgtgggtcaatctgcctttgtagcgtattttcctcctattaatatgttgaggcacctgtgacatttatgatatttcttgcactatcattttatgttccataggcaatcaaaccagaaggtgcaacatcagacgattttcaggactcagtagaaaagccatctttgaagaagtttgtcatggatgcggcattggaggataaattgtgtgacctatatgacatatttatcgacgtaattatcatttacctttataatctgccatgccaattctagacatagaattagagtcaaaacggttttgttcctgttttttggtatattagggattggatgaagatcaaggtccacaaacaaaaaagctatatgtcaatgtaagcccttctccattcccgattatttttggtattctggttttttttgttccaagcttatctcatgtcttaaatcaccaattagacctagccaaaagctcaaggtggtttgttagagcttgatgaatattgttttggaattattcatgctccagttggctgaactctggccaaatagattgatggattatcgtgggatcaaacatgcaattttccgggcaaaggagagacgaaaagcattgtatggaaaccttgcgaaagagatggtagttaaagaattttctcagccctttacctctttgcattaaaattttcgcaatttgctttgcttgattagattctgctttgttaaaggatcaaacaaagatgaagaagagtatgaagcagttggtaccaagaacagactgtactgctcagcccaacaccgaattagtggttcagagacaacacagtggggaaaaaaaattgattgttgatccaaatgcaaccagcacttccgtggtcactagtcaaactatggttgacagatcaaatcagcagcagcctgagaagctaaagggaatctcaagctcttgcaatcctacagaggaaacaagagtggtcaagagaaagaacgaggctgtaatggctgagaaacaagtcgttcttgccctgaagaagcccgaacatccacagacacgtgtaatcccagctcctcagaatctgaacatcccacgaacaaccccggacctgaacttgccaagttgacatcacgattgacaaaggagctcttagaaacgccggagacaataacctctggcctcttccttccttgtattttgaggtggcacggcattagtcctggcgatgccgatgcttggtttttttagctacaaagcatggtttataaagttgtctgtattccagtttggctcttattaagttagttactctatttacgtgtcctttttcaaaactctaatgtataaagttatgattttacgggcaactctttacttttgagtaaaaaaaacagagcaggttttagtactgaattttgggtaacgtagttgaaaatttgatttcggacgataatgtaaaattgatgaaatacatcaaaatgactacattaatccttttgacacaatatgaataatcaattttaattaatattattattacttgtaaaacagtataaatatggctcattatttcacagattctcaacactctctcattctccacaatttacgatggcacaccagctccgttttgccgccgcaagagaacccatctcagaagagtatccggcggttgctcttcctcatccacgttgcatctccgtcgcgtttcctcctccgagattcacaccatctccgtcgcctttaactaattactcattcttggccgcattaactcctcaagaactggagatgcgtttgcaaattgcaatggatgtccgtaatgactaataacgaagatcatgttgcggctccgtttgaagagatgatctcgaagttagaccaaagaaagcttcaaacgatggcgtcattgctgacatcagatcccgattacttcttgatgatcgcaagaaacatgaacggctccaaacgcattcagaaacttctcggaaaaacagatgacgtggacgctttattcgccgccgctatcttgcgccgcttcctccacatcatcaccgacaagtacgcgtcgtacgtggtgagacgggggatgacagttttcgataagaagaagaaaaaagcaatgtacgagcacattctccactacgcgagccacatagcgcgtgataaacacggtaacctcgcgctcaacgacatcataaccgacgcggtacagaaacaagctctttgacgtaatcgcgcacaaagctcttgtactaagcaacgatgcttatgggaactttgtgatacaacgcgtgcttaaactgaatgacttgcgtagcaagaacaacatcgtcgttagtctacgtggccactttgttgatctctcgtttcagaaatatggaagctacgttgtggatgtacttttggagacgaaggagtcaatggttgtggtggtggaggagcttatggaatgtgaaggagatatgttgatgaggttggcgaggaatgagtatgggaatttcttggtgtgcaaggcactgagagtcacgcagaaggagatggttaggactgatctgttttggggtttggtgcataagctcaagccttttcacaatctcttgcgttggtctcgtggaaagaacattgcatccatcttaaactcgattcgttagttcgtctcaaaactagttaacattgttcagttattaaaatctctgctgaaagttctcgatttgatgttgttagctaactcttttaaggaggtttaccataacttgtcaaaaacacaaagaaagggagaagagggattgatatacagtatatagaattc

SEQ ID NO: 13 - DNA, 82875 bp, Arabidopsis thaliana
aagcttataacgtgaaggcatttgtatcgtctcttccgccaaaattggaaatggatatcgaagtttgagctaagaatccaatttagggttaactttgccggattctcaagcaatctccgagagagacagtgaggtttcgatggcgaggaacgggattgggagttcaggagggaagaagaatggggctgggcagtttttcttagcgacgctgcttctttggcttgtctccgtcgtgtttgagattgctttcaatctccggacggagcttctctgggtgatttgcggtggatgcttctttcaattgatgaattgggttgttcgttcatggatttctcgtgaccctatatttgttaatacctctgtctcgcttttgcactcaatcatcacctccgcatcaggtccctttctctcttctcttatatttgagttcttactataggattgtgctctgttagtggggaaattttatcataggtgtgcacattggtcgttggtattagtcaattttcctttggtgctgtgttttcacggtttcattgcttaatgtgattcttatttccgattggattagtcttatgattgattgccatagcttgagtataatgcagttctttcttcgttaagccttactgattatgatttttcatcttcaacactgctcttgtgttactacagtggttttcatacttctcaatcaatgcttagccaaaggtttagacgagatgtttgatcattctgagttggttggtgggacttggaaatgggcatatccagctttgtgtttctcatgcggctactttgcatatgaccagtgggatatgcttcagtaccggttatacagcggcttaataccttctattcttgttcaccatctagtcctccttgtttgcttcacattggcactataccgaaatgtaaccatcaactaccttattcttactctcatctgtgaggtacgttccacttttttcttcctgaaaacttgccctggcttttctctgttctttaccgaatctatgctaacattctctagttaaactagactagtttcatatataacaatctagttagatatagactcaactctacaacatctacttgttcgaacaaaagtgacacctctgttattcggatgtgtaaacagatgcattcgatctttctacacgtgaggaagctaaggagaatggcaggaatccgagacagcaacacagcattggtgaaactggagtgggtattaaactggacagcctttgtgtttgcgagatgcattcctcacattctcatcactatcaagctgatcaaagacgcacacaagtttgggaaaggcgtggagttaccactcgctctgtctggtatggcaggaatgaacattcttaatgttggcctcgggttggatctgtttcatgctttcagaagagagagaagccacagaagaaaccaagagaacggcaaccttcacgaccatggagaataatagctaatttagaggcaatccattaccgaatctatggtttgttgttgtatgaatactacccactcatctcttgtttatatctgaggctttgctactaagttctaatagctttcagatttgtatgtatctctctataggaaaactacatgtaaatgttatttcttgatgattacagtcaacagactttttttcttcttgtgtttggggaaacggaaccaaattagaattttggtttgatctttggttgtgatttatatatcataatcattatataaaagttaatcttaatgaactttggtttattcagttaaattttggtataatcttttcaatctattaggaaagtttgtttagtgttgagttgatgaagtttggtccggttcagtttccaccaatgtttggaagaaaaaaaaatgcaagagcatgagaggtcctaccgggagtcgaacccaggtcgctggattcaaagtccagagtgctaaccactacaccatagaacctcaggtgcttgttctgttgcatgtaccagtttagaatctaatccaaaatattgtattttagacacgaccaatgaatagattcaacatcagcagttcagcagcaccacagattgcagttttctttgtctttatctaaccaaacaaaacaaaaatcaatattttacttggtgacaatgcatcatatgagaccatcaaactggtgacagtgaaataacaaagatgaatctcacaagacataaacgttaagaagattacactatgtagcaaaagaaacaagggtgatctttttgctactaacaagtcagaatctgaaaattatggtaagaaatccagcttaacaacagattgattctagctatactccaagaacgaacctattgcttctcctaaatccccaaatttactgagtttctacttcgagtgaaaaccgtggcaaatccgttgcgattcttctcagaactccctcggtttgatgacataattaatgacactgttgttgagtccgaagaagatgaacaaggaggtgaggtcttgttattgctgttctggattgcaagaaactcaagtgatcttccattgattgttttgatgcactcatgaggatcttttcctaacaaagcttccttgttgtgaactgaccttgcagaacctggaatgctagctgtatcgatcaagaattcttctagtgttgcaagagattgtagctgtttcccaagtgatgctattgttttctgacaatctgcaaattttcctgcagctgttgctatgtcttcctgcaatagaatcagcttttagtgaaacaaggattaagaaaaagaaaaaaagactaattggtgatcagaaaaataaaaagctatacctgtttgatctttggttccactttttctctcttgatcattgtcttctcttctatctctcttctaagctcttcttcaaatgtctcacacttttcctttagcccatcagagacaatcctctcctttctcacctctgcttccattctggtcacccgagattcggcttgtgttttcgattcattagctagtttaagctcccttttcatcgcttccaacttcatctcaacttcttgaaaacaaactctagattcttgatattgatctttaattacgtcaaaagatatctttagctcagctttctcagcttccatcttctccaactcatcttccatctcaattttgtcaccaactacagcttcgagttctaagctgaatctcttctctgcttctttacaacaaataacttcactgtcaagctcatccttttctgcttgtagcttctccaactttgtgtcaacttcttgaaaacaaactcttgactcttgatatttatctttgagcacgtcaaaagatgtctttagctcagctttctcagcttccaccctctttaacatatcttccaactccattttgtcaccaacaactgcttcaatctctaagctcaatctcttttccgcttctctacaacatttaacttctctttcaagatcatccttttctgcttgtatcttctccaacttctccattaagctcaattcatatccatccttggagtttttagcctgtgtctcagtaggaagagccacaagacgttccatctcaaggaaatcatccatgagatcaatttcagttgatgaagtagtgccctgaagacttctattgccgcctttttcattcttgatttgatctaactcagaaataaatgctgatgatgcccatgaatcagagcaactcccctcaactctctcccttcctccatctgaatgactatccacagattgattagatgatagcgatgatgatgttttagccaaaatcctaagcttcctgcactcagcttcgagtttcgccaacttctttatgatgtctaaatgctgcttactagcagtttctgctgcttgagtgctcaagtccctctcaatcatcacaatctcaaggtcttcacgctgtgtaagaaactcgcgtctcagcatcatgttttcagatttagcagcttctgcttctttctggagctcaagaactcgcttctctagaccagtgttagcagaatgcaactccttggtgctctcagtcacagctgcttgaatattcttctcttgttcatctctaaactgccttagttgtctcacacactccttaagcgccccatcaagatgacttaccctatcttccaagacaatgttcttatcagccgcatcctcgagcttttgcttcagctcaaccacttcattctcagctttctcccacccttgaaaaaaaaccacaagagaaaatgctttcactataaaatgctaactccagaagcaggatcagaaaaggagtgactaattaccagcaacagcatcttctgcaactttggcatgttgtttcactagctcatctttggaatccataactggttccaatatcaaagtagtaccagtcatcatcaaatcacaaacttaagtaccttaagaagagaaaaataaaacaaaaccaaacaattttttaggaacttttgaaaacatatgtataaaaaaaaagaggtaacttggcttatcagctttcccagattttgctttcaggacactctgacaacaaatcttaagtacttaactatataatggactggaccacaacatttcccagaagaacacaaaactggtaatgattttagcaatcacttcataacatgtcattaaaaaagaactacaacaacatctttctgtttcgtttcgtgtaatgaacaatttgttacagaacattagaaaaaagagttgaggagaaaacaagattaccagactagaaaacagttgcaatatgatatgattcttcaaaaccaagaataaataacatggccaaaaaagcgagaatttctttctttttgtggttgtaattctttacagttttgaaatgtctttttttttcaattttcaaaagaggaagagagggagaagatatctaactttttcttcagcatttaatggaagaatacaaatttgaaaaactttttctagttccatgaaataagtgggctgctgtaagatatctaccacatattatttggtccaagcccattagtttagatatttcaagcccaatgagatatattgcacattttattcatatttcacattaacatatttatttatctgaaaaaagaaaaatacaaatacaaaatgaaagccgaactatgatcaataatattaaatttttacaaataattaccattaaaatgcaatatattgtgatgggtgttgttgctatgtaagtaacaaagcagcgctaagtggataaatattgatacaaactgtaatgaattaagtatcgtctaataaacttttggaaatgttgtaagttgataatagttccaagtatacgtcattttctttagttcaagactttgaaatttgaatctcacatgttgttgtcactcatgaatcacgacctacgtttatacatatagaccatacattatcatttaatatcaaattattgtcgtaaaatctcatattttgtacatatatatactataatgttttaaatataatccccatgtcgttttataccattcgcattttcgtatatgctatagtgtctatatatacgcagaccaatggggcttacgtcctgatcaaggattctttgtcttggtgctatattttttttgtgatacttaaatttaagattttctggatcaatataaatgggactattttatgaaaattttcatttaatttttcaaaatcttttaggttaggtaaaagaaaataggtaggtggtcctcctcctaatcttgaatacgatcatctattaaaatggtcccgtttaaccctacagccaacgctctcgacaaaagaaacaaaacaattacgaaattcatgcaaaacaactattaaaaaaaaattcactcacctattgatatcaaaggtcaaagaaaatttgtcaaacggtggcaaataatcttagattaccataatcaacaaaactactcgacaaaacattcaattacgtactatttctctttgagattcttgactatccaacttcgtttaaacttgtttcgagagctaaaaattacttttaaaacagctggttaagtttcgatttttcaaaagaatgctttaaaaagtttccaaaataaagtagacaaaagtcacaaaacaaacaaatgtctactcgtcctttaattaacctaaaaattaggttttccttcgcatcagtcttaccacattgataaattcttatataattttctttggaggagtcacattgctttcctacttttgattgaacttagacaaactaaagccacttttttctttgagttgtcacctcaaacacaataaagttcaaatatcaaaatcagttgcaaatgaatcaactattgatttcaacattttaaccaatttcgttcgaatcaaaatgaacttggtaaaacttacatacatatgatatgaacaactctccaccataaacggatgtgctatacctatctcgataatttctaatatgaatgtatcacaaaaatctttagatttgggatttggaaataaacaatgtatagaaaagagacaactataagacaatgtgaatggggcaatgctttggggtccattttttatgctcaaatgtttcccactattgtgaacaacctaacatggactcttcttcttgcattataacttgtactactctctttttttctttaggaaataataaaaaggaaattaaggtgagcactaaaagtcatagaaaaaatttcaagaatcccatgcaaaatatattaaagcaactcacttttctagttttcttctatctttaattatacctttttcttttctttcctttgctcaaaactttctcttttgtcatattgaaataatgataaaaggctattttgacgagtcctattttgacccttctctcatcttttaatggctttatcacattcagaccacatgcctacaaagaggtatggtgtagggcaagactcttgtccctttacatacgcttaatacatctacatacaaaaacctaattaattcaataacttaatctatggatagttcaatcgcttttaaatccatgtctcgtcattacttacaaaaaaaccttccacataattcttcttcaaacagaagcatcaatcattgaaaaaacgaccaaaccaaatattaaactaaaaaaaaaaatatgtagaaaaatatttttaaaagggtaatcaaagtaatgaaaaattcaacttttacttttcctggatttttttctggttaaggtcctcaccatccaaccctgtttcctcactttggttccttcgaccttagatggtgccacatggcaagaagacgtggacgatcctgatttgagtttgatgacgtggaatagatgaccaatacgcttgcgccatctaagcgatgacttggcactattgtgctctacgatactggtattgctcgttataggagattgctgcttcttgcatgttgagtttgttgtgttgttgttgttgttgtctacacaaacctttgtcactactgctttcttttcccacgacgcgtttccgtcgttttcgaattttatcgatataaaggaatctgaacaaaacatgaaacttttcaaatttatcataattgatcttgtacaataattaagatattatattaagataaactacattattttaccaactataaagatatagttagccgtatagcacacaactcattatatcaagtagaaacaaaattttcagctggctgtttaaaataatattttattcactcatttttgaatataaaaatatataaaattattgtgtatatgaatgtgtctatatgatccttatttgataaatggctttctattaaaaaattatgaacatatatatcattgaaaatagtgttaaatcccacacacacatattgtgtgggagaggagtttataatcttaatcggaaaaaagaaaatcccgtttgtcaagggaaacaaaaaaaagaggaaaattaccaattagaattagatcttgggtatgtgtataattaaagtgatattcataaaaatactgtaccttcttggcttgtggagacgtcaagatcggaggagggatggaatttccggtgacggagatcgaggcgactgaggagagagctcaaggcgaatatcttagggaggctgatgattggtgaagaggaagagtgtttggttcttgatgatctctgttttgaagctaaaacaagaagcctctcgttcaaacagagaggacaaactccaacatactcttcttttggatggaaataacagtatggtgagctatcatctttgtacatatccatcttcacttccgaagagagctgaaaagagagaaggagaagagggagagagggagatatataagatatgtaacaaagagatgggcttaggtctgaaatagaagctttgtaatatatatatcgaatatctttgtatatattacatattgtttttaagtaattttaacaaaaaaagaattcctagtagataagccttttagttgccggaaaaaaaaaagagagaaaaaaagacaagccttttatttttattttgtcaacaagacaagccttttagttatgattaattatggcgacttaagggatatgacatgattttaattaatatctaatccacaatcctttaaaagctcattttaattaatagattttgtttacatcattgttttcagataatgacataatctagaaaattagtgtatatagtataatagtatataccctagatttagagtttaagttttatgtgtgaagtctaagtatagaacagatctcgaacttactactgttatcatggcctacgagtattcgagatatcataaataaaagtatttataaaaaaaaaattaaaatagtttataaattgttgatcgtcagacaaatacttacatagtttacattgttaattaaccaattcaacgtagcatgttctggtcgtcttactagatatagactcgaacagatagttagagaaggatgattgatcgcttgtggatccgtggcatgtgtaatagatattatttaaaactagtaatcagattttaaaaaaaatactgtgaacagagaatctatatttgtttgttaagaaaaaatcaaattagtttttggacgtgttggccgagaaacatccacttgtagcattcgtaattaaaaagagaatgtatccgaatataagggacccattaatacaagtcatcttcctttggtatgtatgtgtgagtgagtgattttggaggtctctctccatattcgacaatatattcaattctatctcctcactttcacttcaagtttatttctttctaacaacttgatcgaaatttcggcgtatagttgtttacatttagaaacaattgtcaaaatatttaaatcaaatcctcaaactttttgtttttagaaactcaattttcatttgaacttagaattcatcatgtcgacgttcagttcaaaccaacattttttgataattaatgaatagactcatgcatgtgttagtacaaatgattttagttttcattatatttccgtgtgagaattattatgtttcttcataactttaaatggctctcacatccatcacatgggcaattctccattatcaagactatatcgcttcataagcaattctttcttctttgggcgaaacaaaagatcagatttagcttcgggtttgatgaaacttctccctatttgctaatcatctcgaaaattgctcaaattaagtcttctatttgtcttcacaaatttcaaatcacgtgcttataatccaaatgggaattgaataagtaagtaaataaatcatgattaaagcttaggagctagattgacctagtttataaaagttggggtctggatgtgaacataaaaggggtccattttatttgttggtcaaaaactttgagcgttcacgtgatcttaaaaaataaaaagaagaagacaggcttcaatatcaagagctaaagacccaaacacttagagagacattgacaggtgatttgttatgtgtagtgatgagtttcaatgtatcatcactttttcaattagaccaccatcccacatacttcctctacactatatactactactcacaatgatcaaagcttttagtgtatgacttgattaaataacaaatgcttttcaaaccaatttggaccggttccgtcggacgggtccgaacatgacaaattgaagaaaatcacattttaaacaaacttttgtcgctgttcatatatgctgattttattcaaaataagagataagagataattaactttttatattcaaggaaattacctgtctattgatttgtggtccgaatggtttgatcaattgatcagaaagaaaatgttgtaatgttgattaaaaatagttgttttgggtcttggacttatttgacgttttgagaacattttttgctaatatgtacgattatctacaattttgtccaatatacctttttctaaacataacgttatgcctgaatatagatttcaacatattgttgcatagttaattcgataaaaaaaactcttgctcagtccacttcttgatagatcttcacatggccattattcagatccgtgtaattaattatacgatcttatcaattttgaaggaataaaaggagtcctagaaggttatctataaaagaacacacaaagaaaaaggacctttttatataagaaaaagtgaagttaagaacaaaatactaaaaagaatgatcacatgggaggaatggagaatctttgggtaggattcaagtaatgttcccattatgggattttatggtatgggtatcatatttgtgggccacttctctgttttcaatttgagtcttttaccaaaaaaaatctgtaaggtttttttgtaaagtgttttcaatttaagtatttatcatcacatggggaaagacaaggaaacaataggataagagacgacagtagcgatcaagatcctacgattatgtctcttttgagcttagagatcctgtgaccaaatttaattaactgatctggatttggtatcgttacagtattcatatccacataaccatttaatagattttaatccaatagatctatgttgctttacaaagaaatatctgtaataacatgtggttacaaaaaaaccaaaattggaatatggtatatctgtaagctatgatttgttttttcacagtaatattttgtttggacaactaaaaaagtaaagtacaactaaactctacagaatttgttggctatatacagagagaaacaaaaaacatatttaaaacaattgctaaaattgacaacattagtttcactatataaatcacctagactaacccaatattacccaccaaatcatcttcttcacaattataaacaggaaatacaaaacaagttgtaatactcatttgtattaaatcatcactagtatttacgttatgacgactcaaacatgcaatgttttcatgttcgtagctatattgacgatgatgttttctgcacacattgctcaatcaaacagtctaacaatgtgtgtgaaacattgtgcacataaccggtgtttgaaagcggcgaaaaattctactcctgaaatttgtgatgaaacttgcaagaaaatctgcaacaatcaactattcggtggtaaaaaatttattgtacctcctcctaagggaagctcccacttctgtagatggttgcctcagttttgttaattccacgaaaaaaatttcgatgttttattttttgcatgactattttttttgtaaaactttatgcatgactaagttattaatttgtatctacttaattcatcgtccttattaaacaagcgtttatgtgaacaaaaacatttaccctaaaaaaatatttcgatttaactaaactaggtcaactcaaatatatacataaccattggttattagatcttttgagtcttctccaaagacttaataaccatttgtcgcgataacatcgatacatcaagaataaaaatgtgacttgaaatcatcatcaaacaactattacaaaacttattaacaaacaaaacttttattaaaaaaaaaaaaaaaaagaacaactgcaattcaataacacagtatacaatcaaacaatctatcagcaaacagtttggttcgcttagacgcaaaccggtcggttatcgtttggtttcgaagtgaaccgtaaaaaacaaatcaagttgaattaataatgtttagttccttcttctcgtcttccgtcggagttatatctctccgcctctgtctccgtcgagactctgaagtctatatctctctatcactcatcttctccgacgcctctcgttcatccaaaaagctttcctatctgtagatttttcaatccctttttttagcgattcagatctttagattatttttttcccgatcgatttcattgagcatactctgttttcatctcacctgttcaatggaatcaagactccgaatttatctaaagagtcttgatatagtcacttttgtatagttttgtttcaatttcttagattatcaaagtttcaaaaatcgcttttttagatcgaaacattgctctgattgtttctctatattaatgcatcattgtgtgtgtttaacttctctttagaaagaggtctcattgatggaagaagacgaaagacgcgacattgttatgtcaagagcttcttcttgtatgcagtggagtcagtggcaattacttgattcaattttaccaacaggaggatttgctcattcgtttggtctcgaagcagctattcagactcggttagtttcgtctcctgaagatttagaaactcacatcattcatgtgttggataacacagctagcttattgcttccttttgtctactctgctctcaaatctcctgatatagagacatggcataaacttgatggaatacttaacgctactttaactaaccaagtttcttcaaaggcgtcaatgtcacaaggatcagctttgtttcgtatagctgcttcggtttttactgaggtaccaaatcttaagatgattcgtgatgcttctttggggtcaaaaaatgtatgtttccaccatgcaccgatattcgggcttgtatgtggtttactcggcatggattccgagacttctcagagagcgtatctgtttgtaacgctcagagatgttctttctgctgcaacgagattgaacatagttggaccgatgggtgcttcggtgatgcagcatcgcattgccattgttactgaaaccgttttagagaagtggatgaatcgtgaagctggtgaagcatgtcagacttctcctttgctggatgttgtgcaaggttgtcacggttacttgttttctagactgttttgctcttgatgaaaacatatgatataacctcacttaggttacatcgattagtgcatattgttaattgtttgtagtttatgtgcttattgttaatttttcagttggatcatatatgtgtatttgtagacaaatctgtttttatttcgttattactaatcaacaatatatatgtgacctagaatccataaggaaatatgaaatgtgtttcagaaagtcattgcaatcgtctatcaaaacctctcacttccttcactcagaggaccgggtgtcgtggtgtggtggccagtggccctgccgcagagaagagcgttcttcgggatcaagtactcatctctgagggaagtggagggtgtgtaaacacgcatgtaaaactgttgtcccaggtattgtctttcccataactctgatcttaggttccacattcctacattgtccagtgatacgtatatggcagtccatgatcttggatacacctgcacaaattcatccaatgatccaccttttttataacccatactgagcttttatggctaactgtgtgatcaaaatatataaggctttagaggactctcacctgaacagtgcaccgtgagactgcgtcgtttagattgtagacttttctactggcagcactccacttcccaagttccatcctaattgttaccaagtgatcatcagtcaatagtcttgaaaatgtacacaactttcgattttcttaagaactctatcttggtttagagaatgctaccaaattttaccgtgtggatgcaaatatgattgtttaacttacccaaccacgaagaaagagtaaccgtcgaggtgccaggtctggacaatatcttcccaattctcgaaaacaatctccacaaaagctttgtaatcagtttgcataacagatgtgacagggtatattgctccatgtgtgggctgatcaggtatgcttccagggttgtatacaccggcaattttgaagtagtccgctagtttcaaaggtgtgtctgttgggtagaatgatgcactattcaccgcgtatcgttgcttgccattgatatttccagcagagctagcaagtttgattgttcgagtgacttttatcttgccatagtggtatgtaccttgtgggtttggcctaggtccactcgctgcaaggttggtcctataagacacaaacaaacccgctcaaacacggttgtataccactaagtaactaacaaagattgtaattgtcaatgaaagaatgaaacaatacaaaaaaaaaaaaaaaaaaaaaaaaaatgaaacaatacttgatggctcgtgcttggtcaaaagaccagcgcaactgaattggtgcttctggaataggtccagaaacaggtccagcagaattactgtaatgaagaacaccagcggtaataaggatcttcgaggtaaacctactagagaccacaatgtaataatcttttgcaggctggtcagctgttataaggaccgagtaagattgaccgacgtgaacatcaagcgaagagaatggagtctgaatagtgtgtgtcccttcgacctcaactaacttcatcttgtggttttggattcggaagttgagagagttttgcaatccaacatttgatatcctcagtctataagtcttacctacagaaaaactcacatcataacttattaacacttacagtcagagaatcaccaataaacaagacaagaaaggtgaaaaagcaaaacctggttcaatgttgagggtggcgccactaccgcgcccattgatgagaattccatccgggaatggaagctttccaccattatcgagttgtgctctcaagtcctataaggagagattacaatttttaattccaaaattccaacaagcaacaacgtttaagtacagatatacatcatgcatgcagctttccaaatttgttaaaaacacaaacactttgtcccattctctaagtctaacccgacaacaaaatataatcattttatcgccctactatttctttccccttttcttgcgccatacgtaagaggggaatcgtaccttatggttggttttgtaccagtcaccgatgagaacggtgtaatcaccagcgggggctgggaatggaacggggattctggggcggctggagatacgaatagctccaaatccaccggcggctttgtgaaagccgagagaggggaagtagtagaaacttccaatctgatctttaacctgaagagcgtaggtgtagtttttccccggcgggattggacacgtcgtcccgtacactccgtcctggtatgaattcctccagtttcgaatcccgctcctttacaaaaagacatcaaataggaacaatgagtcctctgctaagaatttcatgtataaacgccatgcaaatatatacaccgtctaaatttaaattgaagcattatatatatgatcccaaatttttggttgttatctattacggaacgatttataccatatagatgcaactgacatatatatctaatatatgaatttgaacacataaataaactaaagttatgtgtctttttcttacagccttaactctaagcaagagattacaaaagaaaactagacattcgtttttttgtataaggaaaaggaaacatatataccatgatataaggaaaggttcgtcgagatggttgaatacgttaatgatgagattatcattggtaacagcggcgatgtccggtcctgggaacttcccattgatcaatataccctagtagataaaacggtaaacaaacttaaatccaattaacaaaccaacaaataatttggtgtggatacggttaaagataaatcacctgttgtgcaaccttgagcggagatatgttaccataagttacgtgccattcgaagaatttatacggatcttccgcagcgacgaagctgattagaaaaaatagaccaagtatcatcgccgtggtgttcacgcttttgacctccattttttatgtttgacgaagaggatgtgacaacgtttatatatgtgttgtgtcatgtttgggagaaaaaaatattaatggaaatgcaaagttgaataacatgttcaaagatgcagtcaaacaattttcgttttcttcacacctatattttgttgacttgaaaaatctttgaacatacaatatcataagaagttagttcccaaagtaatactctcaaagacaaacgaaaatccaaaagatactggattttagaagtaatactctcactaggtttcagaattcaccaagtcgtaatattgactaaaaatagtaaaatactaactattcagagacgaagccttttgttcctaacaatttgatactacgcaggataaaagcctacaccgtacagctctttcaagactttcttaaacatgaatcccaaaataaaaatatataaaaaatataaacttagcaaatcattacaagtctatcaatatattccattccactcatatcgctcatctgtggctgctgctggccctgccacacagaagagcgttcttagggatcaagtattcatctctgagagaagtagaggttgtgtaaacacgcatgtagaactgttgtcccaagtattgtctttcccatatctctgatctcatattccacattcctacattgtccagtgctatgtatatggcagtccatgatctcggatacacctacacgaattcgtccaatgaagtacgttttacataaaactagactgaacttttatggccaagtactgatcaaaattaaagtttaaagaacccacacctgaatagtgcaccgtaagattgcgtcgtttagattgtagacttttctactggcaggactccacttcccaagttccattctgatagttagacaaggtgcacacggttggtataacggtcatttaatcaacatctaaaaaatgtacataactttcggttttcctaagaacactttattggttagattgattaccgtgtggattgttattaacaatgcaaacataaatgtttaaggttcaagaatataagtgctaagagaagaaaagacaaaatttggataatatttcttaacttacccaacaacgtagaaagagtaaccgtcgaggtgccagctctggacaatatcttccgaattctcgaaaataacttccacaaaggctctgaaatcagcttgcattacagatgtggtagggaatattgctccatttgtgggctggtcagatatacttccaggcttgtatacaccgtcaattttgaagtaatccactagtttcaaaggggtgtctgctgggtaaaatgatgcactgttcacggcgtatcgttgcttgccttcaatatgtccaagattgttagcaagtctgatcgttcgggtgatgtttatcacaccatagcggtatgaaccttgtgggtttggccttggtccgcttgctgtaaggttggtcctacaagatcatatccatgaaacaaacatgtttgcaccatgaagtgagcaaaccaacaacaagtgaaactacaaagcttttgcttttgatgtaagcctagagcgcaaaaattcaaaaatatcatctatactagtaaatgaactgcttcgaaccccataacttttaagatcttgaaatagttttctccaaccactagcactgatgaaatgcaaatatatatacaaaagtggtaattgtcactaaattgaagaataaaacaatacctgatagctcgagcttggttaaaagaccagcttaacttaattggtccatctggaataggtccagaaacaggtgcaacagaattactgtaatgaagaactccagtagtagtgagtatctttgatgtaaacctactagagacgacaacgtaataatcttttgcaggctgatcggctgttataaggaccgagtaagattgaccaacgtgaacatcaagcgaagagaaaagattctgaatagtgtatctcccttcgacctcaaccaacttcatcgtatggttttggattcggaagttgagggagttctgtaatccaacatttgatatcctcagtctataagtcttacctacagaaaaaatcacgtaataaacttataaatttattctttcaccaaggaccaaacgtggcatgcaaaggggaagggtaatacctggttcaatgttgagagtggcgccactactacgaccatttatgagaattccatctggtaaaggaagttttccaccattatcgagttgtgccttcaagtcctacaaggagagtttacaaagattaatcaaataaaagagtcaacgttacatacttacatacatcatgattcatgcatgattgcctatttgttcaaaatacgaacactttgtctcattctccaaagtcaataatcattttgtcttgttatgtgagatgtaggagaatattaataccttgtggttggttttgtaccagtcgcctactaggagagtgtaatcatcggccggagtggggaaggggacggggatcaatgcacggctggagatacggatacctccgaatccgccggcagctttgtgaaatcctagagaggggaagtagtagaaacttccgatctgatctttaacctgaagagcgtaagtgtagttcttccccggtgggattgggcacatcgttccgtagactccatcctggaacgaatttttccaatttcgaatcccgttccttttcaaagacaaaaaacgagaattgagttacatgtgctaaaaatgtcaaacacatctaatctgattagcaagtaaaccaatctattttattttattttgctaaaaaactaattttataattgtagtattaatgatccaaatttagcgtttaatctgatttcagattggatttagtttgtctttagagtttttaaaattataggtattaacattttaatccaaatctataatgaaacggtttaaattaggttttataatatctttttttttcttatccttatcggtttgatccgtattcggttctaatctttgggtttagataataattaacactgtttggcaggagttttccacaagtcgaccacgaataaattacgggaaaaatgtcgtaaaagtcccaacaacgaagttgttccaaaggcaatcgaagtaagagggagacgagtttaagaagaaaatgaaacagctttttaactttgcatacaaacaaattgaacggtatatcgaaattgtaattgtgtacctttttttatgagagccttaaactttttctccaacaagttttatgtgattgattatcaatttgtcatataatctcacgtccaaaagaaattcccgaaggaaaaggagacataccaagacaaaaggaaaggttcgtcgagatggttgaatacgttaatgatgagattgtcattggtaatagagatgatgtctggtcctggaaacttcccgttaatcaatataccctacttgaaagaagaagggtaagcaaacttaaattgaattaacaaaaccaaacatttggcgaagttcaggttaaagacttaaagatatataaagcgtacctgttgcgcaacaccaagaggagatatgttgccataggttacgtgccattcgaagaatctgtatggatcttcagcgaaggcgaggctgattagaaacaatagagtggttatcatcgccctagtgttcatgcttttgaccttcattttatgattgacaacgaggacatgaaacgttcatatatgtgtgtgctgtgggagaaaaatattgatggattgttttccaaatcggcatgcaaaccgaaataatatgttaagatttggctaattatatgcatataaaacaattttctttttcgaatatgaaactataatatttttgaactattttttttattggtttcaaagaaacaaatctaaatattacgaatattacaatataataggttaactttcccaaaatgataatttcagatctatcgaaatggacacatatcataatgagaatcccaaagatactaattatcagaagtcaatttgaaaaagaaaaacaaatcttctaatttctaggaaactagctacatttcattatacctaatagttcatcattttcaaattatatgtttataaaattttcagacaatataaaatagttacattttctgttttactttttattaatatattcaataatttttattcgtcaagatattaaaacagagactagaatttttaccaaacatctacattgaaaaacataaacaaaacttattatgaaacaaatttaaagttataaacccccaataaaactgtaacaatatcgtttaagaaaataatcgttaaatatataatgttaatgtggtttagtcaggcattatattttaaataatttgtgtaggtaattttgattaggtatttgaatttaatagttttatggaagaaaactggagttgttaaagaaatatgaattttaatttttaaataaagactttcagattggactaatatcattctatttatcattttggacattaaattcttcagtttattgtatgatagctagatacgatttgaccctctccacgtagaaattcactctttccatttttttttttcttttacctcaagttccaccaccgtattgtatcgagccatcaattgaaaggtatgcattctttaccatgtgcacattaccattttcgtaacaaaaacgtggttacgaatttaaagaagaaaatgccactaagatacttgttgtactggctaatatttttaatatgagctattaatgttactatatttatgcatagcaaatagttgtttagatgaccaaaacagtataacacatttataagttgtccagaaatcaatcgatatatttgccaaagaaaaagagacgaaaaaaagttgacctcctaatagttagttacttctaaaatcagctaaaactatatttactatataaatcatccacatcaaccaacattctcaccaaatcatctcgtttcaccaaaaacattacaatttaagatttgcagactcacaatacttacgacatggcagttcaagtgtcaaagaaaatttgtcgtgtattgatgattgtaattttatttgcaatgatgttttcagctcattccaactcgatagatgtgtgtgtcaaaaattgtgtcgtgaaccagtgcatgaaagcatcaaagaaagcgactccagctatatgtgacaacccttgcaagattatatgtgatcctctcaacaacgagcgatacatcgtccctcgaggtaatggtggtcctataaaaaggttctgcagagcatttagctggatttgtagcgcgtaattgatcgacattacaaaaattgtctcctttctttatgcatatattatatatttatgtttttttgtatcattgtattgatccatatttcaagtacttatgtatccttcttccataattttattatacctaatactccctcattttcaaattatatttgtttaaagtttttcagacaaattaaaataattacaattaatttctgtttttctttttattaatatgctatgattttttattcgtgaagacattaaaaaaaactaaatttttaaccaaacatctacattgaaaaacataaccaaaacttattatgaaacaaattttaagttataaacgccaataaagttgaaacaatatagtttaaaaataaaataactaaaatatatgatgttaatgtgatttagttaggcattaagtttccataatttgtatagctaattttttttgaacataatgttaaattatattcaaaaatatatatatatatatatatatatatatatatcatgtttacaacaagtgcaactgttttagaaagaaagctgagaatatagagttgtaaaaaagaattatgtaggcatttgaatttaataattttatggaaaaaactgaagatgttaaacaaatatggattttatttttaaaataaatactttcaatcaaattatattagtcttgaatttatagattttatgaaaaaaaagtttattgtgttttcatggaggaaaatgacgataaagacaatatgaaagaaaattatgtttacaaatgtacatatttacctgggaggagtcatattaaatgatctaatccgccttagtgtattgtatgtatctagaacctcttacttattcataaacaaaagtacatattttccttacgttttcttataaacaaatgtacataatttcctacttatatatatatatatatgtattcaactcaaaaattatagacaaaacaaaaggattacgtattctttttgttcctgatgaatctttcaccatatttaagaaaaactataggtttgaaagaaagaatgtaccccgatgatcgccaaaatatttaaatcacatgaaaaataacaatgtgatttagttaggcattgagtttttaggatacttttggtggaattgttatttttcatttttaaaaaaggaaagatttttagtgtccaatgataaattcaatgatcttaaaaaattatgtacagtgaaaggtaatcattccttgttaacggtatgtattctttaccatgtcatgtgcatattacgattttcgtaacaaaaacgtggtcacgaattttaagaagaaaatgccactaagatatgtgttgtacaggctaatattttaaatatgagcaattagtgttactatatttatgcatagcatgcaaatagttgtttagatgaccaaaacagtataatacatataagttgtccagaaatcaatcgatatatttgccaagaaaaagaaacgaaaacaagttgacctcctaatagttagttacttctaaaatcagctaaaactatttttactatataatcaacacaacattctcaccaaatcatcttgtttcaaaaccacaacaaaaagaaaaaagaaagaaaaaaaacattacaatttaagattttcagactcacaatacttacgacatggcaactcaagtgtcaaagaaaatctgcagtgtattgatgattgtaattttatttgcaatgatgttttcagctcattccaactcgatagatgtgtgtgtcaaaaattgtgtcgtgaaccagtgcatgaaagcatcaaagaaagcgactccagccatatgtgccaacccttgcaagattatatgtgatcctctcaacaacgagcgatacatcgtccctcgaggtaatggtggtcctataaaaaggttctgcagagcatttagctggatttgtaccgcttaattgatccacattacaaaaaatttgtctcctttctctatgcataagttatatatttatgattttttgtatcaatgtatcgatcaatatttcaagtatttatgtatccttcttccataattttttatctttaacaatatttacttgtatacggaaaatttgttaaaaatctaattatttatatttatatatgtaacaactgaaaattggtaacttgtataagcataatttatgctgcataaacatatttgcatttaactacacggaaacttactaaagagaaaaagagaattctcgcatataaaacagaaccgttactctgtttctcttggcgctttaattagggtttcttatttagcttttgcattgccacattcctaaaggtttcatcttttggatccttctctgactcacttcttaaaacccatcaatggaggaaggaagtctgtggcgtcaatggactatgttcagatctctgttatcgattcttcaatggtggggttttaacgttactgttatcatcatgaacaaatggatctttcaggtttaaaaagtctcttacttttatcattaaagacttagcctttcgtttgttttatctgatctgcgtttgaaatttggtacctttccttgtttgcagaaactggatttcaagtttccattatcagtttcatgtgttcatttcatatgttcgtcgattggagcatacattgtgattaaagtcttaaagcttaaacctttgattgtggttgatccagaagataggtggaggaggatttttccaatgtcatttgtgttctgtatcaacattgtgttggggaatattagtcttagatacattcctgtctcttttatgcagactatcaaatctttaactcctgcaacaacaggtttagggtttttttaagattgagaatttttcaaaataaagtgatttttttttattgttctgattggtttttgtgtaatggttttttgagtgcagttgtgttacagtggttggtatggaggaaatattttgattggcgtatttgggcgtcattggtgcctattgttggagggattcttcttacttctattacagaacttagctttaatgtgtttggattctgtgctgctttgtttggatgtttagctacctctacaaagaccattcttgcagaatctcttcttcatggatacaaatttgacaggtcaatgttctgtttcctgaggttttgatcttcagtttcacatgataggtgttgaatgtgtgaaacttacatttggtttcaatgacatgccatgctctcatagtccaatacttgatttgctttttcatatttcatggaactgagtgtttgtgtcctcctcattttcatgtctctctatgtagcataaacacggtatactatatggcgcctttcgcgaccatgattctcgggttacctgcatttttactagaaaggaatggaattttggattggtttgaagcacatccatctccatggtcggctctcataattcttttcaactcaggtgttctagctttctgtcttaacttctccatcttctatgtcattcaatccacaacagcagtcacattcaatgtagctggaaaccttaaggtaaatgaacaaatcccaaaccacataacattaatctttatattctagtttcaataactcagatgtttgatggatggtatgtgatttgcaggttgcagtagctgtgtttgtttcatggatgatatttcgaaacccgatatcaccgatgaatgctgttggctgcggaatcacacttgtgggctgcaccttttacggatatgtaagacacatgctttctcagcaacaacccggaactcctaggactcctcgtaccccaaggaacaagatggaactgatccctcttgttaatgataaactcgagagtaaaatttgaatatcatcggtaagtcactagactattgaacgcacacaaagaagttagatttgatcttgaacatccacaagagagttatagtttaactatatgtttatttttactcaaactagagaagttagagaagtgccattttatttgtttccattgtattaaattatctatcctcatcaaaccaactcagagatgaccacaaagatacttaaagcaggcccatttttgtattcaattatggtagtgctttcacttacctcagctttttaatttttccttccaattttgtttgtgccatagtgccatgttctaacatcagagacttaatacatgacaaaatggtgcaagtttgggaatctttgaaagaagatgaaaatagaaagttaatttgacaatatataagaaatgattattcattttcccgccttgatacatgaaagagcttaagacggtgtttaagggaaacgaatattttagctctcaaaacagctcatcaaattcgttgctttagcttctcaaaagtaaaaaatgggctttttcaagtgggcctcaacttatgttgctgaatttaccgccatatccttcccttacaaaaaatcaattttcaaaaaatcttcatgctacagtagtctgaaaccaggtcaaaggagttaaagagaaaagggcaaaacagtcaaacagcataaaaagatgtctgtgtcttggagatcgcaaagctaccgttttctgttcactctgtacaacacacttgtctccttcttcctctcttctcttctctctctccatttcaaaaagggtgaaacttttcttctctttctagaagaagaaaaccagagatacagagagattctctctctaccaaacccctggaaaaatctccagattcatcttccatagaccaaactaaactctgttcactgtactctctgtcattgtcctgtaagagaaattgaaaaccctaggagattttgaatttcgtaaaaccctaaacacaaaaatgaaaatcccagaaaaacccatcttcttaatcttcgtctctttgatcctagcttcgagcttaaccttcacagcgacagcgaaatcaacaatcgagccttgctcaagcaacgacacttgcaacgctttactcggctacacactctacaccgacctcaaagtctcagaagtcgcatctctcttccaagtagacccaatctctatccttttagctaacgccatcgatatctcttacccagacgtcgaaaaccatatccttccttcgaagctcttcctcaaaatcccaatcacttgctcctgcgtcgacggaatcagaaaatctgtctctacccattacaaaacccgaccttctgacaatctaggatcgattgctgactctgtttacggaggcttggtctctgctgagcagatccaggaagctaactcggtgaatgacccgtcgctgcttgatgttgggactagtcttgttatccccttgccttgtgcttgtttcaatggcaccgacaattctttgccggctgtttatttgtcgtatgttgtgaaggagattgatacattggtcggaatcgcgaggaggtattcgactactattactgatttgatgaatgtgaatgctatgggagctcctgatgttagttctggagatattctcgctgttcctttgtcaggtcaggtctacacaatctttaaaagttgtatcttcagatgtttgtataatgggaagtagtttctattgttagttgttggttgccaaattgggatttttggtgtagctttgtggacttttgattgtttctttcattgctggttgattgttttctgggttttgaatctcattaaggtattgtttttggcattgaatgagtttgagctaccaaaagtttccctctttgtggtatttttttggctgagtttacttttggtaagggagcaattacagattattaatgtttggttctgtatctttaccttctctcagcttgtgcttcaaagttccccagatacgcttcggatttcggattgattgttccaaatggtagctatgctctagctgcaggtcactgtgtgcaatgcagctgtgcgcttgggagccgcaagtaattatatctaagctttattatttgatatgactaatcaaattcatctctgattgcattttgactcacttgtgttgtgtgtgggtgatgtgatgcagtttgtattgtgagcctgcttccctagccgtctcttgctcaagtatgcagtgtagaaacagcaacctcatgctcggtaacatcacggtgcagcagactagcgctggctgtaatgttacaacttgtgattacaacggtatagccaacggcactatcttaaccatgtaagtagaaatacattcactttgtcttctcctcttatcaacatacccctactaatgattcgaaactatttccttctctttcgttttataggctgaccaggtctcttcaacctcgatgtcccggtaagttctttttaaaccatgttatctttgtaagggaaatcatgtgctagaattcggtctcatgtaagtgcaatggtaaaaatgcaggacctcaacaatttgcgccgcttctagctccaccagatactgttcctagggatgtaatgtatgcaccagcaccttcaccagattttgatggtccaggatccatagcatcttcaccaagatcatctatgcttcctggtggtggtatcttgccaggtaatcccgctaatggtccagccggtagcatctcaaccgcctctgcctcctcagttagctacttctttatcacatttctcatctccattgcttctttttcccttgctttgtcatcttgattcaacaacaattgtttattttccgcgcattaaaaactcctatgtgaaattcttgatgagtagaaccaaaacattgttattgatctctttgataatttttgaagttgcatatctcacaaaaacttctagttaaaactacaagatgattgaatcatctcatcatattacatctgatgtgccaaaatctttctgtaaccttggaaagcaaaaaacataaacttaatatacagagaaagaaagacagatttgtgtcttcctccgtcaacagtacataagcatcctcaaatctcaacttgagtagtagtagtagcctttgcctcttgaccttcctttgatttcatctccagttctgcggctaagcctttaccggtatctaccggtttaaccggacttttaatcggaagtcctttgcaatcttcgtcatcatccgtcattcttttgtctttgcctttaccccatacaacagtgtataggcccacgattataaatagcgttccaatcacactgaaaattttagcagataaaattaagtaatagggtccaaaaattttagcagataaaattaagtaaaagagaattataagtaatatgcgattataaaattaagtaatagcagataaaattttagcagctgcattgcacacagtgacctccaaggagtggtggttaccgaagattctttagtcttgcttatctcgaaacctctttcatggagcatttcaccacaagctcgtatgcgttgttagttgcgcgagccgtctatgaccaccgcttggtagaggatttcgcggagctcatctccatggtcgaatccactatggctccaaaagacttttcaaacactacaagattctctattttgagtatctctttggaaaactcatggaacctttatcctacttgtatttgtattatctcatttccaacttgtatgaacctacctcttttgaggctttaagttaatgcaaagtttgtttgacaaaaaaaaaaaagggtccaaaaattttatactaattttagataacaagaataaataccttccgagatgaatgctttcagacaagacaacaacaccaagagcagcagttataacgacacaaagtggattaaatgtcgcaacaaaaactggtcctctttctctcattactactccttgcacgtaatacgccactcccgaacaaatcaccccctaatcaccattagttttgttcattaattaattaatactttgaattatcatcattaatcatataaaattaaatttagttaattgtacttacggagtaagcagcggcgaagagattagagtcgaagccgattttccaagcactcaagtcacgtaccgttaccaatgaaacagcggttccttctaacgttcccattaaacatattaacgtcgttaatgacagctcagctgggtactgcttcagtgtaaacgactgcgttttacataagaagacaaaaccggttaggttttttcttacaaaaggttagttatatgagaaccggaaattgtaaattgattggtactcacttgtaggatgaagaaaccggcccaaccaaaagttcttcccaacagcataagtgttcccggaatccagtgtttgtccatcgctgccgctcctgcaccaccgtgggatcctcctgcaccatcactacctcctcctcctccaccgccgaatcggataaagtcaactattggacccttgtagagagtcatgagaagtgctccggagactgtgatcaccgttcctacaactttggctatgcttcgtaccttcttaaagttcacgctttctaacctgaaatttatattaaaaacccaaaatcgttaattactgtattaaatttacatgtgcatgaacaaatagtaatgttctatagattccatatagacttataatgacatcttaagtaagtggaagtgatgatctcacccagtatattctttcagtgtgtgtataagttaattatttaattagtggtatcatgttccatgaaacatactaactgtgtcgtatgattctattaatcttgttcccacggtttgggaaaagtcaaaaaatattctcaagataagaatcaaagtataatttttttgcataattatcaaacagtaaaacatatattagtagtttcattgattaagttaacaatactaatttaattttctgatggaatcaatataaagcttagagcaaaatcttttttttttcataaagaaaagcataaaatgtttgatgaatttatttataagaataagaaataacttaaacctgaaaataatggccaagacgaaggtgatggccggaaggacattagcagtagcagaagcgaaagttgctgacgtgtaagtcatcccgacgtagtagaggttctgatcaagcaccggcctgtcattttatcgaccctcattaattacttttttaagaaaaactattactactaaaatcttttttattactactaacatattcattaagaacatgttcttatagtttttgtttgtgagtgatatatgagaatagttaacgagtattactcaataaaaccgagcagcgcaatttggaggaatattcggaacgtcatcttgggccttattttcctgcataattaacaataacacaattacttacgttgattaactaagcgcatgtaatctgtagcttgatctatatatgaataacctagctacagtcaatcatgtattttatttctcttgggttttacgttaaacagcaatctatatgagacacacacaaaacaacaaaagcttgtactttcatatatgtatcaggctggttatatgtgttataaatcgagatggataagcaccaacttttagtgatcattaatgaaaaccatacctttcatggaaaagagcaaatggagcgatgacggcagtggcaattgcatggcgataaacggctaggacgtaatggttcatgccatgcttaagagagaccatggtgattatgtacataccggcataaccaaactgcatagatatcattgctaagtatggtttcaaactattcattaaccctctccccattttatctctttctctttctctctaaatttctctttcttggtatttgatgtattcaaatgtacttaattagttatgactgtgaatgattactacaagagagtacttgcttatatagccaaattgtgctgacacaaaaagcaatatatgcgagtgcacatttcaatccattggctatttaagcatcacttttaaaaatataggtttttaattgttgtcaagcacgtatccattatgtgtggctaactatggtcttgttctaggtaatcaaaactggattagatcgtaatttccttggttatattacatacctacttaattaatttatatattggactattggttgtgaacacttgcgtatgtaaaataatgtcgcattttttggattatatattttgcttattaagatggctagattattaatctacgatcactaatgagaatgttctcgtcaatgtggtattaatatattgataacgaatcaaaatgtatcgtaccaataaagagtatataaatgaaatgtaccaatatatatcaaattattatatagacctgtacgtccaagccgaaccatgtatatccgaaaggttttttttttttgtcataagtatatccgaaagttataaccaaatagtttcgaagaatcaaaaagcatgcacttacattatctatttgtatatgtacaatccactcaagacgtcatccatttttttatccactcatcacacttgtcgaatctacaaaaggagaactaattagtatcaacctgaatattcacgatcgaaactattcacctctttgttatctatatgtaatttgttttgttaaaaaattggtatactatatgtgtatatacataaaacattacaaaaaaaaaaaaaaaaaattatgcaccttttatattcatatgagtaatgtacgtgggtgataattatcctttttgcagcatcaacaagttttaaccatgaatatatgttaatctatatatgtgcaaaaaatcacaataaataagtacttgaattgacgggacacatgactctttctttttcaaatagtttattaacatttgccgggacttacgaaatcatttgatgcgcggccgtatgtgaatgatccattgtgtcgtgtagataatggacccaaaaatattgaattttaggcgatgagaaagctgatttaataaatatagtgtataagcgaatgatggttaagtttagtgcatattcttattcatcttgtcgcggaaaatagataggggacattgtggtgatttaaagagtggacaccatctcgtccaaagatttatcaatttctaaacaaatcaataggctaatttcaagttagttcgtaccatatttagagacgaagtagtacttaaaagtggagtgcacaggtgagtataacgtaaccaataagatcacaaagactgtcaataacaatcgatttttttatttgatttggccgaaaaaatgtctttgtaaaacagtttggatgatttcactgattaatttagctggctgttttaattttaattttttttgctatttccctttgaaaaatggtgtgtggaaaattaatgaatatcataagctgaaagaagccgattcttttttaacattgtgtattgatatttcacaaaacaaactgagaacccgaaaatacattttcatttttatcaaatgtatatacattatacattttcatctggatctgtatgacattattttaatttattttttcataatttatgtcatttgtatgctaataactgaatttcgagaatcttaatcttaaattcaaaaaactttgatacttacattttaactattcctacctaccactagtttattaaacaacaaattaattttcctttaactaaaacaaagtaatttccattatcatgttatttaataatacattataacaaaccaccgtcaaaaattctcattgttttccaataattctttgtctgattttaatgttaattactagttactatgtacaacgaaactatattgtattgatttcaagcgacgaagtaaggcacacaaacttatatcaagtagtaaacattcctaattagactatctcatgacaaaatgatgtttgcgaaattttaacattaaaccaaaaaaaaatgatgtttgcataattcatattaactggtaggagtaaactgaaccacgttttgtacggtagtcaagactactttaaacaattatcataagaaaaagaaagaaaaaaaccctaaatttatgaaacaaaaagcaaattaaatgtgatttttgtaatacatttttgttgtgattcgtcccatgaaacgacaagcgtggttaggtccttctaatgcgacgcggctactagtgcttcgtttcgtcatcagtaaggctgcctacttttgttgttccgtttttatattcatattaaattaaagatttgtagatcgtttttaagattggtttcttctatgttcctagaaatattataaacaaacatatacttatgcaaacaaaaaaaaaaacgttagtaatctatataattcagacatcagttttttcctacatgggagatagaaaaaaaaaactcaacttataaccgtcaatctgataatttttgagcaattttatccaacaagtcatcagtaattatctaaaatctttaagtcagttatcaattctgctcacttatcaaccaaaatgcgtatgagtgcttggttaagtttgagattagttcacatatacatatatatgacaaattagtatatatatatatatatatatatatagaagaagaaaaaatgaagaaagaaacacaacgtataaaggtactacattatatgttctcttgtttagcctaattaagcatggcatcaatcttccacgttactggatgctgcttcttattatgttccctctcaatcgacgaaattttattcgaacatatcttacctatcgttggatgcgacttatgattacacctaaatatatatatatacgggcatcgactagcatttcacatttattctatagtttgattttgcatgcatgtgcgttttaccatttcaggagtttatataatgatgtacctttttcaatttttgtggagaaatatcacacattgaaaatatggaagaaacttgagtagtatgtaaagcacatgacgttgaacctcatagaacttaacaattctcatagcttccggcctagatttaaacccttcaaaaattttcttgtacaacaaaacttctactaatatatatcctttaggaatgaaaaaataattaatgagaattgaaaaggatacgtacttgcaaaatttccatattcttttcataattttttcttgcagaattaagtaaaatccttgcataatttgttctgttcttattatttacttgcatatatttgaaatggttatattcttttccaaataatattttgcaagaatataaccctgtccaaagatgatttctctaagttaaactccaagcctgaaacatgttaactaaccagacatagaagcttccgagtcatcaaaaaagataagagcatcatcaacaaaaataaattatgcaagtatgagaactaaaaatatacgctttgaaatatatgcaagtaaagaataagaaaataacaaattatgcaaggatttttcttgctatgaaaattggaaaggaggtatagagactaattactttagtaattcattaatttctgcgaatctttagatacttaattcacacgctttgtgagtttgcgtcacaaacaacgatgacgtggtatgaaacgcattaccagccaattggatttttgttcttttccattgggagtggaatcttataagatagtattaacagtttaacataatcagagaacgagtaacttacatttctacggggtttaaagttatattaaacattctaagctagaatatttatctttataaataaattttgatgatgcattgcatctatcctctgttgttagacttggggagcttgccatgtacgtacgtagttgatcaaacacttcagaacatttctcaccatcaagcctaacctcacgccacatgaatatgtcagactttttttgttttagatgtgtctcgtttcaatcttgaatgctatggtttttattttttttcatttctgataattttttcgttatttttttaaaaagtagcatgtattttgttgattcgttcgcttgatgataaattttactttgccaaaaattaataatgcataggcgtagaaggaaaaatcaatgtaaaaagagattacaaaaaaaaaaaagagtgaatgtaaaattatatttacaaaaaaaaaatcttcttccgatgaatgcattattctttcaaaagtttttagaaaaagaaatagagattatgaaacagaattaagcttgtgattctaactatatccgaaggccatcgtctccatatgattgcggggctgtgttcacaagtgacagaatttcatatgatggaggtggaaagtggttcgcagacctctttttggcatgatagatggtgcgggcttggtcgacttcatgaggttattggagagaggggttttattgatatatgaatctcaaaagagacacaatgtaccgtgggaacaagtgagaaagtgattaatggtaatggtaatggtaagtgtgaggttcgtacgatgacgtacgagagaagtaagagattaagcaaaagtgaaaggactttagttggattcatgcttggacttccatcttccataacttgggctaatggattacacctcttcatttttaaaaactaatattcatattccaacttttattatttctcctcgcattaactttacatatttgtgctattaaagtgagatccattgtataggtaagcacgatgacgatatcagcaaaacaacagtagaattacgattcagaaagagagaaaaacatcaaaaatataaatattttaccgtaactaggcaatttaaaattcacttataaatgttttggacaaaatgttgtcaataaactagtggagaatgcttagatgacctaaccaaatgtatttggttcttcttccattatgaatacacacacatattataatatgttggatctgatgtctaactgttcccacacatgatagaaaaggacataacatacaataagcttgtctacatgataaatcagatttgtcttctttgcaagaattacgccacgcaattttagtttactttaatcttgatttattagcaccattaatcataaataaacatgttaactaacattcatatttctgataacaaaattaccccaaaatgcctgtgaaagaaagaacttttggtacattgtcacattacctgtatttttttttttaactccaaaagagatcaatcaaaacacaaaagtgactgtgcacaaactcaatgatctctaactatcgacagtagtaaagtttcacagaaaatataaatgaaaacgcgttcttcgattttttaaccaattcaactctacaatcttgagcttatccctcttttcaaggtagggatgtgtgatgttactaatatatagtaagagtatccttcaggccaagtttctagataagtttcttcttgtggaaatacctcttcagatacagtatctgtgaacccacaaccacaacgcaaaccccgagtgacattatactgaaccaagccactcttgagttggttgtttcactcacttctcgcatctccgcttccctgcatccaaagttttcgttttatcactatgttcttgtttcccgaagttcaatagataccacttaatcgcagcaaggcgaaagaaacacacctgtcttttatatagtttaagttctcacgaatcgacagcaccaacccttcaagtctcctcaactgaagctcaacaccctgcagatacacattcacaagagttgagttttcacatcagagagggaaagatgtttacatagaagtgaaaagaagacttgcctcgatcttttcctttttagcaacagagtcccagtctttagctgcaatacccatcttccaatcaaccccaagggttataggattggctaagtgatgactggaatcaatccagaaacaagccaagtagttcccagcttcttgagttgtgaatgcaaactgaccatgtgttacattttcttggtgatgaagattgttcccatacggagatgttacctatccaaaccaaatcacagaaaattcaagacaccatacaaaaatcttatgacaatgattagctttaagaacatccaaaccaaatctgcaaatataaagccacattaacatgcaacaacaaatctgcatctttaaaaaatttcaaaactttatacatatcaatgaatatgatccgtaacaagtcaccgacagagaattcacagtttgatgattaaaccacataacaaaaccattaaaaccctaaaaatcgaagtaaagacgcgcaaaattgaaccaatcaatctcctacaaaagattcaattttgaagcgattcaattccaagcacaataggaaccttaccttagaagaaacagcaggtgtattttcaggattatgctcatcgacgacatagtaatcagccaaaacgacgacgttgctctgtatctcctcggagacacacttcgttccacccgtcgtcggaatcgtcaaccatatagcttcgccgtaattaaccgtcagaaagaacaagactaccgtcagaaacagagaaccatgagcaattctgttaatagccatcggagaacaacgatggtcttcttctcctttttttttttttggtctcaagtccaagccaaggaaggtcaaagtccaaaaaaaccaaacacaaacgaagacaagagagactccacgcgcgcgtgtgagagtgtgggaggttttaagagcattttgatgggtttcggtgacttgtttcaacgtaagatgagccaatcagattctgaggaattgtctacgtggcgtgtcttttaaggaggtggcgcgtcattatgttgacctttacctgcttaatgatttagagggttccgtttaccatttttgttattttcctctcaaagtggattttgcatttaattttaccatcgtctatagtttgtagagtgaagaatttgagccaaagattacaacttacaagtataaacattgaatgagaaattattgaaccaagaggcttattgaattgaaaacaaattattgggtttattttgttttgttatcatttaaatcacaaattgtgtataacaataccctgctattagataaatcatttcataaaacacatttttgtgttatactaagttagtctacaactttatataacatttttgtggcatattaatagatgaattaatatttgctgatttttgtaaatgcaaacataaaacaaaagaaggaattaaaatatttcgtattgaaataaatgggcccccattacaaaatgactttcaaatgggccaacgagtatttatatggctgatgatatataatctttgggcttgttatttgtcatcttcccataaggaattgttacctttacttcttttcttttttgttttccttttgatagatctttacttgtttcttctgctccctcctgtttgtataactaactatttacagagaattttgttaaatacttcgagaacatgcaaagagaagatgtatatatatatttctgctagagtgaacaaatatgtgatcggggtttatagcttagtcatttttcgtctcatagtcatatataaatctaattcataaaaatattgtgaattatgtaaacggaaaataaattatatatgaatttataaaccaaaacaaatatgtatggggtctatcatattttatgtccccacatcatttttaacattttcaaaaccgactaaatcatagatctgtgagatatacaaaagaaaaggatttggtggttgaacctagttcactggatccattatacatggttgaaccttcaacgtacatctttaatgaaaaaaaatatgaaaaacaaaaaacattcaacgtatactatttcatcttcctcgaaatttccttgccatgcgctgtagtattgtaatcctccaaatttgttacgataaatagtacaccaataataaatgttgaaactattgaggttgagattgtatcgtggtgatattgttgagtcatttgttgggaactggtacggagagagtacggtaccaccaattaatacatacagtttattggattttccatttatcaagaaagatccattttgttttaatttttgtttgtttgtttgtttgttaaagcaaatatgtttgtactgcaatgtttgtttacttgccttagcctttactttaggcttgcatgtctgaatatgtctattcatgtgtaagtgaaacatcttgacaatcctaaaacctatcgtaaaatataatgaacatggtcaatccactcgacatcaattagtcataaaagcctataaaattgatgcatttctagtttagtgtatcattttcaaaattcaaaagaggagattacattcgagtaagtgtcaaatatgaaataagctacgtgttaaaactcaaaagttaaaattgaaagaagccacgatcgagatgcttcttctcgtcatgcaaacgcatgttttggctggaaagctgacaaaatccgcccatattctttctcgctctctttatcgaactgacatcttggagagttttgcttaagaccaaagtgtgaaatctaaagacgaagacaacaaattaaagtaccatatcccatgattaatcttaagctttgtgagaaagtcaaggctgtccacaaagaacatgtcatctcccatcttttcttacatacgatcatgtgctcgttgcgtgtcctaaagttttatatgctttatttatttatttttatattttccccctttttcaattgtttatactttatatcaatctttagcatatgttcgtataaattatgttggtatatattaaagttacgtaagacaaaatttattagaattcgaaatcctaactcgacaaaacgagttaaattgagctttatttgattttctatattctaaaatagaatgactcaaagacaaattgtgtatatatgtatatatataattttaataacacaagttgtatgtggagaaaacgatgtaattataaatttggatcatattttcgatatagtatgaatttttttttaattttttttaaagattacaaaatttaggaagataaatacacgagtgagtctgacgagagaaaacgcggtttggatttgggtagcaaaagagacagagtgagaacagctgtaatttgaagtcactcatcaatttagcatcatcaccttctcccacactcttctgacttcactcttcgctattttcatttactatttcctattgacattttcttcgtaagtattccatattactaacaaaattcatgttgtttaatgatgtaagaaaacaagatgctaaaaggcgatatcgttcttcttgaatagcatttgtatgtattatgtaacatgttacgttatggtgtataattaaagattaccaaatgattataatactatcaaacgtatttatactaattactgttttgtacgacatctccattttgttaacgcgtaagttactcacaattcacaaagcgatgagccacgatgttaaaatgttaaattcaatagcaagttgtcatatagctaggtttaaaaccagatttttctttagactttgatgatacacgtaacaaatctaataaaaagattagatggatcaatattctagtaataaaaaatattacaagtaataacattttcgtgcacgtatgtttgcaggttttacagtcactttttcataaaaatatataaacatgatacagtatatatatatttggtgtataactacaaatatacacactagtttaatcggtaaagaataaacatagacaaccaataattaaaccataaatggggccactttcttggaaagttcgtattacgagttaacgcgttaaaacgcagctgtaattcgtaatctcctgatagtgatgataggtacgtatatagtcaatatataaaagaaaattgatatctcacaacctaaaaaaatactataggatattttagcatcactcctcgatttgctcatcaactggcgtccgtgtgtataatatatatactctcctggttaattaattcctagcaaaattgactccaatcggtaatttattttagtttgatagtttagttcactcggtttatattttggacaaattctagaaagaatctaacacgttaataaacttggagagaataaatctaattgtaaaatggacccttgtgaaattaatgttttttgtcatttaaattgtagaataaaaaaatatacatttttctttgtaacaagaacatgcaattgataaaaatttacgtgatcgcataattaattgttgttttgtggttcctcaataaaaaaagccaatcaaaatcattatacgtttatgtatttttcctctaaataccaagaatattagttatacatgatttattttttataagaaaatgcaaaaatagcaaaaggttaagatgaggccatgttcaggttcattgttcgaacttcgaacaattgggcaaagccttaacatgcatccatattcgaataaataactaagctccaaagatttatgttcactagtttctttttttttctttttttaatttgaatggaacaaaaatgtattaatgccaattgctaggataaaggaaaaattagaagaaaaacacctgtcatgcaccacaatgtcacattcatacacaagaaaccatactatatttcatttgaccctattttagatttatatcaataaataatatttcatctcttcctctcccatacccctcccaaatcaatccatctctatatataatcttctcagctcacactaatcctcatcaaaaaatctctatccatccacaacaacaacaaaaactcaagaacaatatctccacttgatcactaccacattgtccaatcactctacaaagcctgtacgtacacaacaacattaccatggtgaaacaagaacgcaagatccaaaccagcagcacaaaaaaggaaatgcctttgtcatcatcaccatcttcttcttcttcttcatcttcttcctcgtcttcgtcttcgtgtaagaacaagaacaagaagagtaagattaagaagtacaaaggagtgaggatgagaagttggggatcatgggtctctgagattagggcaccaaatcaaaagacaaggatttggttaggttcttactcaacagctgaagcagctgctagagcttacgatgttgcactcttatgtctcaaaggccctcaagccaatctcaacttccctacttcttcttcttctcatcatcttcttgataatctcttagatgaaaatacccttttgtcccccaaatccatccaaagagtagctgctcaagctgccaactcatttaaccattttgcccctacttcatcagccgtctcgtcaccgtccgatcatgatcatcaccatgatgatgggatgcaatctttgatgggatcttttgtggacaatcatgtgtctttgatggattcaacatcttcatggtatgatgatcataatgggatgttcttgtttgataatggagctccattcaattactctcctcaactaaactcgacgacgatgctcgatgaatacttctacgaagatgctgacattccgctttggagtttcaattaatccgacggtccataatacatactttaattagttttctaaatcattttttaaattcttttttatatatgtaacatatatttaccctcgtcgtaattattcatttccaagttgtttgttgcttggagagaattgacgacggatacgattatataatataattgtaagtttttatatgtagcaaactcggtacaattcggatttaatagggatctaggaagttcacatgaacaagcgactcttttttttgtcacttctttgactttttcatgtgaggtttcttttcatcaattttttttaacaatgtgtgaaaatatttctgtattgtaatgatatatttcgcacaatagttttgtgaaataaatctggcgctatatatgattttgtatcattttctccaactcgtttacttgtatatatgtgccaagttgctaccaatatgtgatgattttgcaatccaacacattatctttgttttttattcttattttggtaagtagtaaagccgatgatgtatataattgacaatcatttttttttcactaattgacaaccatcattggttagaagttagaacacatcattgacattgacattggtaaagttcttaagatgaatatatatgtaaattaatgtataattaaatctgaactactttttcccgaggtctcttcataattcataatttgtttgattaaatactattatgtactatacttttgcacaaaaattaaagtatagtactatactcagaggaatcttactgtttcatgtgccgtggaaaagtttggtatagcaaataatgcacacattgcttggggacaaagttcatatctttgaaacttggaacttaaaaaaccatttgttttgatttaatttattttccttttttgggaaagaatcccatggagacagaactgcagtcaagggatataaataactgcaatagagttagagttatgtaggattcactaatgagtactgtaaactgatttttctattcatattcagagtactctaactcattcaaaccatgaaacttacttgaaaccatcaccaaaaggtaggagatctctagcttgctttattttgtagctttggttctatcaatagatcaatgtatacaagattgtttaacgaatatatgatttaacatgtaagagagtgaccgcaaattgtgatattagtcaaattatgttcacaaccttttacaaacagatgccatgtggaaaaagagtagaccacaaaaaaaaaattgtagtgtagatgagagatgtggttgacgtagttgattgtctaaggccatcaaaaccatatacttttgttccaccttttaactgagtgatgattagagtgcacacaaaacgttttactctgattaaaaagtacaatattgtgacttgtgagtttgtaactgtcctcttacgaccagagccatcctccactctagaagtgaaaactaataagcttgctcactcggtcaaacataattgtttcctagtgtgtgaacgtatacggttcaatgctatttgttggctggcttagatgaacttggtctaatagttaagtattgtgatcatatcctatgaatctacatcatactaacaccgcatatataaaaagaaaaaatgatgtgatcagtgatcatgtgagtaaagtatgatatattggtcttagtgtgacaaaaatcttggagacgttatcgtctgtataatagaaaacaggacatagttaaatggtttgttcacaattttgaggtcccaactaaacataagatgggaccccatacttaagaagataaagtgatttgataagacattcatatgattcatatcatatcacatcaacattaaatctgattgtgtagagtgttatagcatttcttttgtcaaagggaacatctaaacttcaatatttgggataaaaccttgaagtcacatgacatgtctcctgctcaacgctcttattttagtcgtttctatttctttagtgatttaggattcggcgtccatgggctttggttttggggccattatcgtttattttttgtctagctcattatcgattctggcccatccattgctaaataaaaaaagaacagaaaaaatcattaaaagttgctgtctgctgtaagttctttttctagaatttctttcgttgcaaatagtgaaatgcattgggcttcaaaaagaggctcggcataattcggttcatttaaggctttataaagtggattgaactctttaagttcaatttctgaatataagaagcaatggtgattgatggctacagtgaaatatgcaatttttaataagttcattggattaaaagaattttagtagacgatgatgtcaagttaagaaaaaaggttttagtaaataggaaaacttgtaatggattttcttccttcttctaagtggtagattccaaactgacaacctattgatccccaaaaattttgtggaagagtcttgtttgctcgccaaaaaaaaaagccctaataatctcccttgacaaaatgtgtggaagaatctatatatttttgatatagatttactcatttacaagccaaatgaaaaaaaaaaaagtttacaataaaaatgaataattatgggcatgctttagataataatataagattaaatagaagtcaatatagtccacaagattaggtttagttacttttttgcaccactgccaaaaagttgtatccgatcgtgtccttgcacgacatatattttctacttgtacttatcttgactctgaaaattgaaaaatattggcggcggtgacagagttatcatttacttgtcatgttggataaaagaatccaattactactagcattttaattttatcataggcccagataacataagttttggtcgctttcaaatatcagtagcctaccaaacatgtgacgccaagctttacaggccaaacactttcttctgtttcttgtatcggagaagagaagagagacttttgtagcaaagaattgtttgctagtaaactttttctatacatgtataattgagttaagagttaaggtcatatgtgctttgtcttttagtctttttcccaatcccatatggccatatatacaattatgtacctcaagaaagttttctttataagatttaaaataaaggtatctctacaatctctttaacatgtgtgatcggatgttaaatcataatgttaaataaaactgtaaacgtttggctgaaaaaagaaagtttaattatcctagttaaggaaatatgtattgtttgcaataatttctcctagttagcattctaaatgtggatgtagtaataaaaacttaattaggtacaaattatgttgaaaaagtcattttaaaacaattacacttttaatcataaaggtaaacacttacagtttgttagtatagttgttgaagactatattggaacccacaatatatgtggagaaagatggttgattaaattgtaagctaacgattgtattattaacattctactttgaaaatgccatgggaagattagccaaccaattgggcaattggcaatggcccatagccaattgacaaactccaaatttaaggacatcaaattgaaaaggcaacttcaatttatttcattttagtaatgcaagttgtaattatgttgtctgcttgcatgtttgtagtaacctgcttaaagttatgagatcaatgctccaatataaaaataaaagaacgaaagagataaatttcaatattatttgtaagcgttatgattgcatatttgcattggagacgtttaattgtccgttcattcttttgaattcaaatagtggaaagttcaagcacttaggaaaatatcaggtattattgtatactagtattaatttgtgtcaacataatattaataacattaacatggaggattaattatatttttgttaatcactcccgcatgattttttagtgatgtagcctaagatcatctccaatcctattctttttttttactctaaattctcttatagaataatattttctccaaccttattctatatgttactccaaaatataataaatgataggattattctaaatatatagcaattctgtttgttttttacactaactctattttaaaagtaagaaataaagaaatacattagaaaggatatttttgagttacactatttttgagtcaaaaatagaaaaatacactggagatgatcaagattataagtttgttgccccaaaaaaatagatcatttctattaatttgtcttaacatgcaaagtcgattattttttactttctatctcatttctcctcacaaatattagcatatatgttcccaagagtctccaactttttttctttctccaacgttaatatattcaccaagctcaactcatatttatttttacccaaaaaaaggggaaaaaatcacatttacgtatagtaatgtatcttcttgtactctaccagttaatctactcgaatatattttgatgactaatcctaaaaacataagagcaacttggaagacgtacattgaccaaggtattattaaattttgtcagcaaatggcacccccattggaccaacaatttcagcaatccccgcattcgtttaatttagttttgtaaaaataagtcttaaactaaatatatatatatacacaacaattaatttcaaatatattttaaaacgaagaagacgtaacaatgattattcgagtttattatgcaactatgtacatttaaatatatttcgcaatcaaagaggcagagacatgcatgccgaaacaagcattcctcttctgacttccctcgtccacaatttttttttttttaatactaaggtgttacattatctatatcctaattaatactagcaaataattaatggtataggtcaatgttttgattaaagaaacattagggtctaattctatagatcaattattgaccattcgaggaattaaattatattccgtgcatttatatttgttagaagtaaactaaattttcttgttttcatttttagtaagaaaatcttagtcctagtttcagttttgtctcaaaagctttagtcgtatagttagaagttcaatcttataaaaaaaaacaattatatatgatatagttaaagttcaatatttatcgaaagaataagtataatagatgcattgagataattgagggcacagtactttatattttatgggaaatctgtaaaccagtaattctcttctgcaggataattaatttgtggagtggttagacttccaagtttgaaagtcaacactttagtcaaagtgctgtcagaaaaaattacatgcgggctgtaagaaataatatacttacaaggatacagaaattgtaagataaaatattttgaaaatactacataatttcaataaaattttatccataatttcagtaaaattttatgagtaaatttttagaaacaaataataatatatgtttaaatatagcataaacatatgaattcttataaatgttattgaaattgtaaatattgaatattaaacatgaaaaagttaagtcaactgaaagataataacctttgttgaattatttttgctacaggttacgtctagtggtttatttgaaggtaattacttttttcgtaccgaatatatcttctcaactcaacccactcggatgctacgttgcactatatgtactagtgttgtattttctattttaaacgttttggaataagcttaaaaacagcatcgtattgaaaatattatcaaaacactttattttagtttacaatatatgaattccgtgattatttttgggaaatatattagaaattttgctctaattttaagctttgttttggattatattgatgggaagggagaccaatccagcaagaaaccatgtgataagtggcgtatagtttataaaaatataagaaaacgaaaggataaggaaatatataaaatttgatctaaatcccaaatgatatcctccatagatggtgatcgatagagacacatgggcttcttcaaacatttcttttatgcgacgaaacatgtatgcatcggatgtgttcctgtcgtaaccaaacaattttatttttgtagttaaataaatatgattgattgagttttaaaaatcttatccatattccatattaagaaaactgagtaacacattgctgtcacctagaattcaaaatttgaagtaacaaatagaaaatgatttcaaatttgccttttctagtgaaccaattcaaaacgaaacatagagatcgacgcccattcggaaactcgagtgttttgatacctaaaattactaaaactatatagattacatttcttttgttcttaaactatatagattacatattgtttgaaaagtcataaaacatccacaaaattatgtcagcttctgatatattcaaacaaaacatagcaaaaagtttatatttccaaactgaatacagtttcatgtaaataaataaactgctaactctgataagattattgatgttgcaaaagaattggaacatctagacaaaataacaagaatttcgctaaatagttctttaaaatccagaataaaaaatagaattattgtatctaaaaacaattagcagagaccataaataagttgcattaatgcaattgatattttctggatcacgacattggatgtttgtttaaaacaataattttgggaaatcacaatggttatagcgccgaacaaagaatcttcttcatgcttctcccaaattttttgtttttcttgggcaaccaaaactactatagtattacgaataaacaatttgccattttattgtttaataactaaagggaatcgatattgtcagtgatccagatcaagaatcataatatcaatcaaaatcacttgttcccaaagattcgatcaaaaccaaaataagctccatttcaagccgttgattttacaacaaaaacaaagcttcttcttcaactatttacagttttgttacattagtaaaaagatcgaaaattaactctctgttacaaacctctgaaacaaactttcgattcagggttacagagaaaccggtaaaaaaaaagattttttacattttccttttttcaactttgacaaaatttaccatccatttgattctgaacggctctcacagcagccactcttgcagccgtagcagccttattagctgcagccacagctcggctcacctgctcatctactcgtctccgattcactgccttattcgctgtttctcgagccgcctgcaatattttcaagttgaagttttccactttttggcaattccaattccaacaactcgagtttaaacaaatattacctgaacagctcttgaaactggctcactcgtaagaggaagtgaagtcacaagaacccctgaatcccattcaccagatttagcatcaccatttctaaacgagtaagcaccaaacccttgcttacgaccttcatgccatgctccttcataacagtgtccattagcaaatcgatacacaccaaacccatgaatcttgtctccaaagtactctcctgcatacttatctccatttctgacacaaacacaacacacgcaaaatcagactatataatagaaaacaacttttaaaatcatgattcaagacagatacatacctgaaatggtaagaaccaagaccatgcttaacaccaaatctagactcaccaaggtaagagctaccatcagaacaagattgaacaccaaaaccatggctttgaccattaaaccactcaccagcataacaatcaccagtgtagaatctataaacaccaaaaccatgtctaagaccttgcctatattgacctttatatctacttcctctagcccaactctcaatcccatgaccatcatatctcccatctagccaatctccttcataacgtcctctcacgaaatagtaatacacaccacttccgttacacttccctttgttaaattcaccttcgtagaaatctccattactgtagaattgaactccttctttaacgaatctcttgattaccttcttctccggttttgaatcgtctccgatgtaccattgtaccggttttgatttcgagtctctgttttggaaccctaagtttttgattgcgattacggtttggtttagtagagagatgttcttggaagcgaagaagagagctacagcgacgaagattaaagctagtaaaagattctccgatgtgagaatctcatcggtttgtgagaagacgacgaagaagaagaacgatgagagacttaggaaagagagagataccattgtgaaagctaaaccgggattgattctggttaaaccggttttaggatttggtgaaccgaatggtttaggtggttttcttctctgtttctcttctttctctccggcttctagatcttgctcgccttcgacgattgaagataagctttgatatgacgaacggagattcgacgatgaccggagtaacgacgactgtgtcctcgttagcttcgcctgtttttccatttcttcgtaacgataaaaaaacgaaaacagtttcttcgatcacggaggtgagattccggtcataaccaatttctccggcgagagtacactaaccgctgcttcaccaccgtaactagcatcacgcacgacttcgacaaagagagagagagagacagagagagatttgtgatattagtgtaacagtgacttttcgctttcttcgttaatttcccggtaccggagaaagtttaacggcgaagctcacttaaagagagagagaagagagaaataggagaagagaaattagaccgggtttgggtttaatttaaagagagaaagagataaaattagatttaataaagaccgttggattaaaatctgacggttgattaagtgaagagaagaaggagagccgttggatggagaggaagagaggggtcaccggtgatgacgggaatatattggtcgacggatccaaacatgaacggttttttagctttactgtttgtaaagctggcacgtgccactacattacacagtcacagataaatattcatttacgtttttagccttttttgtgggacaatgacataagtcttttttttttttttcttattactaaattgatttacagaaaacaataaaatctctgcattttggcagagtttctatttatttttgtctctcaatattaaactgatttggacatcaaaagaaatttacaaatttgtttttttcacataagatttttttcttattcaaatcggatgaggtttatctaaattaaacattatttataaacaaagattatgccaccctatgccagcatcacatttcagattttgattagaataacttagaaataaattatattttccaaacttaatttttcttattttgtttaatttaaatttaatttagtttccatgagagaattgtttttttttttgagaaaatttatcaaataccatttttgtttaatctctttcaaaatatcattaacctaaacatcttaagattagtataacttaaccggaagatttatgtataacttaatttttcaattctattttactccaaattaaggctaatcttgctaaaaatacttggctaacaaaaaatcttactaaaaatattgggaaatggcaaaaataccactaattgcttccttgtcgtttttcgaaaattccattatttttaatagtgattgaccaatttacgttgtgataaaaattaattaaataaatcattaaaaagtaatactaaccttaagatgttttgttagccaagtactttagaaagattagccttaatttggagtaaaaaaatttgaaaaattaagttatacatgaatcttccggttaaaataaaattatataaagtcattgatctaaaatttaaagtattcatagtatgacatacgtaaacatcattcgtatgccagctttctactattcatggatatagtaataacttgtgtgtatcaacattcaacaacaacgttaaattcattttcttttttggtaagaaatctggtgggtgatctgccagcaatattgttgaaaccgattaattactatacatggaatttgttttcatttttcaaacaaaatatttatggccaagaaactaaataaaaagagagaggttggatctaaatcaaatcgtgaacaacccatttaaccaaacatccacgtttggtgcagccgatgttattagcctccgagattagtcatatttcaaacaacatcacttaaccaaaaactactttacactgttacatataaatcgttgtatggttttgatataacagccttttgtcttactagtcaaatcatacaaaaatggtatagtttctgtgatataatttccacttgataatttttaattagagactactttattgctaacaacgttggattataaaatggattaaaagggtattatcatctaagcaaacatctctttcaatgagatctaaagtcaaagtctgtttcattcacatccatttaactttcggcttttgataaggctggctaatggtaacagagtcatgcgtgggcattttagtcgttaccttcgaaattatcacacatccgaaaagtcatttctttaattaacttgtcaaattgtaatctattaaatatacaacaaatgatttttctttttactatatagtctatagtacataacattgatagaaaaggtaaaaatcaaactaactgataatttgaagtagaaagaacctatgagactcaacacttttcgacgattataggtaagtgaaatagataaaaacaagtgtggttaattgtagtatatgtataagcgatgtggattaatgttgaagatacaatttagataaatgttgctaactttaagaaatttataagtgaatgaaatgattcgtatgatatttaaaacaaaaatcttattcgggttgagtacattacgtggatatatatgattgataacgtattttattcgtggactttttttctattattatgtaagttgtcatttgatcacatcttacgcagcatgtacagtaaaattattagaggtttaatcatggaagagtacatgaagcacactcattatgttatgtagtgtacttcttccattacactcacgtataaataacatacagtagttattatatcctgaatcctccacgcgaacataggaccaacaagaaaagcagaacaacgcttttgagactgaatttagtagactaattcggcccaattcaatcaaagcccagtcacttagattaaggttgtttcttagtctcccaaattttttaatttcaacattcaagagccaagcttgatcaagctttgtattttttcggttttggtatttttttcttatcgaaataatatttgtttgttttttgtttgttactgagtatcattttctgatcgacgtaatttaaataataaattaattaattgatttttagaagttataacaatgaggaggttaatttgtttcttgtttctttgttttgaggtaaatcaatcaaataatattggacaacttatctctgttatattgttttggtcttccaacaagtattatctatgaatcagcaatggttaattgttataatattcaatctgtagcttatacaaacgtacataactaaatatcacttttttttttacctagtaaccatattatatgttgttacttgttctatacaaaatctgtttttaacaaaagtatgcaatatctctaaaaatatttgtcgcttatatgtaaaatagtacctcacatgaaaagtaataactaagtgctaaaagactttattccatggtttagtatctagttttgatcgcaaatgaggagaacacaatgtcagcatatacctttattttaagcttattaagaaaagagtatgatcatattaaggaaagagtatgatcatatcacatatgattactcaaatcccatatatcactctaatatacatttattatattattctatgtaatccttttaactatgctctttgattatgttttgtgcttatatataagttgtatccttttattcaataagataacacaatacagttaatcattctctatttacatagtagcagagcgggttttaatcatgagtttcgatctaacgatcatactatttccttaataaagctagtttctaatcttttcaagtttcaacccaaatagttttggttgtttgaactgttttaatatgacatataccacaacaggaaaataaaaaacgcaaccaaagtcattgcaatttaatgaacggatgggattaattagaaaagaaaaattctaattttgtaattattaactcttgtgcaaatgctaaaataactctcaaaaaagattgttcttcatttttgttgctcttcgatgccaccaaagcgtctcatatcaattggtctcattggatcgaacctgaatacttcagaaatttcaatttgagaaaacacattttatcttcataaagatttttgatgtaattttggtgaaatttgatgaactcgcaattagacgtaaattaggaaatttttgatgtaaaaaatcttaattgatttgattgatgcacagcttcatcgaggctagttgaagcgaagtctagactcttaaagacgttaattgcgagtcgagagaatgaatatgcataaaattaatatgaagtcgataaatagataagtaattatatctatatatatatatatatatatatatctaataatatatatttttaaaatgatttgttttaatgtaaattttcttaatcgtaaacaaatcaaacagtttttatttgcatttgtatcttatttgaatcgattgaaatggattcaaatctaggagacatagagtttttgttttcctttcttcttttttataataatgaatgtgaattaaatttacattatttaaattccttttgctggaagattaataggaaaaaaaagcgataacatccatacattacttcgagaaacttgacgtgagaacaataaacaacatcgtataagaagtggattaacatatatatggagaaccaaacaatgagatcttttgtgattataggttaaaaagaccacacactttaggaaacaacctgcaaaatttgcttgtaccaggcggcacaggcaaaaggtatctttcttgaccactttgttgttgttcagtgcaaagttttttgcaagcatcctcgcacattataggagtagcgtttttaacttctttcaagcattggtttgagacacaatgtttaatacacatatttacattattcgaatgtgagatttgtgccgaaaacatcattgcgagcaaagttgtaatgatcagaagatcgcatgttttcttcaaactttgagctgccataatgtatataaatgtattgatattgattagaacaaatattattagtaaacaagatgatttggtgatgaatattgggttttgtttagatgatttatatagtgaaagtaatgtttcctatttttagaagttggttttttgttattgtttctttctctagaagttacatacatctctgtgatttagtgttacgctgatccaaacaactttattgttatgaataaaacaataactatcgtttaaatgttacaaattaaactcaaattggctacgtcatagtggaacttaattcgaggttcaagtcgttttgaacgaaaaccatgaaattaactaaacataacttaattatatgttcttacttgttccatacaaaatctatttttaacaaaaggatgcaatgtctctaaaagtatttgtcgtttgtatgtataacagtatctctcatgaaaagtaataactaagtgctaaaagactctattgcatggtttagtatctagttttggtcgcaaatgaggagaacacaatgtcaacatatacccttatttttaagctagtttctgatattttcaagtttcaacccaattggttttcgttgtttgaactgttttaatatgacatataccgcaagagggaaataaagagcacaactaagtcattgcaatttgatgaatgaaagagattaattaaaaagaaaaattgtaattttataattactttattttggtttgtttaatttttatttttgattaagaatgtgattagctcttgtgcaaatgctaaaataactctcaaaaaagattgttcttcatttttgttgctcttcgatgccaccaaagcgtctcatatcaatggatttcattgaatcgaacctgaatactgcagacaattcaatttgagaaaacacattttatcttcataaagtttttagttgtaattttggtgaaatttgatgaactcacaatttgatgtaaactaggaaatttttgatgtaaagaatcttaattgattagattgatgcacaacttcgtcgagtctagttgaacggaataagtctagactcttaaagacgttgattgcaagttgagagaatgaatatgcataaaattaatatgaagtcggtagtagattcaaaatgatataataataataatactatgtagtttaaaaatgatttgtttaatgtaattttttttaatcgtaaacaaaccaaacggtttttatttgcatttgtattttattctatgtatttgaatctattgaaatggattcaaatctaggagataatgagtttttccttttctttttttataataatgaatgtgaattaaatttatattatttaaattccttttgctggaagattaattgaaaatacgcgacaacatccatatattacttcaagacacttgacatgagaacaataaacaacatcatataagaagtggattaacatatatatggagaaacaaacaatgagagcttttgcgattataggttaaaaagaccacacgctttaggaaacatcctgcaaaacttgcttgtaccaggtggcacaggcacaaggtatctttcttgaccactttgttgttgttcagtgcaaagttttttgcaagcatcctcgcacattataggagtagcgtttttaacttctttcaagcattggtttgagacacaatgtttaatacacatatttacattattcgaatgtgagatttgtgccgaaaacatcattgcgaacaaagttgtaatgattagaagatcgcatgttttcttcaaactttgagctgccataatgtatataaatgtagtgatattgattagaacaaatgttattagaaaacaagatgaattggtgatggatattgggttttgtttagatgatttatatagtgaagataatatttcctatttttaaaaattggtttttctgtttcttgtttctttcacgacggttaagattgcatttctgtgatttagtgttatggtaatccaaacaactttattgttatgaataaacaataataatgttacaaatccttgtaatttaaccataatcagagaacgactaaaaccgtgaaattaaccgaacagaaattaacgattggctaaacgatttcggttcggttagtttccggttaacaaaattaatccgaagtcactcctaggcctttggtcaatcttcgtttctcgtttctctgttgagtaacgacaatcgacaaaggaactttgctcaatcttcgtttcttcgttaggtaatcttcgtttctaagaattggaatgttctttttcataggattcatgatagtttttggctgcaattttgaatctttattctgactatgtgaggaatttgattttgttatcgttgtcgttgtttcgtcttaggatttgtgagaatcattgaacaatttttcaactttgacaattaataacacgagaggagcttcagatttatgtgtttgagtattcaaagatatagcttttatatttgcctttctgggtttcatggagatgaatctgtatacttatagctcattaattagtcaactctgttgttgcttctggtttgacattgtattgagtagtcaaagatttgagctttctaactccacatgaagatatagcgtgtttacatttcatttgtgaaaagtacttcagtccatttgggtttctatctggtttagaagatatttctggtgaaaactttatttgggcattgcttcttttcagtgactgatcaaagatgggaagtcaggagaatgtgaaacacctcgaggaatgcactgtttccaagttagtttcttactgcatcaataatgtttgattgtttgctaatcattagaaagagtaaggaacacatattcagtctttgtttcttcactgtgatatcgaaatttatcagtaagtcattagttatgtagccacttttagttgttttcacttgttcacaccatcatgcttttcatttggaaaaaataagtaaccttggaatataaccacggttgttgtttgatacgtcttgcttgttaaaacacttgagtgttgaaaggttcagttcctctggtgtataaagtgttttcttcttgatatcgattttttgtgatctaggatcatagttttgtcattgagtcatgaggtatgtagcccactcttagtaaatttcacttgttcataccatcatgctagccactacattgcttggcataaagaagtagccgcagtatccaacatttgtatctagtatcttctaatataaaacacagtatgattgttgttctcgaaatcaaaacatcctaaagtgaaattttcgatcttttttgtgggtgcagtgcattagggacatgggtattctcagtcctaggcgcattggttgcaatcccggtaggcatcaaacgcaagtctcttgggccactcgtgttctttggcacaaccggaacaatgctcgacatcatcattggtgtaagtcaatgcgagagagaacacgcagaacaccaaatgaagttactccaagactctcaaaatgccacaacaacaaccaccaacacagagactgaagaaagctcttccatgtcctaatcttttttacatctttctcactaagactttgatgtaatttgatgccactcacaagttaaacttgttttaagatattgtgattatcccatgtatcttgagaaaacaaagaagaaagcttttcatgattacaactgattcattgacattgtcatctccaccaagaaattgcaacacacgaagcaatagaatttaatacgataatatatctgaaactgttacgagcaatgtatatgaatcgataaatcttggactccaatatcaaatggtattcaaaaactaaaaaggttcaaagtgaaaacttttatcaacaaactcttgttcaaactaatgaaacaaagaaagattattataacgataaacgatgaatctcactaaaacgacggcgttccaagtcgaaagcagagggaatgttgaaagttaaacttgattttgaataagtttaattattggatcaattatccaataattaattatggccaaatccaagttctagagttttctctagaaatatcatcatttccacctccttaaaagattctagaaattttctagaatcatcttccacctccttaaacataaaaatctagatactctaatagaataatctagataatttgaataatgtaatctaaatcttatgtaagaactctctagacttaggattaaaatattttagatattttgtagtttggaggctataaatacctcctccccctctcaaatgttgcaatgttgtgaagttatcttcaagtttaaagcaaagtaataaaagttatatttcctaaaaaactctctcaaaacacttaaacactttctccattacctctaaaagaattttactctaacagggaagattccggcgaacacaaactcatccgacgacgaagaaccgaagataagcggagaagcagagcgaaatcgctaggcagatagaacccaacgtaagtttcatgtccgtctcttctcgtagtctacgcatcaccaccggcgcaaacgtgagtccaagcatcgataaaccgattctgataatcaccaccataaagcacatatcggccatcttgttcagctctgatgcacagtataacgccacgtgtccgttcttcgtcgtctccgttagatatgaaccgtcgaaaccagaagctcgtttgcagattccggtgaaaatggcgagcgaaactgcaagaaagaaacgatcgtttacacgacgagtttcttctcttctctcacgacctccatcttcgtcatccattgcgatctcgtagtcttgcaggagaaaatggagattttgaaacgatgattgatgaaaaaatcagaatccgggaaaaagtgagaaaatttgtctctgagaggttttggagtttgttaaagagggaaagaagaagggtttataacctaaccatggttaaaattttaaccatggaccatagtttattttttaaccttgctttttctctaaccatggtttataatccgtacgtgttgaaaaagtttcaaggagagaggtgatgactgatgatattgagtggacgaaggacttacctcttttggtcactgttaaaaattggtttcttgaattactggttacaaaatttcgttcgttgctgaaccggaaattgacaattttggttacacagaattgggaccaaaaatatctgcatggtttagtatttgatcatataactacctataaaaagactagaaatattttatattgttagataattgtgaaattttgaacaaaaaaaaatgttaagggttaaatatggtcttttttactaagttttattcatcggtttttctaaaatgttactactttgggtaaacaaaagttaaagcagttgcctgattacgacacgttgaacaatggattgatcttatgtaaatttaattgataaaaaaacagttcatgactgcattttgcagctaattccttaaacattttgagctaaaatttgaaactatcatcaagaacatgaagtaattagtcttaatccgatatcataaacggttcacacacacatcgatttctttgtaaaactaattattgtattcagggatgcgatccgaaactttaacgcatttttatctatgcaaatacagtatgaagtgataaatattgcaagttgtaactacaatatcaattaatattcagaaaatcttgtttaaaccttttattcaagaaaccaaaatgttcacaacacaaatccaaagaaataaacgaaaagcagatacagagcatccgcgatggtctcactgaacgatcacaggtccaaatattcaaacctctaatcaaagaaaccataatgttcaaaacaacaaacccatcaaagaaagaaaaaaacgaaaactagattgtagatagaaagagagatgataaatgtaagcatcgtcgatggtctcactaaaagacacaggtccatagtaacggtggaagaaactcaagacacaccactcacccggtgacggagcagcgaaggtacgctaagaaagcaatcgtgaggacgacaaaaatcaaacccacgagcagctgcacgtcacactcttctcgtacttttctcatctgttccagttccaccaccatcggagcaacaatgatcttgagaatcacaagcataaaagcaagatgcgcccacaagttgaactccatcgcccaagaatacgccacgtgtccggtcatcgtcgggtttggatctgagccagcagctgctcttttgcagactcttgtggacagttcaagcaacactgcgacgacaaaacgaccgttcaatctacgaagctcttcacgtccctgtcacgattctcttcacgtggctcaacaactccttccatggcgagagattcttgcaggagaaaagaaaaacaagattttgagacgaagattgtgaaaatgaaaacagattcgggagagaaaatctatataataagggtttttggagtttataagcataaaatgtttcttttatttaaattaaccacggttaaagtttgaccgtggaccatggttaattggttatagtaatcgtacgttttctaacgggacgtgagtcttgatgactgtgttgaaagttaaacttgattttgaatcaagtttaattattggatcaattatccaataattaattatggccaaattcaagttttagaattttctctagaaatatcatcatttccacctccttaaaagattctagaaattttgtagaatcatcttccacctccttaaacataaaaatctagatactctaatagaataatctagataatttgaataatgtaatctagatcttatataagaactctctagacttacgattaaaatattttagatattttgtagtttggaggctataaatacctcctcctcctctcaaatgttgcaatgttgtgaagttgtcttcaagtttaaagcaaagtaattaaagttctatttccaaaaaaactctctcaaaacacttaaacactttctccattacctctaaaataattttactctaacaaagtggtagcagaacttgaagatcctaaagatggcgagtaacaatgttcccttccaagtcccggtgctcacaaagagcaactatgataattggagtctacaaatgaaggctatcctaggagcacatgacgtgtgggagatagtcgagaaaggtttcattgaaccggagaatgaaggtagtctttctcaaactcaaaaggatggtttgagagactcaagaaagagagacaagaaagctctctgtctaatctatcaaggattagatgaagatacgttcgagaaggtcgttgaagctacgtcggcgaaagaagcatgggagaagcttcgaacctcttacaaaggtgtcgatcaagtcaagaaagtacgtcttcaaactctaagaggagaatttgaagcactacaaatgaaggaaggtgaactcgtctccgactacttctcaagagtgttgacggttactaataaccttaaaagaaacggagagaagctagatgatgtgagaatcatggagaaagttcttagatcattggatctaaaatttgagcatattgtcaccgtcattgaagaaacaaaagatttagaagctatgacaatagagcaacttcttgggtcattacaagcttatgaagaaaagaagaagaagaaagaagatatcgtcgaacaagtcctcaatatgcgaattacaaaagaagaaaacggccaaagttaccaaagaagaggtggtggtgaagtacgaggacgaggtcgtggtggatatggaaatggacgtggttggaggccacatgaagacaacacaaaccaaagaggtgaaaactcatcaagaggtcgtgggaaaggacacccaaaatcaagatacgataaatcaagtgtcaaatgctacaattgtgggaagtttggacattaggcttctgaatgtaaagctcctagcaacaaaaaatttgaggagaaggccaactacgttgaagaaaaaattcaagaagaagacatgttattaatggctagctacaagaaagatgaacaagaagagaatcataagtggtacctcgatagtggtgcaagtaatcacatgtgcgggagaaaaagtatgttcgcggagcttgatgaatcggtgagaggaaatgtggctttaggagatgaatcgaagatggaggtaaaaggtaaaggaaacattctcattcgattgaagaatggagatcatcaatttatatccaacgtttactatattccgagcatgaagacaaacatcttgagccttggacaactcttagagaaaggttatgatattagattaaaagataataacctttcaataagagaccaagaaagcaatctcattaccaaggtgccaatgtcgaaaaatagaatgtttgtcctcaacattcgaaatgacattgcacaatgtctcaagatgtgttacaaagaggagtcttggctatggcatcttcgattcggacatctaaattttggaggattggagttgctttcaaggaaggaaatggtgagagggctaccttgtataaatcatccaaatcaagtgtgtgaaggatgtctacttggaaagcaattcaaaatgagctttccaaaggagtcaagttcaagagctcaaaaaccgttggagctaatacataccgatgtgtgtggtccgatcaagccgaaatcacttggtaaaagtaattacttccttctctcaaatgtataactccccaggaatttcaattgcgcttatattcatcccattctaaaacaattagatgatgataaaattaacaaagattgggactcctaatcgaaaagggatatttaattaggttccataaaaaaaaaaaaaggcttgaaaaagaaccttctccactttattcttaaaaagcctcatgcttattcgaaagctttgttgtttttaggatctggatccattattcattcttgattgatgatttttcaagaaaaacatgggtatattttttgaaagaaaaatccgaggtgttcaaaattttcaaaaagtttaaagcccatgttgagaaggagagtggtcttgtgatcaaaaccatgagatccgaccgtggaggagaatttacatccaaggagtttcttaagtattgtgaagacaacggcattcgaagacaattaacggtgccaagatcccctcaacaaaatggtgtagcagaaagaaagaatagaacaattcttgagatggcaaggagcatgctcaaaagtaagagactaccaaaagagttgtgggcggaagcggtcgcgtgtgcggtttatctattaaatcgatctccaacaaaaagtgtctccggaaaaacaccacaagaagcttggagcggaagaaagcccggtgtttctcatttaagagtctttggaagtattgctcatgctcatgtaccggatgagaagcggagcaaactagatgacaaaagtgagaagtatatcttcattggttatgataacaactccaaaggctacaagctctataatcccgatacgaagaagacaattattagtcgaaatatagtgttcgatgaagaaggagaatgggattggaactcaaatgaagaagattataacttctttccacattttgaagaagatgagccggagccaacaagagaggagccaccaagtgaagagcctactacacgaccaacttcactaacaagttctcaaatagaagaaagttcgagtgaaaggactccgcgttttagaagtatacaagagctctatgaggtaaccgaaaatcaagaaaaccttaccttattttgtttatttgcggagtgcgaacccatggatttccaagaagccattgaaaagaagacttggagaaatgccatggatgaagagatcaaatcaatacaaaagaatgacacatgggagttaacttcacttccaaatggacacaaggcaattggcgtgaagtgggtgtataaagcaaagaaaaactctaaaggagaagtggaaagatacaaagcaagattggttgcaaaaggttatagtcaaagagccggaattgactatgacgaggtatttgctcccgttgctcgtctagaaacggttagactaatcatctcactagcggctcaaaacaagtggaagatacatcaaatggatttcaagttggccttcttaaatggagattttgaagaagaagtttacattgagcaaccacaaggctacatagtcaaaggtgaagaagacaaagtcttgaggctaaaaaaggcgctttatggattaaaacaagccccaagagcttggaatactcgaattgacaagtatttcaaggagaaagatttcatcaagtgtccatatgagcatgcactctatatcaaaattcaaaaagaagatatattgatcgcatgcttatatgtagatgatttgatattcacgggtaacaatccaagcatgttcgaagaattcaagaaagagatgacgaaggagttcgagatgacggacattggattgatgtcttactatctcggaattgaagtaaaacaagaagacaatagaatattcataactcaagaaggctatgctaaggaggtacttaagaagttcaagatggatgactcaaatcccgtttgtacaccaatggaatgcggaatcaaactatcaaagaaagaagaaggggaaggagtggatccaacaacctttaagagcttggttggaagcttgagatacttaacatgcacaaggcccgatattttatatgcggtcggagttgttagtcgttacatggagcatccaacaacaactcatttcaaagcggcaaaaaggattcttcgctatatcaaaggtaccgtaaactttggcttacattattcaactactagtgattacaagcttgttggatatagcgatagcgattggggtagagacgtagatgaccgaaagagtacaagtggttttgtgttttacattggagacacggctttcacatggatgtcgaagaaacaaccaattgtcactctatccacttgtgaagcggagtatgtagcggctacgtcatgtgtatgccatgctatttggttaagaaacctcttgaaggagttaagcttaccacaagaggaaccaacgaagatctttgtggacaacaagtcggcaatagctttggcgaagaacccggtcttccatgatcgaagtaaacacattgacacacgctatcactacattagagagtgtgttagcaaaaaggacgtgcaattggagtatgtgaagacacatgatcaagtagccgatatttttaccaagcctctcaagcgtgaagactttatcaagatgaggagtttgcttggagtagcaaaatcaagtttaagagggggtgttgaaagttaaacttgattttgaatcaagtttaattattggatcaattatccaataattaattatggccaaatccaagttctagagttttctctagaaatatcatcatttccacctccttaaaagattctagaaattttctagaatcatcttccacctccttaaacataaaaatctagatactctaataaaataatctagataatttgaataatgtaatctaaatcttatgtaagaactctctagacttaggattaaaatattttagatattttgtagtttggaggctataaatacctcctccccctctcaaatgttgcaatgttgtgaagttatcttcaagtttaaagcaaagtaataaaagttctatttccaaaaaaactctctcaaaacacttaaacactttctccattacctctaaaagaattttactctaacagactgatgatctggaaaggacctgacctctttggttacacaattttcagtcgttgctgaaccggatatcaatacttttggttagacaaattggaaaaagatatcggaatggtttagtaaatcgtttgatatagtaactatacatcacaaattcagactatatttgtaattgattttagaatattagtactcttttgtttttactgattgtcttttatcacatttctaacattgagaggtcaaataggcttcagaatttcccataatccccatttagtcatttttaccaaacaaaagttgaagcaattgcctcatctcatgacatgtggaccgaaaagtttatcggatggcttaaaaaaagacacgactattttgtcttaaacttaaaactcggtttctctatgcaagcttttaattattgggattaattctatctttaccttccaaagtgtgggatcaatcaacaatctacacaatcattttccacagtcgacgactataacgttctagcgaccaatctacgtttagttatatttacatatgtaaaatgcaaaatagctttttcactgatagttttattttgatactctgtaacataagatacttgttttcttcattttttcaaatttgatacgtgaaatatttaaggatcaagttataatgagctcgatcattaatgaaaaagataaatcttgttacgaacattcatgttatcaaatggtactcatatgttcaatgacttcaatcccaagccaaagaaacagattataagaaaagaataaaagagaagaggataatcacactaaaacgacaccgttccatagaaaaaaaaaacagaggatgattctaactccacgacgaaccagagaaaggtaacccaagaaagagagagctagagattgaaaccatcggcgatgagaacgattaacaactcacccaccagcgaagatacgccataagagagagcgagatcgttacgcaaattaaacccagcaaaagcttcatatcgcagtcttctcggaaacttcgcatacgtcgtgccaataccaccaccgatgcaaggatttgaaaaatcaccaacataaaagagaaatgagctgctttgttgaaacccgatgcccaaaagaacgctctgtgttcgttctccgtcgtctccgttcccgaatttggatctgaaccttcgaaaccagctgctcgtttgtagactccagtgaaaagatcgagcgccactgcgacgacgaaacgaacggccattcgacgaagctcttcacgtctctcacgttgctcttcatgtctctcaacagctccatcatccatggcgaccgaaattttgcaggagaaatgaagatttgagaccaaggttttgaaaaagcagagagaaaaatttgaagaggggttttggagtttgttaaaaagaggaagaagggtttaatgttaaccttaccatggtttacttttaagttttaactattaacaatggttacaataaccgtacgctttctaacggcgtcagtggtgatgatctggacaattttcaccgtgaaatacacaattttcattcgttactgaaccggaaattaatactttcggttaaaacaatttggttagtggaaattatactatgcctaattttgtttaattatgtttttactatgttcttagtcactttgtaaaaaaaaattgaggttaatgggtttcccataatccccataaaccaaacgaaaatagaagtatagttgcatttgtcttatgacacgtggaaagatagattgatcggatggcttacaataagccatgtctaaatttgtcttgttctaaagtacgtcaaacttgaaaaactggttcctgctcctgcatgcaagatttttatttttttgggatcgactaaatagtttgatttcttcattgtttcaatattttgctacattaaaataatttaaggatcaagttataaactaaacatatgattaaaacataccgagaaaaatagaaatttaacaatatgcaacctagcattttaattgataccgagaaaaatagaaatttgatattaacgagggtgtttctagatgagctcatttgctttagttaactacgagtatgattggtttattgaagttctagttacatattttatctattactttacttctgatttctgaattctgactagctttatggacaaaattgcagtttttcttaaacccatttctcaaataaaaagaaacaaaaaaaattgggacgcctcaagacgatcgcttagtacccgaaaatattaatcgttgaagttttagggtagtcgatatataaagaaaaaagtgtctactcattaaacggtccactaattgggccaaccggattagtttatacttaaaaactataattatagagtttggattttggagaataaccggtgtaaaacgctaaaacacttcaagaacccaattaaaatctaacatattaaaaagtctggttttctacttttcttagtacaatatggttttttaggagaaaatataaagtgtatatcaatttcgaaatcataaatttaataatttttgaggatttaaaatcatctcaagttctcagccaagatggggtacataaaggatttcttcctacgaaataaaggcaaataagacaaaggaaaggaaatgctaataattaacacaatggaaggaaatgctacctaggaaaaggacacaatatcaactaaataaaggtaaataaaattaaaaatgaataaggataaattcacaaattgcaattacttatatataggagtgtcaaaatgggtcaaaattcatgggtcaactcaactcaactcaactcatgaaccctaatgagttgaaaattttgactcaaatgagttgatgggtcaaatgagttgatgagtcaattggtttggtgagtcaattgagttgggttgtaatggttaatggtttcaatggtttacccaattaacccatcaaggtttgttaaattgaattaaaccaactaaaatctctaaaccgatgtcaatttaagtttaaccaacacatctaaaccaatttaataaaattattttttttccaaatttcttaaatatacaagcaatgaaattgagaaaaagtaaactcgtcattttcccgccaaaaacgtaaacccgtgattttcccgccaaaaaacataaacctgtgatttttccgcaaaaaacaaaaactcgtaattttcccgtcaaaaaacgtaaacccgtaattttcccgccaaaaacgtaaacccgtgattttcctgccaaaaacgtaaacccgtgattttcccgtcaaaatgtatataagtcatatatatgtataatccttaatacaatctagcgcctctatatataagaagacaaagaaaagaaaccctaaaccttgattcactatttttctttctctttgatagctatggaagcggaaatatcctttggcggcgaaatagacctcaaaccgaaatcacaagatgctggatcattcaaaatctgcgtaagtgcccgaagatcggacacatcaattagtcttccaccaaatttcgttctctcgtacaatgactacgaaggtgtcatatcctcctaccctaatgactcgaaaaaactgaatgattggttgtactcagcagggctctccgaacaatatgttgacattgctaactctcaactcactgaacgaatctgtaagtcgatttctatggtagactcttcagtttgtgctactttagtttacatgtactgtaaagtcattgttccacctcggattgactcgtttgatgagaccaccaataatatcgagttgattagaccggcaaataagcttgtggttgaccgtttggcaaggaaagtatataataagaagaagaaatccaactctgacgcgagcgtgtgcacaatttgtttggaggagtttgaaaagggagaaatagtggtgaccttaccatgtggccacgagtttgacgatggatgtattgggaagtggtttttgaaagaccatgtttgtccattgtgccgtttcgagttgccttgttaagagatgaactaatacttggtggacaaacaagttaaggggatcaaagaagcttaaggttttcaatattgggctacttttagaggtagtgttttcaataccgcataacaagcttgcattacgcctgttaatttaatttctttagcttaatgtgtttatcctaaagttttagatactaaatttaatttaagcatctctattttttcttttaaacagagttaactaccaaagttttcttaaaagaaaacatagcctaaaatgataaaagaaactacattttagtttaatccattgggctaaaatatttgtcacttttttagattttgagtaatttggtaacttgctttcatttttagcccttgattttcttaagattgtcgaagtatcctaaacatcaacacaaattaaagacttaaagggacttttttcattcagccataaaatttcaaaagagtctttacatagaatagacctttaagaactttaaaaagccaaacaataaccggaaattaaacttggaactagaagaaacagagcaagcatatgggtttcaatctaaccgaaagataaccacccaataaccggagatgaacttgaaccagttacagaaaaccatggctaaggtctttaactcttagtcttagtaatgatccttgaagaagtgtaggcagaaacagagagcgaccaacgttatgaatccttggaaaagacagagatggagaaaccagagagcaacgagtcaggatcaccctaatgaaactcaagcacccaaaagaaagcaaactcaaagaggatataaatcttcagaagtttgacaactcaacgaatttagattttataatcctttggcttagttgtgtaaaactcaaaaaagtcaattaaacttggttcctacaatgtttagttatcatctaactatgacagcttttgaattacaaaacctttagatcatgtaaatatataatgttgcatagagtttaatccacaaaacagtttgggttaaatcatttgcatatataaatcagtttctcataaagtattgaaatacaacacttttccttaaagaagcaacattatatagaaatgttattgataagacataaaaataaaatatctatccaaacacatgttttgaacagatataaaaatgaagaataattccatcttcacttatactgaccataatggtcaaaagccggcattccgttaatggaagacgaagagccaccaccaacactggattcatcttgacccgacgacccgttttggtagtaccgaccacctcccataaccatggattggtccaacataccataaccataaggacccggaggaggtaggccatgagatgggccgtgaaacccaataccatttcctccataggtttgtctcaacgacggtggctcacctctaagtgcagaaccacgatcggtctctatctcacggtaccggttaatgaacacggtgagggggtccacgtagttatcgaacccaagcttgctcatagcccaaaggatatcttcagcagttatggtcttacgttgctcacgttggcaacgctcgttggcttcaccggtcacgaagctgatgtactcggagacacattcttgaatcgtttctttggcgtcgtcagagattttggcgtgagacggtaaggttttacgcatgattcttatgacgtttgcgattggcatgtattggtcttgctcacgagccacacatggtggttgctgctggaccacgataccattgttcttgtcaccggcgccggctactacgactgagctggtcattggggttgggttgttgctgtgctggtccaagttcaattctgttcatagaaaatacagagagaaattgaaatctttaggaaataaaaaagattagttgaagtagaaatgatgattaaatttgtaggatacgaatggattagaagaaaacaagagaatcaagggacacgttcttagttacggaccaataagataagagtaagtttgtggggtctacattctagacttatggaccccgttgagtagactgttcagattcttgccgttacgttttacatgtataccaaaaagctttcgcttagattattaattagaaaaaccaaaaactcaaaatttggagaagaacatcaattaatttatgtagacgaaggtatgactcaataaagtagacatttatttcatgtgaaggttcccaatggtaaatgttgaaagaatcaaaagattggagttaatgacatccagtaattaaaaaatcaatagtaaaaggaaaatttggagaaaatttcacttagtttttttccaaaaaaattactgatagattttgaataaaaaaacctcacactaaaacttgggactagtataagatatatatatatatatatatagtttaaatgttaagtactaaaaaaatttgagtttctatttttttagtgtttttgaatcacatgaaccgtagatgtttttagacaagggaagagacaaacgagaatctcgttttgaaacgaagaaaaaaactcaaccgttacaacaaagaaaaaaacgtttttagaatcgaaattttttttgataaaagaaagaaaacgatactcaaaaacattcctggtacatgcacgggtatattcaatgaacacatacgagagatttgtttaactaataccacaccatggaaatatttggataaaactttgactcagccatgatgaaacaatacatatcaaactcttgcatgtatgtatataaaatcgtcttctccgggccattcccaaaaccttcacaaatctaaattaaaaatttctagaaagaaagcatttagttcgttgttgcaaagtctcataaaattcataaagcatgtctccaatttttcatgagcatataaatatacatggaggcaagtatatactgtataaaaatagccacttagattaccagagatggattttggtagctgatagtgagagaagggagctccacgttccattgtttctctgccgtctttttttttttttgttctttataaaataattatttgagtgatttgttgcatgcaaagagaggttgatggttgagtggttttatagagagatgatacaaatggcaaaggaggcggttcttacgaggtctatatctctttcccattggcttgtctcattggctatgtggccagtcaaactgctcttctctcattggttgttttttttcacaaattaccaaagtaattaagtaaaaataaagactattaagaaagaaagaaagataagaagaagatttttatacatatgaggctctctttgtttatataaattaaatgttgtttaacattttctatttatttagtcaataaagtattcgattatcgaacggctgagaaagattgacgtgacgttattttagtcatatattttattaaaatttaataaaatataggtttcactaaattctttgtttcttaattaatgaaattgaaaattagttttaaaaagattctcttacttaaaatggtaaattttggtatatttgaataaatatgcgttacgaaagtgagttatcacgtttattgtaatttttatttaaattagccttttaaagtgtttataggaaaattacaaaaggttagtacaagatattggtgttagatgatgcatgttacaattgaatattgctttacattttctaatacataattaatcaacaaataaaataaaaccaacaccctagtaatggaatggtggataaagatttttgaaagatggaaaaacatgaagaattttggatagagtttacggcccagtccatgacctgttttggatctagcccatactaaaaacaaaccaacgagaattaacaaagaaccaatattgaatctttcctggccaatgacctctcatttcaaaatgaagtttagaactaaaataatcttacgcatataagattattttagttatcatcagtatgaaatctcatggaactctgctaaaagttttttttttctttaaatgtttccattcactttgcttcccttaaagataaaccattttgaacatacatctttagcagaatctagagagattataaataaagaggccacatgcaggtggagcaagagcaaggaaaggatagctaaagagataggataatacaacaactcagttaggaggcggtgaattggtaaaagtttcattgcaattatacgctcaactttcaaataataaactagaagatttacttattctgaggttaaggaaatatgacttctggtaaaggagagtttggtgttgtctaccatgattttcaatatattgaacaagcagcccataaagttatctctcattgcagaattttttgtaagcttcttcgcatacatcatgagtagcacctttgaccatcttcaaacattggtttggaacgcaatgttttgatacaaacttctatcgtgcttgagtaagatatatactcgttctatatcttttaccatcttttcaagtagttttttcttttttcaagtataccaacttcttttttcatatatagtattctgatttctgagcaaccatttctaattaattgtagctcgtaagctctttattaaatttaactaaaaatcttagttatatcattataaataacgcatcgcatgtagatgaaagtatataaataataacttgtacacatgcacgtttgaacaatccttagaacaaccaatatatttttatctgcattacaactggcagaaaaaaagattatgatgcatctaattacttaaataaccaaactatatataataagagatggaacagtttggtagatccggcgttgaaatgacaatcccgtaggcttaatagctatatcatggccatatgttacctcaatgagaagagaagaaacatcgttacgtgaatatctgagcttctctcgtgtatccttgcttatttttcgcaaatttaatatgttcacgcaacaagcatcataatttacttcttaaatagcagacataatgattaccatttgcataaatccttatttcttccaaactaacaaccctcatcgcaatgatagtaggatcaaactatacgagcttagtagtactcatgcaatattttgaaccagtaaaacttacccttttgtggacatgcctatgagagaagagataaactaataacgtgaagacttgatcaatattcaagctagctagatggtagaaaataatgcaatcattttttattagcaaacgtttatatttctcttctcgtaaataaatctaaagaaaagttacaaaaagaaaatttataaagttgtcacgtttagtgaatgtttctactttctactctcgtagatatgtccaaagcagggtaactttcactggtagaaacatatatctactgtttccctcaaattccataacaaaattcacattattatggtgtgacgacattttgggatttcaatagtgtgaagagtagataggagtttgctcaaaatcaaccacgttgtaggacggctacctgattcaccggccatcatcgcttatcactcaccagtcttttctttgttctctcaattgaaaaaacaaaaatattcctgaggttaattttgtagatattctttatacatggctaacattaacaattttgatacgtcgcacgcgttcgttgcacgtgtgaactaggaggcgcaaacgacgaaaacgtaatgtttgacgccagctttgatagacacgtggacagttcagacgctaatgatgtggacacaatcttgatcgccgaaacacttttctacatgtggcaccgtctatgtcgtggatgcttcgtaaccaacgacattttgcggatgggccgtgacagcccaataagcatactttgtatgccagatcagctctagtggtccaactgtaaaaggagctgtttggcttcaccttacctgttcctactactctttgaggttgaaattagccaattaggtttattgataaggactcttattttatttatgatttattttctctttaacatcgtcatatagttatgggtctaatggccacgaattctaaaaacgataaataaaacaaattatgctgaatatatcaaatatatgtatatgtatttttttgcgttaacttagccaattaaacacgtaacattcgtgtttaatgtttttaatttgcctaaggcaatattttattttcgtcaaaaacaagtaaccgaagacacttgtttctttcgaaatcagtactcaataaaataaagttttgtgtaagactaattttagagattctcttagtagttgaccaaaaaaaaacaaagatgttttacatcagattcgaagtaccacagtttataagtatgccaatacgtgtgattgaatacatcaatataattagatcttatcttacatatttgtggacaattaagtcggtatttcgctaagaatgttttttttttttgcaaatcaaaatgtgtattctatgacaatataaaaatcatatacacaaataaatgatggctaggaatcgaaaaagatgtgtcctcgtgggtttttagaattgaaagcgtcaaaaaagaaacactagagctttcagatttcaagtatacagcgaagagtaatgagatgccttgaatatggaatgggaaagtatctcagtatggcgtagagtaccaacgcgttatggtgtatgaatgggaaaaaatacattcattcaaccatattttatactcctaatatttatatttattcgtatcgtgtgattttttcattaatgtggacaaaagttattgagtacttttaggttttaactggggatccacccccagcattaacgtcggcttcgagtaccgaaataaaataaacggtgtagtaatgacgaaataacataaataagtgtcgaatagctccaacacgtagaacaaacgcaagaaaacaaatgttaaatggtcagtttatgaagatataaaaacaaggagtatcaaacttgaattaaggttttaagaacattttgagtgattcaattgcttcttttatacaaaaagtttaaactcagattacgtacgcccacgttcccttgaagtatatttttaatttttcctaatgcggttgtaatatatttttataaagattttaattaaatggtgatcaaatgtgttagatactctaaccaccacagccgtggtaactaaccactgaccactcgtacgtataatacaattttagaaatatacatacttaatatgtggtgtattaggtatttttgtagcatttttttttgttaaaatgttacacgtttgaattatgaagtttacgtgcacggtcgcaactcgcaatatagtttttatgatgtttgtggttattcgaatgacaatcatgtcctactactagcacttcaaatcaaagtacacgaacctatagcctataggatgatgtatgtctatttatgcgaaaccaaactataaaaaatctcgattatttatcaaataaaatattagacctaatttacaaatggcggacaaaaactcaactttaaaatgtaaacctttggcactatcaatatcaacataaaaacgttaaaaaaataacgcaactttagaatttcatatactacttgcatcaaccatcttctgtatctatcactatccgtatgggaatataagtatcctttaaattaataaatcatcgcaagtaggaagagaatcaatactcgaaaagatataaaaaaaacccaccaagacaacgatcatctaatcacagaagagaacaaaattcttagaatcataaaagtaattaattaagtaagtcatcaaagacaatcacctggaaactcgcttcctaatcaagatttctcgataatcctctcaatcataatcatttctctactatcaataaaataagtaaacaaaggtagaccataaactaatcatttggtcttctactattaacgtatgaagtagcccatactatatcatatcgctttaaattatacaaagacaaattcgaaacaatctcgagtacgtatgtattattaattttatgtttacactacggtgtcgttttcaaatttttaataatattgtgggtttctttttcgggctggtgggctttttgtgtccgcttcccaatacttttattttataaattaaaaattaatcatcgtctctcttgtgtctctctgttcatcacttttcttcttttgatgttcttgtagcgtctgtacgaaatctcacaaggtttcttcttctcagatttagaaatacttgtgtgatatcttctgagtaaccaaattcttgataaagtttctagctttattcaaacccatttgaaaaatccggtggtgaatcgccggagaaatgtgtttttcgtttctccactgagttttttttgttaagaaatctgttaaaactctagatttcaaacgaatgacattttctgagattgaggaacattgtgaatcgaggactggagtgaagattctctgatgagtgattcagaagaagacgaagaagaagaagaagctagtgaagtcattttaagcagcgtcgttcagaagaagaagaagaagaatctgcgtttcggtgaagaagtagagagacgagacggtttggtgttgttagctcaatctactccaatggtgagatcgagatctcaaggaacgactcggcgcgtgactcccacgcctttagtagatgttgagaagccgctaccaaacggagatctttacatcggaagtttctccggtgggtttccacatggatccgggaagtatctatggaaagatgggtgcatgtacgaaggagattggaaacgagggaaagcttcagggaaaggcaaattctcatggccaagtggagctacttacgaaggtgaattcaaatctgggagaatggaaggttttggtactttcactggagctgatggagatacttatagaggaacttgggttgctgatagaaaacacggacatggacaaaagcgttatgcaaatggagatttttatgaaggtacttggagaaggaatctacaagatggtagaggtaggtatgtgtggagaaatgggaatcagtatactggagagtggcgtagtggtgtgatttctgggaaaggtttgcttgtttggcctaatgggaatcgatatgaaggtttgtgggagaatgggattcctaaagggaatggtgtgtttacttggagtgatgggagttcttgtgttggtgcttggaatgagagtaatattatgaggagtttctttaatggtgttgagaagaatgatttgattgtggggaataggaagagatcttctgttgatagtggagctgggagtttgggaggtgagaaagtttttccaagaatctgtatttgggaatctgatggtgaagctggagatatcacttgtgatattattgataatgttgaagcttccatgatttatagagataggatctctgttgatcgtgatgggtttaggcagtttaagaagaatccttgttggtttaatggtgaggctaagaaacctggacagactatttctaaagggcataagaaatatgatttgatgctgaatttgcaattaggaatcaggtaaatatctcaaatttggtggattggtgtttttgtttggtgtgtgatggctttctctgttgtttctaatgaaggttgtgtgtgattgaattaggtattctgttggcaaacatgcttcgattgttcgtgatcttaaacagactgatttcgatccaaaggagaaattttggacaaggtttccaccagaagggactaagacaacaccgccgcatcagtcagtggatttcaggtggaaggattattgccctttagtgttcaggtaactttttagcttttttatttttatgaaaagtgtttcaatttagcaaattgctgaatgcgttttaagtttgatgatgtggctatacccaaatttgggcttagttgataagattgtggacgtatttgtgatgaattgtgtttctttttgggcaaattttgtttgtagacgtctcagggagcttttccaagtggatccagctaagtatatgctagctatatgtggaaatgatgctctccgcgaactatcttcacctggaaagagtggaagctttttttacctaactcaagatgatagatttatgatcaaaacggtgaagaaatcagaagtcaaggttagtagttgttggctcttcttgtttttgacctttctcttgtcatatttgaaaatgcttgtctgttcaagttaatttacttgattagcggatgggacaccctttttgtttgtttgtttctttgctttcacattactttctcaatcataaactccactaagtctgtgattagctaaagaaatttgacctgaagtgtttgtcttcttctatccaggttcttctaagaatgcttccaagttactacaaacatgtctgccaatacgaaaactcccttgtgactagattctacggtgttcattgtgtcaaacctgttggtggccaaaaggtatgtgtttgttcatctaaagctt

SEQ ID NO: 14 - DNA, 89473 bp, Arabidopsis thaliana
ttttaacaaaaacaattttatgcgtaatctctacatatgcataattatacaattatagttgatgtagtttaaaaactacaaaacaacaacgtccattaagcagttatgagtttcgatgttaggtataaatatctttatcttataacaatatatgatagagtgtaacgtttacaaagcagacaagatagaaggaaaagcttgtgtcatttattctacgactgcttgaatatcttgtatttgtagaattgatttgtaggttctaatggatgatgtgaaacacgaatggtaaaacaaggtttttgctttagatctttggataactgggtggtattttcactacatataagacaataattcaatgcttacaatgatttattgtctaattatcttataacttagtcaaaagtttctcgctcatctacaaggaaattaaacaaatgtaattcaaaatttcaaacgattaataccatatttactcttaatgacagatttactccaattcaaaaaataataagggaaccacttaaatgcatgcttaagaaaacataaacatgtaaagaaaatgattagatcatgaaataaaaaggaaagaaagaataaaaaaaaaagaaaacagagaagaagaccgagtgttgacaaaatatcatgtcactgttattagaagcctattaaattttttatttttattaaatagaaaaacaccaaatccgagaaaaattaatataaaaaaaaacaatataaaaggtcttattcttttatttacttcattcgttaaagaatctgagagatagaaaagccagagaaatatatatagagagagatagagagagagttggcccatcggatcgaagaagaagaagaagacggcttaagctttcttcttccattgaggatttttgattcatttggcactctctcttttttttgttattatttacttgagatttttctctattgattaaaaaaaaaaaaatcagagtgaatctaggaaacacttttcttttttaatttattgttcattttttccgataatctgtctctgatttagggagattttttatctgttcaaattgcgatcagaagatgtgggtctgaggtaatatctctatcaccagatttctatatatttttattttttggatatttaattattcatttggttcgtctctcttttttatatatatagttgatttgatttgccatttctgaatttttcatggattattgtttgatgaaattaggttagtcgtttaagtcaattgatccagaatctaagctttggtttttgattttgattatgattataatttataaatgtgaatttgtgacagtgaatttattcgattcttttttttttttgtttgttaaattctcgtaaatggttttggtttttattgggattagtttgcgtgtaatctggtttatatcattgatgattcgattaagatgcagtttctctatttgcagaatcttcttcttcgcttttagatacgacaaaaatatatttatactagcagagatgatcatctcatagtttgcttttatgtgttaatgttgtttcacgttgtgtttgtggttctgtgattgtacttgtatgttatgagtttgcatatgtatcagttagtggagtgtttattcaatgagggatctcagtgaagtgtttttttggtcagtgaatcgtggagatgcaacgtatgggcggcgatattagacgtgtttcgcaatgagagatgcagcggattcgtcatcatactctggatacgagaaagatttcatgaaacatacaatgcttgagcacgaagctgttttcaagaatcaggtatcttgatgcttacattgctctctatatggtttcatttacgtgtctatatggttttgatttgttttgtattgatatgtaggtgcatgagcttcaccgtttgtatagagtacagaagaatttggttgaggaagtaaaaggaaagaacttgaatgaagttatgaacgtgagtgatcatcatacatctgaaaatgaaagtaagaggaagttacatgggtttcttttaccaaactcaacatgtggagaagggagcagcacacaagcgtccaacggtcgtttgcaaaatggtggtagttcaaatggggacgcgtccgagggtagagatgtgaaggggaggagaagaatgattgatcttcaacttccagccgatgagtatcttgatactgatgaaactactaacaccggtgagaatacaagcttccctccatacaaccagttaaaatcaggaagaggggatgcttctcatcggagctatccttcaggatcttgcttggatgtgaagaactcaaatggcttagctgacttgaatgagccactcaaagggcaagattcagaacctgctgctctgtctagggatatgtattctcattatgggagaaacaatgctcatgttcaaggtcagtggttggagaaaaatcgaactcaaaatggatggatggtccttgaagcaggtgattttttttccttaatgagtggctagttacatgctcttacatttaagtgtctttcctgctcagtatatttaatgaacgcaaaatatgtgatcgctcatagaatggttttgaattttgtgctgattcagtaatatgttaccatttctgcctatcttctatttctcaaatgttttttttgtggctgtgttaatagggcaagataggagcactcagagagatcaggtgcatctgccttctcattcaggacaagtactttctaacaatgcatttcaacctcagagctatcctacaactgatcacagcaaggtcaaattttccggggaaagagcacatcgtgagctagaagttcgctcaaagactcctcaagtttcttatgatagctacgttgaatcaagtgtggcatctactgctccaagatcagtcaatgactaccgccctgaatttttcaaaccattgacccattggtcttcatccgggaggactatgaccagctcaaatcagaaatcttatccagttcaaacgaatccctacatgaattttgacacacatgcaagaccagatttgagttttgagaatagaagccatgtctctaatgggctttatcaaggattctcttcagggtcaaagcagtctttctataatttcccatcaaccggctttaaaccaaatgcttccataggcgaggtagcgaacagccacagttttgtaaatcttcaagggccaaaaaggcaggaatgctcagctgggttgccctggctaaaacctcagcccccttacagaagtggaatgtccaatggcttctttgatctgaatgcttcgacaaatcaattcatggatggaactgacgctggggacgacttgacttgtgcttctgttctgaagggtttgcgatctgcttcatactctaataatgcaaacatgggaagagttgaaacgaacaactctcagagtagtactaaaattattgggagcccaatctttgggaagcaatttgtttgcaagcaggagcgtacgccccttatccctcattccttatggattgctaatcaacacaaggaagtaaatcacttggtaaagcgagaccttgatatcaacctgccatgtgatgcctcggtttctgttgaccagcatggtgctaaagcctactatgtagacaagaaagaagggaaaaaagctgccaacttcagacactacattgatctgaattcatgtgctaatgaggatgacgaagattccggcttcctttccagtctgagtgtgaaaacaaaagcaagaacttggatagatttggaagctccccctactctcgagagtgaagaagaaggagataactcacaggacaaaacaaatgaagaaacttggagaatgatgcaaggccaagacggaaactctatgaatgaactcatcaaggtagcagcagaagcaatagttgccatctcaatggctggtcaccaacgccatcctgatgacgcagcttcctcttcaactgatgcggcttcaaaaagcccgctctcttggtttgcagaaataatcacttcttgcggtgatgagttagaaagaaagattgatggttctccagaagccacagactttgaaggtaacagggaagactattcttctggggagattgattactttgaagccatgaccctgaatatacaggagacaaaggaggaagactacatgccagagccattagtcccagagaatctgaaattcgaagatacatgtattaacaagccaagaagaggacaagcaagacgaggaagaccaaagcgggatttccaaagggatactctacctggtctctcttctctgtcgaggcatgaagtcactgaagatatccaaatgtttgggggactgatgaaaaccggagactacacttggagttctggattggctgttcgacggaactcaaaaagaaaacgaaatgtcactaacataaaccaagctccattatgcccgtcaatggcgcagccaatgaatgagagcgtatcagtgggaggacttgaagacagtaagctctcaggatggggacaagcaacaagaagaccgaggagacaaaggtgccctcctgcaggtagtaatcccccaaccgtgatcttaacataatagtttcaggaaataatcggaatttaccaaacttggaaattctatagaggggggtataaaacagagagattataccaaattattttttttatacagtagactgatgttgttaattgttttcacctatttgggaggtgatttatgtctcttttcgttttgtatatcttttatcttctgtaagatggaccaaaacatgatttgctttgtattatagcctggttggttataaaacagatagatttcttcttaattgagagccaagtataaaacgattgtccattaaagataatttgattctaaaacgtcatctttaattaggtcataacatttaactggttgagtgttacacatgttatctacgccaaattagaccacagggtcggtacatatgttgcgaaaaaaacacttatagtttgcttaaaaatgatttgacttttgtttcaaaaagaaaaagattgaccaaaatagagaagaacacttttgacaagagtttcttcttagaggtgacatggggtccttttgctttctcataattgttttactattctatttccagttgaagtatcattgaactctgccacaaaagcaccaagcttttatatgattatgaacaaataaaagatgactttgatttgccttgcaaaccaaaagcattcttgaatctgaagcaaaagaatcaataaacagaaaggaaacaataaagagaagaaaaccgcggtttcggttttagtaagatcattcatcaataggagcaggaagattgagatcgatgagtgtatgcatctcatgagctacttgatgttgaatcaccaaagtcctgtgttcttgattcccaatgaaatgtgatctcttgtgacctcctaaagcttgtcctgatttgaacaccctgaagcaaatcggacactcgtgacctttgcttttcttctttgcaccgtttgctttcttaaccattggagacttactatgaatcttgatagttctgtttgtgtccgcacaagagtcagtttccaagctatgctcaccactgtcatagacagattcagtgaactcatacttgattttcttacgaccatgagaaggaaaacctcttttgcttttcctcagatcatactttgtagaagaacgacctgatcctgatcctgaccctgaccctccttccttataccattccttcctgaatctgttcatgtccctatcttgttttgttggggagctgttgaatccggatccagatcccattattgttttgttcctaaagaacccatcaacagaaacatctgagtccaacttctttggtccattcctgaagtagccagagtcagaattatctgaatcataatgaacatcaccattttcttcaccagacctcatctggttatcaactacaagtttgttcttcttacataactcttcaacattcttcacattgaacatcttaacctgctcacctgaagatgacttagtctcaagaatcacagagttgttgtcagatgactcagccaaagagttatgtcctttcttaaaactagaatccctcgaaagcatcatcaaagaccttgccatttcctcctgttcaggctcaatctcagaagcatcagaagaagctgaaatagattgattcataataccattaccaccaactacaaaagcagctttgtggtgaggtttcacaacaactctcttggatcttcttctgataggagaggaagaagcctcagtatcagattgactatccataacaatcttctctctctcagagtgacaagccatgtgaccacaaagagctttagaagaaacaaaacctttaccacattctctgcaacgacgcagctcttgaagttgttgctgctgctgctgctgtttcagagccataatctgtctgtgatccacaaacctcttgttctttttaggattctctctcagaccataactagattgaccaccattttcatcaatcatcttgagcttatcagcctcatcttcatctgaatcagctgaattctcattcatgtgagttctgatgtgacctccaagtgatttcccacaaggaaacctcttgctacagaacttacaaacaaacttcctctctttgaactgctccatctgatcaaaacaaagacaaaagatcataagaagaagtagaaacaaaaagtgagagaagccattagtttgatttttacctcaaatttatcttcaaagaaagcttgacagatgctaagaaagagaatcaagcagaaagcttgatacttttccagcgatcagagtttggagatgtaacactagtcttgttaactacagatcctaccatcaaggcaaagagaacacaaaaacaggaaacaaataaaactgactttgaaatttcctcaatatctaaagttagcagatttactttctttttggggttgcgaatgaaagatataaaataaaaattttttgatactcagattattacattatacagtgtgcaaattttttattgacatttttcataagagaatagtagagaaatgagtgaagacgtgaccattgtctaggcggattttgcttaagagtgaaagctatacacgcattattttagtctgtttttggataaaagcaaccaaataaagaatgcaagaaagtaattagctaactaagcaacaaaaaaaaaaaagattagtagatccgacacattttagctgaatccatcattttgttgcgagtagaccggtccggtccagagattttgaaaggctctaaacccaaaaagtgatatgtactagataaaatactcgaaattcacaagttacaaacaaaaattataactttttctgattcatcttataccaaaaatgcattcaagttatttctattttactctataaagattatttttttcccctccaattttgcttcttgtttccttttctgttttgccaggcttgcactatattcatcatctcatcttaaaacacttttatcccataaatttggcgataaacattaagatatatacattttctttcataactttccttttcataaagagtaataaataatattttctacaacttataatccgttgattaaatcggatgataacacgtacatggtggacggtgccacatttgtaaaaatgagtagacataaaaaatttggctggcaaaatgataaaggaaaatctggttggcaaaattataaataaaagtttctatatttgcaaagtttttactattgtctattgacagagacaagcgaaataaatatctttacagcgaaatatcacacgaaagagaagaacataacatatatatgccccatcaacctttttaaatttttattgatagaccaatggaaactttagagttacataaatacagctcccaaattaatggagctcatgcgtttcttcacctctcctctcccaaccatactaaatctttttttctcctttcgctttcaaaactataatttatcattttctcattagaaaaacaaaagaaagtcccttgcaaaaatacactatttccaagattgttttcacactacaaagcccaaaaacaagcgtggaaatagcttagttacaatattaccataacgcaagactccattacaagatcaagaaagtagaaataagaaatttccgcaaagaagaccaagaagaactaacgaaccatcttcttgggccaaaataactctagctataaagtacacaaatctctctcgaacaaatccgagaaacgagttaaattagaaaatatgtgacaaatgtttctgtatatatgtatgtatagaaacttgaggatatggttttagttgtgaagcgggtttggaccagaggggacgagtcttttgtcgacgccgtaccttggatcaatctccggaggaggaggagaaagaagtggctgcttccgactgctacggtggattctctgaagctcaatgcacatagaacgcgcgtaaggacgaatgaaggaatcacacgaacggtgaggagtcacgtggtaagggtggtggttaaacctcggaacgaatcggtgcgttcggtaacggaagtttcttgatgttctgtttccttcgtcgacgacggttgaagaagcggtggaggatttgagaagtaaagagacgaagagaagagagatcaagatcagacgattcaggtgagtcatcgtcattgttttggtttccaagagagagcgagagagagaaagtgagaagtggtcttggagaagaagaagtttaaaatcgagagagggaagatatttggtggaagcaaattgggatataaatgcaacacagaagaagcacatgaatcgatgttatgacggttagttttagtaaatgagagggcaaaactggttatacaaaaaaaagtgggtccttcgcttagttcgttttcattgacataaataccaacccgtgaactttattatatacatttcgatcctagatttatttcactttctttagctttttcatacaatacgttatacgtacaaaataatgggtttatgtagtaattacgtacacaagataaacaagaacgtgtatttgagtggtttcgtgactctcaagttaactcctgggtctttatcggcttctatagtttaaaggccttaacaggcccaataggagtctatctaaacccaactacctataaattagtaaagttaccaaatttgggatttatttattttgcttttcctcctttcaattgaatcaacaactttaacttgaacacaactctctccctttttatgttagaaccaaaacatcatcataaaagcaatagacaatggctcttgtagtcttgactttgattgtgctaatatgaatacagaggaagtcttataggtgaaagctcgaaaaaggaaaaaaaaactttaaaagtaacagctttctttgaagacaagaagaatgaatctcagtaatcagtaagaaacatgaaaggtccctaaaaagctgaagataatatatacatcaatacttgagttcataaagcaaagaattggctctaagtgataagcaaactttatatgaacaaatcaaaaaaaacttttgatctagttctaaaatgtggagcaaagaaaacaaacaaaaagtggggatgaaatactatcagagagaactatagttctcaggttctgattcattcatcagtatccgaaacaggaagatagagatcgatttggttacgcatttcagctgcgtggtttgcaatggaatgtgatctcttgtgaccacctaaagcttggcctgatttgaacatcctgaagcaaattgggcactcatgacctttgctcttcaccttctcaccaccttctttcttaaccattgaggatttgctatctttgaacctatgatgaatcttgctgtttgtgtctgcacatgaatcagtttcataagaaaacaaggctctcttgcttttgctcagctcatactttgttcctccctcattactattcctgaacctgatcaatgagttgttgaatccagatccaaatccagtgttcctgtcaacagaaatgtctgactccgacttacttggaccattcatgaagtaatcagaatcagagccatctgaatcacagagactaactccatcatcatcagcagatctccattggtcatctactgcattcttcacattcatgatcttaaactcatcccctgaagatgacttattctcaacaatcgcagagttgttgtcagatgactcaccaagagaattcatcaccatgttacgtcttttcttgaaactactagaatcactcgacaacatcatcaaattataagccccatccctacgttcttggtcaatctcagaaccaaaagacgagctcccattactcaaagattcagaatttgattgtttcatgaccaccctcttggatcttttcctcataggagctgaggaagtctcactttcagtatcagattggctattatcatccatcaacatcttctttacctcaccgtgacaagccatgtgacctctaagagctttcaaagaaacgaacactctaccacattctctgcaaccaacttgttgttgttgcttatgtttctgagccatcatctttctctgatccaccaacctcttcttcttattgccattgtaaccaactgaattctcgttcgtatgaattctaatgtgaccaccgagtgctttcccagaaggaaacgtcttgtaacagtacttgcacaaaaacgaattctctttcccttcctccatttgaaaatttgaccttcttctcttagacaaatgatcaaacagcaaacaagcaagaaagaatcaataaaggtttctcctttacacacgaaatcgaaagaagtaaagaacccatttttaatatctgatgagtttagtttacctcaaatcaaaatctatgaatgaagacgagtgctgcataaaccgacaaaactgatacagagaagaaaagagaataaagaagcagcaagtttgatgctttttttctttcttgtaatcagattcagagatgtgacagtttctctgtatagctaagtacaagatccgaacttcaagctaagaagaaacagagaggagaaaagtaaaacaagcttttttgtgtaatttccacagtaaagtttagatttttatttttagagtttgggaacaaaaaagataaaaaaaataagagagaagtgttgctaacacgagtaatcaaaggtcagctgcatttttggatctattcctcttcatctctccggtgtgtgtgttgttgttcaatttcatgcatggaatcaaaaagagatagagagaaaaagcttttggacggtccagatctgtttagaccactttgttataatcacaccatttccttaacccattcctcaaatttcaaaaagatcacacatttacagaaaagattcaatttttttggctatcaaagatttttttccttatagtattaaataaaaatcttgtgtagactttgaattagaaaactgttattcgggttagtgagtgggtataacaaaccatggggccaaacacaggctatttagtaatagagaccttttgaagtccaaacaaacaacacaacaaagtctataaaagtttgtccttgagaataccataattggctatcttcccacatcttctcctattctaaagcaacaaactttggcattaaattttgtgaggttttaacaacaatggagatttttcataatcttttagccaacaaagagacaatttttatgaaactataggaaaaaatccaaaaaaaaaccaactaatttttatttggacgtttaatacccaattgtttttggtcggacgaaaaatacacaaaacattaaaactgtacaatttaatatccaaacaattaaatgttgttattttcatactcacgatttcacaacaaaaataaaattttaattttacccttaccatctcaattaactattaatttttagatgatatgacatttattttataattttgaataaatattaattttatgatgtctaaaatttaaaatttcagttttattagaattatttattttaaaatttaacattaaaattaggggaaaataataaatattttaaaatagtcatttttacaatcttattctatcgtcccaatatcaaagagacgttttctctttgagaaaatctagaatcgaagattaatgtaattcgctgagattcgggttgaaattagctattttgctactaaaaacaaaaatagccatttttatgaattgataaatcttgagaaagacgatgagattcaggttgagattttgtcaaaaatagtttgattcgtgaaagatttaaattcgattaaagagtttctcactacgaagaagaagttaatatcgaatttgatgttggcaaaagaggacgacggagattgtttaccgtccattttaaaatatttttgattttctctaattttctgttaaaatttaaaagaaattaattgtaataaaaatgaaaatttaaatttttagacaccagagactaaaattttcataaaattaatttttatccaaaattataaaattaataacatatcatctaaaaaattaatagttaattgagatgataaggataaaattggaatttatttttgttttaagatcgtgagaaaataataatatttaattgtttggatattaaattgcacagatttttactttgtgtatttttttataacaaaaaataattgaatattaaacattcaaataaaaatagttaatatcttttttgagttttttcttgaaagtaaacccaaaatagttccattttttttctcgttcaaaagttttatttttattttattggtaatgattgtttctcaaggcaaatgccagactttgccttcaaacttcctgtatataaaaatttaaagatcaaagaagagaaaatcttttacagcaaatcagagagattatgacattctaagtaaatgattttaagaaagagggccccaagaaaagtgaaacaacagcccattcacaagaatccacatgaaaaacaaaggctggaaaattcttttaagtctaaaactctcactactttttaataggaacatttttgaaggaggaccccataaaccccaaatatctctcccatgattctgcaagttgttgagaatgatgtttgcttcttcacttgtttcttgccttgttttcccagcatccattaccaaatatctcctccatgattctccgggttggttgaagatctttgccatttgttggaacattcaaacacctcgaagcatcccagactttggtatctattggatcattacaatccttcaacttcttctgctgctctccaggaacagtctcatctttctctgcacagttgactgcattacgtgcaagttcaaaggaagtgcacgagtcatcttccacgttcaatctctctccattgttcccagaaaatctatccatgtattcaactgttgaactcatcttgtgctcgtcatacagtccagtgccaccttctttagtatcatcatcatcttcatcattgctgctatgactaacatcttcttcaccttcttcatgatggagtggatacactttcttagtcccttgatgaagaggagactcgattgcagagtcttcttcatcttcttctacataacgagtaccagaagagcctccataacatccatgccattcatcatcatcactatcaatgtccaatataaaagctctgttctggatggctctccttctgaggacaaatacgttaaagtagaagctaacaatctctttctgagttcgggaacaaaatgcagcttccaagtgcctccaaaaattctgccccaatgttacaggattggaataaacaacctcatgaaaaagttgtgcatcttcatcgctccacttcagtgcacctttttcccccatctcacataaacccagttctttgaatgtctcatttccaaacgtcttaactaattcttctctagcttctttaatgtgctggcacacacacctgacagaatccctgtcccggcatacacaaaactttctacccttccctactatgtcatcaatatgtgcaactgtagtcaaaccaggcatgggaataacagatgtaccaaacagcttctcaccatcagcacatccactaatgtgattttgaactgacatgcctgaggtttctatgttcccagtctgactgccttcccattcaggaatctcggcttgatgacctggtccaatgggcacttgctttttggcacgttgatccaagagtaaataatagaaagtctcaacaggagcaaatactcttggaggtatatctagctcaaaatactttccagaatggggagagtaagttgcatctcttccaccacaaccttgtgtatcccatgtaaaagtatcatccatgtcatgaccagggtaaacataattggactcttcatcaaacatatcaccttcagatgactcaccgccttgtgacttacaaagatttccctcattcactattctccagtaaccccattcaaaagagaacagcaaatcacataaggaagtttatcctttcaaaacaagactaaatcccgcaaagaagttataattacacgtattatttacccgtggcaacagttttctggaaaccagcatggtgaggactaacttcttcaaactgagtagacttatcgttatagtcaagttgtctggaatgtttgagtgggagctcatgaaacttctcatcttcaaaagggcgtttgaatcccattttcaacttgcataattggtaatcaaatgcaataaactctaagaacgaataagagaatgaaaggaaaattcagacaatggaacagtaaaacaacaacattcgcacttgacagtgaaacaagtaaatgataagattcggattcctccacaaagttatagcaaatgcatgcaagaaaccttatacaaaccttatgtaggatggctatctgtaaacgttcctattaagacaataactatactatcatgctagtttaacacacatccaccacaacaaagaactaatgcttaaaaaacagttcagacaggaacaaatgtccagttaacatgtagtatattactcacctctctaaagaagtaagctcagataaagttttaggccaacttcaaaaagatagaaccatactagaacgccaccaatagactaaaaatagggataaccaataggaatttcaggcttttaaaagcttaagctggaaaaataaaaaatccccaaatcagaagaaaccctaaccctagactccaactacccaaaaattaaccaaatcaagtatgaattggataagaattgatcaaacctatacaaactcagagaaaaccctctaacaatttacagatctggaaagccctaagctagatcgattaatatgaaccctagatctcaatcgggggcgaaaaacatgaaattgacatcaaaatcgaaaggaatatttatcaaaattgatgtaaatagtgaaagaaaacgatagatcaagatattaaacaactagagaagagatcaagtaccctaaccctagatttttttttttttgacaatcgaaataaaattagtatcaatagatagaggggaacgagaattagatgatatcaatagcaagaataatttagaaaaaatcccaataaaattaaagaaaaagacagaaaaatttggatttacgatgaaacttttggggaagaagacgagagaagataatatcgaaaaagtggatataggttcctggatctattttttctaaacaaagccggcccaaaacactaattcgaatttgacccgcaaacttccctaaaatcgagctggaccccaaatttaaaagcaatacactttttttatcaagtccttattgctttgtaagttttacacttcattccttatcttttccaatgtcacaattaatccaaaatttcaattaatttgttgaggattttagcatactattatggtaaggcaaatagtcaaagaaattcatatactattccagctaaggcagattcagcaaatacatatcattgtttcagcttggttacaacagaatttataaggaatcttaagatactatattttagaaaagacatatagtttggttgaagttggcaccttcatgccacagcaggcatatccttgagccatgaatcaagcggtttaccaatggagtagacgatgaaaccgatctcacgcagcttcactgcatcaacaacattcctaccatcgaacacaaaagctggtttctgcatattgtcaaagattttcttgaagtccaaggatttaaactcatcccattcggttaagacacataggccgtgcgcatctttagttgcctcgtaagcatctgagacgacattcacttgctctgagataccttcagctttaatctgctgaagaggaacagggtggtcccagtcaaacctagccatggaaagatctcttctgatctgttcttcaagaacttgtgggtcgtatatgctcagcttggccttgtctgcaactaatctgttacaaacatcaatcgctggagtctctctcgtgtcacctgtgtccttcttgaaggcaaaaccgaggatcgcgattttcttgcccgagactgtgttaaacattgaagaaacaacccggtttgcaaaccgtattttctgatagtcgttcacctttacgacttgtttccagtaattagctgcttcgggcaagccgttgcattcacaaatatagataagatttaggatgtccttttggaaacatgatccaccaaaaccaacactagcattcaagaactttggaccaattctagtatctgtacccacggcatgcgcaacttgtgtaacatcagcgccagttgcctcacatagagctgacatggcattgacagatgatatcctctgagctaagaatgcatttgctgcaagcttagagagctcagcggaccacaggttcgtgcaaatgatttgttccactggaacccaatgagcataaacatctcttaaagctttaatagccttttgccctgctgcagtatccctaccaccaatcaacacacggtctgggttataaagatccttaattgcagtaccctcagcaagaaattcagggttagagagaatctgaaactctatgcctttgctgttatgtgtcagtatcttttcaatagcctctgctgtcctcacaggaaccgtggatttctcaacaacgattttgctagatttggagacatcagcgatcatccgagcagcactctcccagtaagtaagatcagcagctttgccagcaccaagaccttgtgttttggttggagtgttaactgagacaaatacaatatcactctcaaatacatgtttctccacgtctgtgctaaagaagaggtttttccctctgcattgtttcaccacatcttccaatcccggctcgtaaataggaagcctatcactgttccaagcattgatccttggttcagagatatccacaacgactacttcaatctcaggacacttaagagccatcaccgccatggttggaccacccacataaccagctcctatgcagcatatcttcaccatttctgattttcaaaacgtctcctgttaaagtacaaagccaagaagatatagtctacgtaaatcagtcaattatacaaagacaaaacctttaatagaaacaacaaagtgacaatttacaacaactacaagtcgatgattggctatataagaaagtgcggcgttaaatcaaacaccttgtaagcttagatctatcaatttcaaaatgttaacagcagaacatgcaatgtacttcgatcaatctggttcttctgatcacaaaatgtaaaagccacaatctttgagtgtacgatctagaacaaaccaaaacgaacccatctttgatataaagcgtgacaacgatgtcacgacagacgaaactgacaataacgaacaaaacccatgtttccagtttgagaaataacgaatgatctcacaattcaaagtaccacaacaagaacacaatgatcaaaaaaacgatacattttacgaaggaggaatagaaaaaagataggaaatttaccttccttgagagtgaagaatcgagagatgggcttgttactggtgaagaatgagagagaaagcaaaagatattgttgcggcgacgatgatggaatttgcagagaagatgtcttctgaaagttttataaatacactcgcacccacttgacttacacatttcaactttttatttattgctcccaataaatcccacacgcttttttttctttttggttcaattattatgcttccataatcatttcgttacaaaatttactagctaaagattatgaagagattaatttggacctttttgggattaagacttaagaatcacttgtttatctcataataatctcttgcttttataattgtaacactaagctaaactggttcagtgggtctcaatgacaactaacttttaatgatgttttgtgctgttatgtttttgtcaacaatatgcaatatgcgtatttaaaaccgtctaatagtatatcaacatatcttgatttaaatatatttatctaaaccgaaatccataactaatcataaacttttgtatacattacgctaaaccaataaaatgggaaggaaaaatcaagaagtggagtttaagaaagaagtgaaccaatgaacagagtctttaggatatctcttgaggttgtctctgtaatcaacgaagtagagaccaaatcttgaactataacctgctgcccattcccaattgtccaatagcgaccatacgaagtaccctttgacattacatccatcctcttttatcgaagcttgtaagctagaaaggtaatcatgatggtatttgatcctctttgcatctttgagagcgtcttttcttgagatcagaatgctgtttgggtcgtccattcctacacaaacaaacatcattacatttataaacactctttcttgtctagatagtttcagagatgtgtgtgtgttttaccattttcagtgatgaagactggagggtttccatatctatgtttaatgtaattcatcaagcttctcatccctctaggcactatgtacaaccatatcgaacttgcctgtccgcaacaacaacaaatgtaacacaagcttagagaaattcgacagtactaatcacttttgggagaagtataactaattagagttactatataatgtttcttaccctatctccaatcgtgcttaaacccttaaacgctgaaaattcaaaacaaagaattttaattaagatcagacactcatcatgactagggtttacgtgaggtagaagtataagtatttacgtagagtgacggttccagaatcagaaacggcgtcgtgtagaagagtgccaatgagattggtggcattgttccttgcgtagtacgttgtgtagtgattaatccctacaaaatctaaagaacccttcaccagagaagattgagatcctgtaaacaccggtaatctgcttccgactctgcttctcatcgagcttgggtaatccccaaacatcaacggatccaaaaacctaattaagattgtttaaagatatatgatcacttgttataagttatggaacagagctaagttgtgtaagaacatatacgtaccagccaagttgaaagtcttgagctctttgtgcagcttcaatgtcctctgtcttgttcgactctggttcaaaccacattacatcaaacgcaatccctaacgaacctccttgctttgcctatcataattatacatcaaaactgtatatatccttttttttcatgtaacatcatgttttcactttagtattgactaaccttatactttttcctatagatatcggatactgtggcgtgagttaaaataacattgtgaccaacaatgtaaggctcggtcgatgagtttccttcgcgacaagtgagcttaaaaagaatagtgcaacggcctggagcttgtaggccaacatcatagccttgtatcgcgaacgtgtgtggctcgttgaacgtgatccagtgcttcactctatctccaaatctctggaaacaaacctccgcatacgctgcaaaatcatttctacaaaaaagggtacatacatgcattgcctttttaaaattagtttctgtgtacatgtaatagttttactgaatgattaatgatatggttttggtatggattattacatgatttgtgggtttagccaaccgaggtatcgatcatgaagtgcttgtggaagatcccagtggtacagtgtcacgtacggctcgatccctacaatcattttttgtctgtttatacatgtgaaacttgaccaaccattctttaattaatctttaaagaagaagaaaaaagacagatccgatgattgtagatgcattataactactgttgaatttgagatcattagtactcttaaaataatgcaacaaaactcgataaaatacctttagcaagtaaagcatttatgagtttgttgtagtgatcgattccggcttcatttatatgtccaacaccatctgtacacccatgcatgatattatcatcaataatccatcaaaagccatttgttgtagtagtatcataattaaaacttaatctaaagtaaacaagattaaaggtaaacatgttaaaaagttacatacttggaaagatgcgggtccaagaaatggaaaatctgtaagcgtccattcccatattcttcataagttgtacatcttcctgccatcaccataattccaatcaaaacttcattaattaaattttcgaaatgtatacttattgaccattttgttaatttattatagaaattggggtttacctcgtaacgatgatactgatcaacagcgacatcagcattgctaaaatcggtgattttaccaaaagtgtgggaaaatgtgtcccatatcgtaggacctctgccttctgccttcaccgctccttcatgctgcaccaattattgatatcattaaattttattataacgttggtccatccatctatatttgcattttcgttttaggggatctattccagcccggaaacattaattgggtgtgcatggttaggtgagaaacattttgagaaagaatttggttttacttgagcttgactttggttattatggagttgaaaaaaaaggataaaggtgaagaagattatgaaaatgttcaaaagaatgggtcattgtttgaaaacatttagtaatttctttagaaaaaactaaattttggaaaaaccgaaaccacaagaagaggagcaactattggctacccgtgattgatgaatatacatggccttgtttacgcgtcatgcaactcaattgtatttcaatttatggaccagaattttaagaacatataagaaaacaaaaacatatttaacacacacgcttcagtatcatttgagccaaaaaaaaaaaattacaatgaattttcagatactgaatagtattagttttggctattctgtttgctttttaaattatttattattttggctatatagtattgggagaataaaaacatatcacatgtgaacctatttgttctgatgtgacctatttttaagtggttaataattttgttttcagattcctttaaaacttaaaaggaaaacgataaataactcaaaaattaaaataaaaatagacaaaaacaaagagagtgggagactggagaggagaggagacctgaaaagccgaagaagcagttccaaagacaaagccctttggaaaactgcctctggaaatgtccgcacatatgcatgttttatccatcatcatcatcatggtcaccatcatcatcatctttgtcatcgtcatgattaatctcctatgagccatctcttccttcaatgtgtttcttctacggccagttacatatatttatgtgtaaatggatcgaaattgttttagatgaataagaaagaagtaagagagaccaacaagaaagaaagaaagaaaaagaggagtgcaagtggaaaaagctatgtaaggggtactactatatataggaaaggaaagagagacctaaaatcttctgatccgagccaaagaaaaaagtgacaaattttttgtttttttagacaaaagaaataataatatgataaccactgttgttaatattgagatgcatacatgaagctagacaaaaacaaatatgaaaagtaaattcaattatacgtatggtataaagtaagtgagaagttatatggatgatatttgatgttaaattgatttgatcaaatgaaaatataaggttactcaacaaaaaatctagtcaattttaaatactgttaaatataaaaatttgcttaaataattgtaatttttttttgttgtattccaaattaattataacttttctttattttgatttgttgagagctaaaatttttcatgtaggatatctaatatttgtttaaaagaaaatcaagagtatttgtaggtgttgatgactggtatggaaccacttatgcattgaacaattgttttcttgatttctttaactaaaagtctatcactattttggggttgttaactattggtaagaataactcaactttaatacatggaagatttcaagattaaggtcctgtttgtttgatcatttggaattatcatccaaatgatccatccaaataatccatttggatgattcatcttaatgatgtttgtttgattatttgctaattcatctaaatgattcatttagatggagctttgtttgtttgatcatttggatggatcattcacattctcatatatatgtaaataactaaaatgccctctgttaagtaacaaataataaatagctacattctcatattaatcaaagtagagtttgaaaaagagagtttggttttgtcatagtaacgccattgctttgtcccaatctgcacacaacattattcagcttcttacatcaagagatcaatgaggcacacaacattattcagcttcaacaacctccggtttgggacctgcacagacaaattaatatcataccaacaaattcaacatgacagtttcattcatcaatcaaacaaatgcactagctcaaagcctcagactaatctttatcaatatcagtcctatatgaattcaatgagaaccaaatacaaaaccaaaggaatcgaataaaacgcttcagcaaatcatccaccattaaactcaccatggagcgaaataggacaatgatcctttccccaacagtttccattaaacaaagcaaacttcttcgatttcctttactctatagtctataccattactctatggaactgaatcgaaaaattctcaatttccagtaaatgaccaaatcataatcatccgaacaataaaaagaagcctcaaacaaagatccaattcaacacaaatgaaaaccaacccttcatcgataaatgaatgaagaatcaatcaataacaccaattatataacagagggcaagaaaataagatcacacttgggatactgaaatcagaaaagagacagagagaagaggaacaaaaaactcacgtaagaaagatccttcttgtggactactaccttgttcagaagttgaatccagaacctttagagacaaataaacaaagcctagaaacagagaagattgtcattccagaaagatgttaaaaatttcatatcaataagctacatggtctcaatgataaagaagacacagtaaatggtttgtggttttgaaagctgaaaatatgatacttatctacccttgtttgcatcagatcaactaaaaagaaaatgattaaatactaaaaggattcgaagtcatgtgctaactaatgtattggctacaaataccacttaatttgaatctataactaacccacggtgtagtaaatacttgattactctactaatgtacatatttgttattataactaacgaaaaatcaaaactaacgaattggcattgcttcttcttatatgagagattctgtgagcgtgtgtggcatttgatgtctcatgttgttaagagtgttttgatataacctacctgtccaagttctgaatcctgaaccacagtgccgttgcagcaaaatccctaaagagaaaacggatctgaaacaagcaagagcaaatggagaagagaaaccattagattcccatagaccaagcaaagatctgaaacaagcaagagcaaactattgtgattgatagacgtgagcttagagaccaaccaaagatgaatcacttacagtgattcttccttcaatccttaaatccttcaagccaaatctggatcctagctttctgcatcaaaaacacaaagcaacacaaagcaatataagcaaaacaaagctgtaaactaaagctaatcgaagaatcaaaagcaatacaaagcaagcaaagcaacacaaagccataaactaaagctaatcgaagaatcaaagtagccacggagtaaagcaaagcaaacccacaaacaaacaatgtaaccacggaggatcaaaccctagaacaagtgattgcaagaaggatacaaagagaaacaacgagagagacatggagcgagagagaggaagcgagagagagagagagagagagagagagagagagagagagagagagagagagagagagagagagagagagagagagagagagagagagagagagagagagagagagcaacacaaacctgttacactccagcgatggatccgacgagatctccggcgaccgattctcgtcgacgacggcgagatcacaagatcaaaattttgattttctctgttttgtgtcgaggaaaagctgaagatgagatgtggtttttggtgtaattccataaattaaataagggtattattgacattttataattttgactgaatcatcttcagcagaatgaacagatcaaactcagtctgattttcttcattttctggatgagtttaaaaataatcattcaactgaatcattcagatgatctattaaaacatgaaaaacaaacattagttttaatattcattgagatggttcatccaaatggccaaacaaacaggacctaagtatcttatttaaaaaaaaaaagatttcaagataaagtatagactattgtcactatactcaggaacaaaaagaaaaatcatatatttttatcatttgaagtatttatagaaaccatttattattgaaattatatcaaaataactatataaaaaaatagttcttcaactaacaatgtgaatatttaacatactgatcagttgactcaataaggttgaataaaaataatatatcttataaaaccgtagtatttgctctttgattggtagatctccatgcctccatccatttattaaagaacgaaaaattccggtaaatagaattttatttccaattataatgtgtttatttaacaaatgaacaaaaatataaaatgtgtttagataagagagatcttcatgggatcgtgagattggaacgagtgtatggcgtgagataatgtgaaagtgtggatgtttttgtggccccctcttattataaggcttttgttcccatttgctttttgtctaaaaattctgtgagcatctcaaataacctttggcttaaagcgaatggaaaaaaatgacaatcaaacaactaataatataagaatcaaagttgccaacagagaaaatgataatacacaaaaaaccacgaaaagtagacaacagaaaaagattgcatcaaaaagtaaaaattattgataagataaaattagtgggaagttataatggacatatgtggctaatgtattttatttttgttagttaattagttatacactggccctgttttttgattgatcgctaagtcagctacctgcgatctaaaaaaagctctcatctctctttcactttcatttctcctctctttcatctctgccgcagtgactgtaattcggccattccgtagacgctggaatttttagcgtctcaaattctctttctcctatctcttcagatctatcgctgcgactctttcattcatctcaccttcatctctccttcttttttcttttatattttgtgccgccggtgcttgtcgcagcaatcaacaaaaaaacagggtaagtatataaacttacatgtaataaattatatttttataattaatggggtcacttgacccccttctttcttaataggtccgccggtgtgcgtaagtaggagattcatttgattaattaatgaatatagaagttcagaagtggaaattattacgagtgtctcgcgaagttattcaagtgcttaattagttgcttaattttgttaaagttatcacgcttgacacgtatcgaattattattggttttaaacaatattttgctttaacaatgaagatgtggaattttgcacaattatccacttgtgatgcaacgtatcttggtgttttttgttagattaaaacacgttagtcatatttaccgtgttctcgtttttcgttacaaattttacattctatgattttaatttgcgttgattgtattcataattacattagttaataatcttgctttcttttttaaagagggatttgttgctttcgttatacctagccaaatagacttctgatagtttgtgttaaacgtggattatattttagtaatctttgtctatagttttaaactttttaggtataattgcttgtacttaaacttaagatacattatatgattgatttggtaaatttccacataatacatttcatgttaataaaactaaatgctgcatttgagttttcatatttgttcacacattgaggttatgtatttgtgattgtgaccctcttatatgaaaaaggcttgtgttcccatttgcttcttttttttttcttccaaataatacatttttttccccggattttattctctaaatcaattactttatgttgagcatttacttttttttcttcttcttcttaaatagatgtgttgtgattgttttttaaaaaaatatgtaagagatttcatctgactaatgaatgaatgtataagtcacaacacaagtgctaattattggctcatgaagtcattgaaatgttaagttgttttgaaatttgtaacgcgacaacaaatctcattaaccattattgtttcttttatgaaaaagtggatggaggattaggggtttgcgcaattatggatcataatatgcgtttgttagattcacactaacaagtcaacgacccacattacacacctctcttcactctgtttttcagatgctcatgcaataacgtcacacttttacacttgtgttcacacgtatgacctttattaatcaatgattcgaaaacgatttcgtaccaagttataattgttaggaatagccagtatcaaatcatcaaccctctctaagctacagccagcagcttagaaaccaattttttcttacgggcaaattcaaaatgttctcaaagccaaagaaaccaagcgacgagcttataatagagatggtgtctcaatattcagacttcagaaatcaacacccggcatatattatggccgttacgcattcattattcaaaacgagacaagtttttttaacaatttggccaaaacaacaaaggctgtgttttttttaaggttacagtagcaacttccataaaagtagcagagcagagatgtatctgtcagttcttccttccctctgataaaataatgtggtatccgtgcctgcaattaccacgcaattacattcatcatccactaataaagataaattcagatagaagagaagaaagaagagatcggatttggacatacgttgatttgaagggtgcactggtgactccaacaggtgtattaaaggcgacatcttggaatggacctgccatctttcctcgagggaaccatccaagatctcctccttttttccctgatggacactcagagtactctgctgcaatctgagatcgttccacacacaaatcgtgttaagattctccacaattcataacacacatctatcgaaatatatctaaccgaaaactgaaacttgtagatgtcgggaaagcaatgaactatgaggtattgaatgtgggttttctataagcggttacgtacatatcacagttagagatggaataaacaatactatctgaactatcttagattgatgttttgatctcatagacaaaaaagaagaaggatattcacctttgcaaactcagcaggaggaaccttgtctccgttgctcaaccaaccatcctgcaactttttgtaggcctcgttgatctttccttgcttctcgcacaaaacatgtcttgctgaaacaaaaacaattggagatttgactttaatgctattgtactaatacaaaagttgtaagagaacttttggatccatatttgtttaccagtattttttactcatgaacaaaggtaacaggcacagaaacgaatccaaaaaacacacctttaacataagtgcatgtcccaagaccatctgcagcttttcctgcttttcctttacccttggagggagcttcttcactaccacttgcttgctttcctttacccttcccaccagcttttgcgtccttccccatcgaattaaaactataaaaaacaaccacgattaaaactttattatcaccatcagattacagggttttaacttttaacatcaccacacacatcttgtaaaccctaaaccctgaaataaatccagtgaacttttcaatgcagatttaaagccaaatgcaagtgacttggaatctactacactggaagcagatatacaaatttgtaaacttaaaaaaatgcttcaacccgaaacttttggggaatttaatcaaacacttagtaagctaagatccatcaaattcagaatgatcaaaacacaaaacaagattacagattaaaaaatgagtaatttaacatttggacaatcgaaacgcaaagagcccaatatagaaccggtgcgtccatgcacaagataacatcgcaaatggaaaaacaattatctagacggaagatttagcgcaaataacataaaccccagttttcaatttctagcctaaaaatcagagaattgaccaacagtttacaaaaccaatcggagaaaacacaaaaggttactattaaaagtggaatgaaatatttgattgagaagccaagaaatttacaaagtcgagaactttaccttgagattcttcttctatcagattgaacgatcgagcagagagtgagagagagaaagagagatttgtttgctgaaaagtcttgtggggattagagatggaacattaaacccattcattaatatgggcttggccattcatggttgggctattaggcccaataagatactcttcttatcaaatattttctatttttcgtaaatttaatcgcgccaaaaagaaaataaatatttttcctattttcgtaaatgtctgtctctgcttttcatttgtagagctagctgtctttcagtatcagagtgaaattttagggttttacaaaagggaggttttttgcttcactctttgcttatttgggttctgggttttgattatttctacaaagtaaccacatttttcactttccggagatggagctgcaaacgatgaagataacgaaagattgtgtagttgaagtcagttctgaagaggaagggttcgaaggagcttggttcagagctgttttagaggaaaacccagggaactcatctcgcagaaagcttcgtgttcgttactcgacgttgctggacatggacggttcgtctcccttaatcgaacacatcgaacagagattcattagacctgtacctccggaggagaatcaacaaaaagacgtcgttttggaggaaggtttgctggtggatgctgaccacaaagacgggtggtggactggtgttgtcgtaaagaaaatggaggacgacaactatttggtttattttgatttgcctcctgacattatacagttcgagagaaagcagttgcggactcatcttatctggaccggtgggacttggatccaaccagaaattgaggtatgaggttgatttattcgaagtgggtctttgcttgaatgtttgaaactgtctctttgttgctctctttcaaaaaggttgaagctttaatccgttttgagtctggttgcgtgttatggttaaaggtttcagctttagtttcaaaaggctgaaacttttctctatttttcgtttgttgagtgttatagttccatggttaagagatcctttcttaaatccggtgttgtttttgcttgtagctgtcaaaattttgttgctttctttgttcttgttatatgctatgattaaaattattaaaggtttagttttggttgtgaatgcttaaaagtagactttaatttgttgtctttgaaggaatcgaataagtccatgtttagccccgggacaatggtggaagtgttttctgccaaagaagctgtgtggtcccctgcaatggtagtcaaagagactgatgtggatgataagaagaaattcattgtcaaggactgtaataggtacctgagctgcaatggtgatgaggcgagaccaaccaacattgttaattcgcgccgtgttagacccataccgcctccttcttcagttgacaagtatgcattgttggaatctgtagagacgttttctggtttgggatggcataaagggcaagtgaggaaaattctctctgagaaccgttacacggttagattagaggctacacagcaggaatctacaataagacactcagatcttaggcctttcatggtgtgggaagatggagtttggtataacgatctaaaggtatcaattacactagtttcaatcaacattctgacagttttggtttattggtatgaatgctttatgtttgtttctattttcagcaaaaacccataaaagaaactcctccaaccatcttgaaaaggaagccaatgcgctcttgttctgctgctaagtcaatgactcctacgagtgccacaaagcatttgagaagtttcctgaattctaaggaaattagcgagacacccactaaagcaaaatttgtatctgtaagttagacactcactagtttcctttgctttcgccatgtctttgattatgcttaacatatctgcgttacctgaaattaggccactagagaattaggaaaaaacaaggctgatgctgtgatgaatgacaaaactcatctgctcataacccctcaagaaacatcaataggtaaacataatcttccttaactcattgtgtttagtttctacatcgcttaatactgatctttaatgtcaatgtgaatctgtttcacatgtaccccagccccggtcataacagtcacaccattgaaacaacaagatgctgaaactgaaggaaaaaaatccccaaagaagacacctgagccagtgaagcatcagaatggcttggaaaatagttcaactcaacacgaggtaaagctagtttgttgtttgaaacataaccattctcacttccactagatggtgcttattatctttagccttcctgattgttaattgtttttgaatgcagatgcctgaggaggagaatagcaacgaaaagagtagaaaaaggaaaagagaacaaaatcaaaactctaacctgaatgaaactggtatgtctaaaatcagcattggccatattagttttggtattctttgtttcttgccaaactttatcatatccttggttaaaacttgtagatgagacttgcaatgtttcaaaggctggggtcaacggtacaagtgatactatacgtgttgatgatgttgatgatcagcctctctcttcttggataaatatacctacaggttcggttcaatatactaaagcaatttctattcaaagtagcttagatgtatcctttattaaacaatcaggtttatatgcttgaacaaattttttataattttattttgcattggtttatgtagtgctatcctctgatcagagctcgaatgtggtggataattctgctgctgatgttgaggaaactcaagcaaaaggtgcactaacgattgagccttttacaaagaatttgccattttggaagacatatgaaatggagaagggatacaagacagtgccacagaatcctcattttagcccgttgttggagttcaaagaagatattcgtgaatggtcagcagttggcatgatggtgagtttctatgggttattagaagaagtaaaaaagctgcagctcgatgtttcttcaagcaaactaggtagcctcagtacttgttttgccgagctagagaagcatggtttcgacattgcaacccctcagtcacggataaacaaagtgttgtctctccaagttgggcgagcaaagaaagtggaggaaaggaaatgtcttgagaagaggattgaagctgaagagattgaaatgcaaaaatttgaacacgagatggttgaggtagaacgcaaaatgttggaactgaagagacgagcagaggttgcgaaagagaagaaagaagcggcggacaaaatgattgtcgaaatgaaatcatctgcggaaaccattgatcaagagattgcaaatgtggagttggagtttataacatctgtgttggctccgtggtaaataagaaaacgaaactatgaatgacccctcttaagctcgtatttattttggtaaaatgaagtagatgtaagtgatctgtcaaatatctttagaccttatgggttattgttgacgatgcggtttagctctgcttttggtaaaattaagtaatgtaagttatttgtccttatggtttattgttgacgttgatgtttattttttatcttatgatgattagaatcaatctaaattacacgcatgttatcttaatttttcacaccaatgtaccaacaaagtcagcaagatagtggaagagcatgagaaaataattatctttaatgcttaagtacattaacaatatcaaagagacagaactcgccagagactgaacaaaattggctcaaaatcaacacaacctttcttactcatttaattcacagcttaaaccaacactaacttaggcttcccaaacttcttggaatcaacatgggtgtcggatcctttatcagtatcttggagctgcaccatataaaaaaccacaaaagtgaattcaaataagctaataccaagtagcctcatattcaaatatcactaaagaagagatgacacaatgcatacctccaccgattgttgcttcaggcagtttctctattgagtacttgcgttgtgtcacatacatgattggtacaccaggaatctataaacgaacaataagaaagttaacatccaaggatcctagccatggatttcaaaaagcatatatatcaaactaacatctttaccttgcgaatccttcgctttagatctctatcacaagtagctactatgaagcatttatgctgattaattacagaggaaagaaacaaacagaagattagactacatgcataaacagagcatcttcttagagaaacaagacacgatggtaaacaaaaccggagctgaggcattacctgagtaactctgtccacaagacagtcatcagcatatgtccctttgagtacacaaggtagtctttcaaatcgtggatcttttgcaatcctaaccaaatataaaagtaacttattaagaatcgacaaaaatgatacaattctactgaaaaactcttctttgaagtcaaaaagctttacctcagagctacacgatacttctgacctaacttctccagctcagccatgacacagtccgtaatacaaggagtgccttcaaatccgaaacgattcaaaggttaacaaagagaaagagaatttgcataactgtaaactgaagatagtttaagtaactcacattttgcgtacaaacaccatcattcccttctcaagatcaatctataacataaaacagaagaaactaagtaaaaaacgatacccatttgcacaataaacaagaagatttcaatcaagttattcaagacaaaaagaactcaaccaaaatcgatattttctttatcatgcacattccggttacagctctattttagataatgtaattgattgtgtagtaccttattctggatagagaagttgatgaaattggtatccaccaaaacccggtaaggaggaaccaaactagagttgtgagaaaagaaaagccctgaaggaacacttggactgatacaaaacaccaccaaaatcacaaatcaaaatccaaagtttctaagaagatccaaaatcacgaaggtaccaatttttgctggagggcaaatatagcttacacgtttctcggaagttcagtgaggtccttcttgtttggattcagaacctcctccttgtaactgaagataagtatcaagtaaacaaaccttaaagatatcaaatttcaaggaagtagaattgttacttactgtttcaaagctttgtggcttatcatcatcttcattactgcaaacttttgaggtttctttgtccttcccatcgtttaaccaaagactaaaaaaaaccttataaccttagaaggagcagagagaaatggagactaaagggccaaaaaatgctctctttcaaaacaaaagacaacgagagaactttagttcttgctcttctctcagatgcaagaatcgagcagaggagactaagaatttgtttgttaaaaattagggttttgagtcgtttgacattttaaccaaaccgaaccgaaccgaaccaagctaatgtgagctcggcccatatatggagctctgtcttttacggcgtctctgcatataccggcgatgctgaaggaagaagctgagggagtgaaaatggaagatgatgatgaagaaccaccgatggctgttcaaatccatccggatgtttctgtcggaaaggttcactcatcaagcgatactgtttcagttggtgtgtctgttatcactggctatctcggcgcgggaaaatccactgtaagtcccttcctttcactgatttacgtgttgggttttggtttttgattgtggtgtgtaatctgattgattttgcaccagcttgtgaattatatattgaacgggaaacacgggaagagaatagctgtgattttgaatgagtttggggaagagattggagttgagagggctatgattaacgaaggagaagaaggtgccattgttgaagaatgggttgagctcgctaatggctgtgtttgttgtactgtcaagcatagtcttgttcaagctctcgagcagcttgttcagagaaaagacaggtgctttgtttctctatctctctttaaacgctggttcagctcaaatttatgatcttctatctaatttctagacacactgagatattcgtgatgattgttaggcctaaagctctaagattggtgatggctttacaaaccataggcacatatatcgccgaaattgtagtattattacttgcattttggagaagaatgtatctttcacttattagacgttctgctttttctttcttctatgcaggcttgatcatatattattggagacaacaggtttagcaaacccagctccattggcttctattctttggttggatgaccagttagaatcagaagtcaagcttgactgtattgttactgtgagtatcttattcacttctcctttgttaagcttgaagctgctctttatacttctcctatcatcttgtacacatcagatgaattgtaaaacatagaattatgctattgacaccattatttctcttagtaaaacatagctagtgatctttcttttttctggttagctctttgtaacataaatgtctcaggttgtgtactgtctccctgtttccactaatttattgcttaggtatcttgttccaaatgcatttactgacctagctgcttgaacaggtcgtggatgcaaagaatcttcgttttcagctcaatgagcgtcgtgactcatcctcgtttcctgaggcctttaatcaaatagcatttgcggtaaccattttctgacaaccaatgggtacactgacttatggccctctacatcatgacatgacttttttaattcgttttgcaggacacgataataatgaacaaggtggacttgatttctcaagaggagtctgatgaattagagaaggagattcattccatcaactcgctcgccaatgtcatccgatctgttaggtgccaagttgatttgtccaatatattaaactgccaggcatatgattcaactgttaagtctctgaaacttctcttctcgtcttgattactaattatgcttttgactgtaaaaactgaacttatcttccttgtttactgttgaaattagcatgttagtcgtctggaatccctgctggaagcaaataaatcattaacgacgacagatcttcacgatagtggagtaaggactctatgcatcagcgaaccgcaacctataaacctcgataaggtagcaaaaatgtattgaacattcttggacaagtagttaagaaatattgttgttcgtgatacaccaacttgttctcggtttgacaggttcgtttatggctggaggaaattctgtgggataaaaaatcggagatggatgtataccgttgcaaggctgtgttgagcattcaaaactcagaccagatgcatattttgcaggtaatgtagtctgtagtcatgaattaaaacatgagtaaggtcttatgatcctctcagaatttgttattgaatatgcgcaggccgttagagatatatatgagatagtgccagctcgaaaatggagcgaggaagagaatcgaacaaacaaaatagtatttataggtcatatctcctttttgcatcatagttaacattattgctcccaacactcgcttactgattcaaggcattgaatatattgcaggacacaaactggatgaagaagttctcagaagcggattaagagattgcagaccctagatgaaaaagcaaacttgcagtgacaactagattggtctttttttttttccccccaagttttaccgtcatgaacaatactctgatcaatttttgtataatatataacaagtgtgtaaggttatataggtgtttcagttaacgtctttacactcctggtttaattctgtaagcaaatccaaagcaagaagattgatgatcttgaataacttaataagatagatatatataagctaagaaataagataggtcatatgaagctttgttgaacaaaagatgtaaaagaggaaaagaaactgtcaccaagatttagctgatttgtggattaatttcatatatatattgatgttctcgacacaaaatctctacttacttaagtgggcttctgatgagactttatcttgggcttgtaaaatctgactcaacaagcccattggttatatatatatagttttactagttgctagaaaagagcaaagcaaagagtagacgcctagacggagagccttttttagggtttcgaaacaagagcgattgatcatgaagacacgcagcaaaaagaccaaaaccgagaacaatcaagaaaagtcaaaagagaaaaacaagtttgatcaactgcctctggacctagagatcgagatatttaggaggttgcctttgaaatctgtagctaggtttctcacactatccaagtcatgtgcagcaactatccgcagtccaagtttcatcacatctttccggtcgccgcagccttgtaccttaatcgcttccgctcctatattcaactgtcttcacccctttaaacctagggtactggtagaccacaagttatccttcttctcatcatcgtcttcctcatcatcatcaacgtcttttctatcgcgtttgacatgtccgtcgtccccataccctcgtcacatggagtactattgtcattatgtaaatggattgataagcgttggatatggtcgagagcaaatcgtaaccaaccctagcactggtagattcataactttaccaagtgtcagaacaaagagaaggctcgtaaaaagttttttcgggtatgatccagctagtgatcaatacaaagtgttgtgcatgacggaaagactttatggccatcaagaagacccatcttctcaacatcaagtgttcacattgggagtaaaaaagccatggaaaatgttagatcgcactaccattcctgatcaccgtccttggactaacggtgtgtgcatagatggtgttgtctattacattgctaaaacggggcaaggtatgtcacaactgagcttaatgagatatgatttgagggatgacaatttgaatgtttttattagtttacctgaagagattcgaactccaagtctatacagtgacactttattaaactacgaggggaaactagccatagccattccagttacatcatatatatttgatgtgtgggttatggatcaggatggcgaaaaacatgaatggttgaagaaaataactttcaatattgaaccttggcagagttcatttgacgatatacgcattaaaggcactactcttacgggtgagtttatcttcgcaccaatgaacaattattgtgatgatgagttttatgtcttccattacaaatcccaacaagaatagctttacaaatattaagattgaagtttcgggagacgaggatttttataaaagagtaattgttttctcggattactttgagagtgatagattgttgccggagagacaattcatgatttgatacccatatatgtaatcttattttttgtaatttcgttgattactctgctgaagtcttgttcttttttttttttggtttaattgagtatactacctaaatgcactatttgtgtatatggagattggacatagtaatcaggttgtatgtttcaaatgatggggtttgttttggtaaagggtttgttctgcttctagcggcaaatgtttggttaactttaatacttatgcttattttcaagttgtagcaaatgttgggtcaatagttatgcttagtttactttaaaacttatgtaaagcatgaatgtttatgtgctaatggaaaattatagagaggaagagagagatggagtaagtaggtcaaggaaaaggctttggacttttgaatgaaaattgaaatggtaacaagtgtgtatgagtctcttttgttaggttgtagcttgtgaggaaatgtaaacctttctccattagctaaaatcagtcaaccaaaataacaattatcgtcttctttacagtcgtttatcatcatcagatccatttgtcctaagatgatcatttctcttctttgatcttcttttggtgatttgcccatttccgaggacacgcgcggtagattctagatttagggtttcgaaactatagcgattgatcatgaggacacgtagcaaaaagaccaaaaccgtgaacaacaacaacgatctacaaaagtcggaagagaaacaaaagtttgatcaactccctctggacctagagatcgagatgtttaggaggctgcctttaaaatctgtagctaggtttctcacactatccaagtcatgtgcaacaactatccgcagtccaagtttcatcacatcattcccgtcgcagccttgtaccctaatcgcttccgccgctacaatcaggacttgccacaacttgccttccagctttaaatctaaggaccaaaggttgtacttcttctcatcgtcttcttcatcatcaactgtcttttctacgcgtttgacatgtccgttgtccccatatgataatctgatagagtactattatcattatgctagtggtttgataagcattggatgtaatcgaaagcaaatcgtaactaaccccagcactggtagattcataactttaccaagtgtcagaagaagaagagtggtcgtgaaaagttttttcgggtatgatccagttagtgatcaatacaaagtctcgtgcatgacggaaagacgtcatggccttcgacaagacccatcatctgaacatcaagtgttcacattgggagaaaaaaagccatggaaaatgatagattgtactagcattcctgatcaccgtccttggtctaacggtgtgtgcatagatggttttgtgtattacgttgctaaaactggacaaggtatgtcacaactgagcttaatgagatatgctctgagggctgacaatttgaatctttttactagtttacctgaagagcttcgaactctaaaactatctggtgacactttattgaactatgaagggaatgtagcatggccactccagttacatcttatatttaatgtgtgggttatggatcaggatggcgaaaaacatgaatggttgaagaaaataactttcaatattgaaccttggaagagttcatctcgctatctagacgttagaggcactactcatacgggtgagtttattcttgcaccatcgcactatcctgatgatgagttttatgtcttccattacaatctcggcaagaatagctttacaaagaagaaacttcaagttcgtatttacaatgttagaattgtgtctacgtcttcaataattggtctctatctctccttctctctcttgtagtcatcttctctccatacctctggaatatatcagccaaatcaaacaaactcacttctctaagtttcttagccatctcttcaaacataaccacaccttcctcattagaataataatgcaagaacttgctataatcaaacctaggaacttcaagccctctcttcaacgttctctcaatatactttgtagtttccaaccgtttccccgccttgatcatacctccaacgaatatcgtatcgaaattcactaacgggtccggccctttccttccccttctccccaaatgtccttgcaacaacataagatacgtatgcattattggctcgcaccctctctgtatcatcttcctgaaaacctctgttgcttcgcttgcccgtttaatcttcaccaacccttttatcaacccatgatagatactaatatccggattctcaaccccttccaccaacccataagcctctacaactcttcgtttaaccaacagtccatagattaacgacgcccaagttaagttatccacataaacacctctctcacgcatttcatcgaacaccttacgtgccatatcaatcctaccgtttttacacaaccaatcaatcatcaccctgtagaaacccccatccaaatcaccacctcttttcgaaaccataacataaaacaccttagaagcttcatcaaactgattcttcttcagaagtgtttccataatctttttaccagcttcgatatcaacatcaaatccttcatccatcatcaaattccaaagcttagcagcttcaatcaaatcaccaacatcacaaaacccttgtatcatcgtcctataagtaatctcatcaggtttaataaactccttcagcttaataaaaacaaacttagcttcttcaacaagcttctccttacacagagtctccactcctctattcatcgtttccacattatacaaatacccaaaaccgttcatcaaatggaaatagtttacacatttcttcaactctctagcagaagcaagtgttttcaacacaatccgaaatgtcttatcgttaaccaatccacgttttccgatctcttgagctaattcccagaaaagatccatgtttcttgagttcccgatgattgctagcatcttattagaggtagtggaagtgtgggtgaaatcagggtggtgagtttgagaatagaggaagaaacggtgtacaggacgccacgagagtgggaaattgttgcagacttggaggaagaactcgtgagttagttgaaatttggtggaggagagtttagagacgagacgtgaatcaggtgagttctgttgctggtagagaattgtacagactcggagaagatggtcttggtttatcggtgtgattgtggttggagttagctcggtggagaagaagcggtggttgagaatgaagcatcgccgaattgagtttccgatgttaatcatcctccgagaagtcacgacggccacagccataagtttcccggccaatggagaaaacaaaagacaagaactaaattaaataaaaaaaattagggtaaaattataagaggctacaaagaagcccatctaagcctatgtctaaaaatgagtgggaaaatggagatgcgggggatcgaaccccgtgcctctcgcatgcaaagcgagcgctctaccatttgagctacatccccgttgatgtttaaatacgtaaccaaaaacatatataggattagataaaacggtgtcgttagggagcgaaaagttcgttaagttagttagaaagaatagcgaggaaaaacccaggaatttcgcagacacagaggtgtgttcggatctcaaggttgagattcagtcttcttccgccatttgcgaaccatcttcgaaactctttttatatttctctctttccctcccatctctttcgattattttatttatctcaccaaggaaaacaaaacacaaaacaaacaaacaaacaaacccataaatcaagatctctgttttcagacagattattatcggaacaaaatgtcatcatcaggatccgacaaagagagagagacttttgtctatatggctaagctctccgaacaagccgagcgatacgacggtaacataatctctttattattttcgattttaattgcgagaatttatagaaaggatttggtaatgaatgtgcagagatggtggagacgatgaagaaagtggcgagggttaatagcgagctgactgtggaagagaggaatctgttgtcggttggttacaagaacgtgatcggagcaagaagagcttcgtggaggataatgtcgtccatcgagcagaaagaagagtctaaaggcaatgaatcaaacgtgaaacaaatcaagggttatcgccaaaaggtagaagatgagctcgctaacatttgccaagacattctcaccatcattgatcagcatctcatccctcacgctacctcaggggaagctaccgtcttctactacaagatgtgataacagaaaaacactcttctttttgaatcatcatctgcaaatgaaactcaatttgatctggaatttgtaggaaaggagattattaccgttacttggctgagtttaagaccgagcaagagaggaaggaagctgctgaacagtctctcaaaggctatgaggtattaaatttgtttctttagtcaaatactagagaattatgagaagtttggtctgatgcatctgtattttgattaggctgcaacacaagctgcaagcactgagcttccttcgacccatccaattcgtcttggccttgctcttaacttctctgttttctactatgagatcatgaactctcctgaaaggtttcaatctaaaacatcaataaataaatataccaatagagtgtcaactttgttgtaatgtggtttctattaaactgttgcagagcttgccatttggctaagcaagccttcgatgaggcgattgcagagttagatactctaagtgaggagtcgtacaaggacagcactttgatcatgcagctcctgagagacaacctcaccctctggacttctgatcttcctgaagatggaggtttgtctgaaaatcacacagcacacatgatgtctcagaatgtttgagcttataagcagtggttttgttatgatttcaggagaagacaacatcaagactgaagaatccaagcaagaacaggccaagcctgccgatgccactgaggtagtaattcactttaaaatgaggtgtatgaatagttcttgttgggtctaaaggctcactcttttgtttgttcgtttcagaactgatcaaagggcttggaagttgaatgagatttagattcgatgtccagaagggggaggcaaattcctttaaattccatagcttggtttcatcaggaagatgagatcagagacaattgaattcaatcctatattgtttcttttttgtattacttttcgtcttctttattttgttctcaattttcatgtcatcaagtattttatgttacgcaattttattatgatttgatcagcatatgcttttgctatcatacattcccatcagatcaatcaaatgtgtatcaaaaattgccaaacaaacacaaccctggctctaaatgcaaacatgaaaagagcgaaaaccgcaaaaagcttgttatgattattaactctctggacagagtaacaaaaagattattcattgatcctgatggttttattgacattaaaacttcagaatatatagaaaaaagcttatcataagagctgaagacaaaacctaaccatatacaaaaagatgggagaagatgaatgaaaagaaaacatcttttcttcttcctctgtcattcttcttccttatcaaagaaactctgcggcaaggtaaagtcttcctcgtgattcagaatgtctatgtcctcatcatctgatttctaagaaacaaaacagaggtaacagattaataaaaccatcaccacaactctaaacaatgccatgaagtgaaactaaagctatgggaccaaaataacaatcaatgcttgttgtaattactactcaccagcatctcaatgttgtaaaaacgatcgagtagctgcagaacctcatccgcagtgaacggtcggtcaaagctatgtacaggaatagtttgatagaaagactcaatcaataaggatcagagactcatgtatgtattggaagtatgaaagaaactctgagaacaacaaaccttcttccgagatactccatcagaccataaagaacaaagtggcgatgtatccctgcacaccatcatgatcccattagcagaagaaatcaagaaaccaacaaactgatcaatgtgcaagaacaatagacattgaaatgattgcatttgataatggtttctgataactatcatgatacaaaagtaaacattggcagaagcatatagaacgtagctaaaggatcaagatttgagaagtgaaacttgcctcggagtttaacaggaggatagatttcaagggcttctaataaccttagctctaattcaacctgtgactgctcctgagaagcaaatccaataaaagaggaacctttaaaatctcaggaacagaaatggtagagagatagagagaaagagagagagagaccttggagagagaggaggcggaggaaggtaaagctttacagggagagtgtacggacaaaccatcttgctcttcctctttctctttacctcctccgccactttcgtccgttcttccacccattttttagggttttgtggctttgatcccaaatgtgttgaaaacttctcataagctgtttgtgatttgtgtatatatacaggagtgcttgtttgatctctgaactgggccggcccatatttaaggccttgtctttgtgctttcatcccacacacaatgattattttaaaatctaattctttttctgcactcattttaaaatctaatgttattgaatgttattttttgcactcattttaaggggttttagataattttgtttagttaaatatacaaaattataaatctcatggctttaacttttttaagtgagatttgggagattttacaacaaataacatttttcctaaagtcatccaaaaacataaaatcattttaaaactaaaatcaattaatatagggttgaatttaactctttagattcaaagaagataaaagtcaaaatattccaaaggttttgacattattggtcaatgcaaaagcatcttcctaagactatcgatcctaagaaagtaagaacccaactctattggtttccgaaaaagaaaaaaagaagccaagtaatgtattggataaaaatcagattaagagactcggaagaataaaatgaagcaatatacatcaatgaaacactgggcatgatgatccataacttcaaaactagatgagccggggcttcattccttacttctcacaagggttcgttattacaaccatccattttggatttcaattgtttaatgctcggcccctggagtagtctatgttgaacagcatgttcctgcggttctcgcttcccattctgatctgaaacttcttggccaatgcctccacttgatcatcgttttcatcgtccatttccctgacacatctccttctcagctttttcaatgtctccctagagggttcaaatccagccttgatctgtataattagaacatgcattagtttctcagacacacatcattctctcatagaggttaggttttgtctgttaattctggtttaccatgtcatcaacgacggtcagagctgatttgggatcccggttaatgagatgagcatcaaccagtaatgaatacgtccgggaatcaggtttaacacctatgctaaccagatgctcgaatacattcgtggcctcgaaagtctgcaaagcaaatagactagagtcgtaaggccaaatagttaattcatgaaaagaaaatattagagagtgatttgacatagaaacagcaccttcttgacttttccaaatgcatatagtaaagcgttgtatgaatcgatattaggagtcagcccaaaagaggcacttattgcctcaaacgtctgataagcacgatccagatcccatgtgtttgcgcagccaagaattatacagtttagagcagcaacagacttatatggagtatcaccttgactcaaactctccaactggaagtatacctggtggattatgtgacagtgcaaggtcagataagctaagcgttatagctgcttcactctaaaatgcattaatatccagaccatgatactcgacttcgataaacaggttttctggttttgttctattaaatttcacaactatcttagccaaagaccctaccttaattcttgttacgaacaaagctgagaatatatagaatatttacccttaggaagagtcgaggtatacctcatccaatgtctcaaaacctttcttagagcacgccacaaccagcgggtataatgatgtaaaaggtgaaagcatttcctccacaacttctttttcagagtctgcgtatgcggattcaagttcatgaagtgaagtgaaagctttttgcagattccccaacgatgcataggcattaatctttgcaatgtaagatgcagggttggctgccttcctcccacgcagactctgtttcagaatcgtccatgatccttccactaaagatgaactacaagtcctagcagcacttgcaaggcctgctactaccaacccttcatcaacagaaaaaataaccgacggcctagccatttcgcctctagtgatccacttgaacataaattcaaacgcataaaaggccaacttgctattatcctcttgaattgcaacttctgcaatatagttacacagtatccagctagggcaaagagacttgttccgatcaacagcctgcaaaacaaaaatacacatataattgataaacgagactgcaaaagcttcaaatgtcaatagaagataacaaaaaactcatctgtaccttacacctctcgatgatggagaccagtgtatctgtcctacctttggctacacaactacgaacacattcagtaaagacactggtggataacatataaccagatttcagtgccgtgtccataactttcatggcttcgtcattcttcccaactccaaaatgcattccaataaccaaatcatatgattcatcatccggaagagagtccttccccaagaggagcatcctgaccaaattacatcaagtcatgatacattttgaaaagatctacatttacatgacaacagtatcagtagctgctatgcagagataacctttgattcatcagcaaatcttaccgttcaatcatgtaaagtcttaatctttacactatttctagaagcattgttcattgtacaaaaaaggaatctatctacgaactcagagaatctaaccgttcaagcagcttcatggcggcttcagtctctcttgcctggtacatagccttcaaaactagattataagacgctgtattaggttcaacagaaaactcctccattggcgcaacaagatcaagcatatctccagcagaagcacccatcatcaagttagctcgaaggtaatgattgtaaaggttcacatcaggcttattcggcttcccattcttgtcaagcgatcgaacccaaacctcaaaaagctgcttcatgtcagaccaacgctgcgaagcagtccaatccgcaaacatattcagcagcgagttcatgtcaagcgtctcagagagagctctgatacgaggagcaggagcttgatttagaaatcctaatggaactagagattggttgaaggaaggagtgtttgggatcggactacgccaattctcttggtaaagaggacttcctgttgctggattcggtggaagcggcgtggaggttgattgatggtttgatgggtcgtgatctgttgattcggttgcgagcagaggatcttgagagaggaatggtgtaccggaaatggctctgatgggtgaagctgaggtaaaaggattgggttttagggttttgaggagagagattcgagatcgggtaaagagatgagacgccattgttggaaagatttggtttttgagttttggggtttatctgtgtttagggttttctgagttcttctctctcagatgagtttttagacactactaactccggtcgtgacgatctgttctcgatgacggcagtggcattttagagattatccaagaaatctgatgtctttttttcagaagttgtctttgactcctcgacatgttttagtcttttagtataaagcccagcccattaatagatatagcccaaaccttgatttttcaaagaaaccacacatacatcatatgagggagtcttccacaattaaaatttaatatttaaacagaagatatattatttaatgtttaggtgtgtctttaaattaaaaacattgtgtctaaatgtcttggtgaagacctttttttgaaaagatgtctttaatttaaagacctctcacatttaattattaatattttgtaatttaaattttttaaatgttgctaaagacaccttcctcatatgtgcaatggacatgctatggtttttcttcttacaagtgtgtttttgttggttttagttttaaacgcttggtttttatataagttaaggatgtatataacgtcaaatcactttttaatggttggtgttgggatatttttcgcttattcggtattagcgattcagtttgcaacaaatttaagcgagatctttcgctcatggttattgttggtgatgagtttcatacttgacatcagcatgataggaaaacatccatttaaattaaatagaatgataagaaggaatttttatctaagattacggcatattattcatggagttcggtccaacaaagtcccttaatcggccatggagcttgtataagaggttgagtccatctccagagtcaaagagaagcaataaaaataaattactgagaaggaaaaagtgattacttacgttagagctaggtaaggtttatagctatttctggtcgccctgtcaacaccatttcggattatttgtgtgactttgtgacttgtacgttgtaacacaatcacacgttttgtaatgcggatgcaaagtttgtcctgcacatggctccctcgcttagccgctttgcctttaaaaagtacttaatacttaagtttttgcctttaaagagtgtatactatttccaattgttttgtgttcttttccctgtttttctccattattttccatcggttagtgcttcaaaatcaaattactttactttaaaaacatctttatcttattttatcttataatatgttaaataacattttacatttgcaaacgtgtgcatgcatcttttgttgtctttgtggaaagctagactcttatctaaatcctaaaaaagaatgcatcagatgtacgtaaacttaggtgacaaattagtaagaataacaattaacaaagctagtttttcacataaagcctacaatattacgtgcgtcgaccgaccacagtcacacattgactagacgacaggaatgcttttcaccttctctgtttcagagacccacattgctttgagtactcaaaatctaacatttacaagtcatcacacaataatatctgaacttttctttacttaagccttagggtattctgcttattagtacccaagaaatatcataaagagtataaattgtcgatcatcatatcagaataatctcctctctctctaacaaactcgcaaactcacatttgtggtactctcagtgttagacaagtccgatcaagtttaagcagtcatggcggttttgcttcctctgtttcttctctctttcatgtttacctattcaagtaagttctttctatcttctttgaacatttctttgtcccttggcattaagactcaaaatggttccgacattttcgcttcttggttacgttttccttgtaatgctaatccgagatatctgttttgtacagacgcggcggtttgtgtgtgcaaggacgctaacgagctggatcttcagaaggtgatagacttcgcatgtggaggaggtgctgactgtgcacagattcagacgaccggagcttgttatcaaccaaacaccctcaagaaccactgtgacgttgccgttaacagctactatcaaaagaaagcttccaccggtgccacatgtgacttcaacggcgccgccgtcatctccacttcccctccttcgagtattccttccattaaaaccacaacttcttttcatcaaatgtgtatctttttttttttttgctgattctttatttactctgttcttgcagctacgtcaagctgtttatctagttctaggtatgtttcacatcaccttgccttagagtttagattagggttatttccctctgttttcgtttgcttagtgttttctttagatcagtaatgagctctctgatgattctagtcgttgaaatagttcagtcatttgtctactaatgtgtgacagaatctttattactgatttattaccaaaatattaattatatcttcttaaaaattgtgatgatgatttaagtgtgtttataagagtaacctttttgtagttccaacggaacccccactgccggatatccatccaccggaaattcaaccacagcaagtccaggcaccacaaatccatccacaggcaattcaacaaacagcacactacccactaatgataagccgacttcatctacgataacgtttcctgacagtactactatgggaccatctagcagcacgagtggtgatcccaacggtggagaagagctatccgtcagaaccacgacgatcatcttactgactaccatcgctgccgtggcattgagggtttaggtaagatcatctcaagatgatgacgaggacgcttatttgttgtggacggctgagataatgccaagttaattagagcctatctttcttcccaccgaattttaatctttaatttccaattaggattgtgactctcgctcgtcttcttaagtattttggtttatagaaaatcttaatcaagagcttttttcttgctttcttttgtaaatccagaaaaaatgagatgctctttgggttgtattatttttacttataattatgccttcgccaataaagataacatgtttctctttgatagtttcttggttgtttgctaagaagaaaatgttgctacaaggatttcaggttttttttttattttatatttaataacagatgtttggtgttagtgcaccacttatcaattctcaatactataatgtttaatatggtttgtggtaacaattaacacgatctttatcaaggtgttccagaaagcgcaaattgtgatgtttttactctctttttttgggtagttcaatggacttttagttaaaattgttttaaggccttcattccaatgcccaccatcatgatgattttgttctttttttcacctgctttccaatgtatttattactgtaatgtaaagagacttgttcattttcttttagtgaacattgagagtaacatctgcggaatagcagcatatggatcatacagttttaacatcttagaagcgtgtgacaaattctttattctaaaccaaataacaaaattttaacatattagagaaaatggtaattgtaatatctcatttttaaaaagaacagcaataatctttatccttcaaggtaggtttggacgtttggatatttgggttggcttttttggttttagatttagaaatataggacccatttatttatttcaaaacttcagattcggttcagatttaggtttaacgaagtatttaaatataaaaaaatatcaaaaagtatttatattcgattctatgcgaactactagaaaatattcaaaaatctacaaaacccaagtatttttatccgaatatagccaaaagtatttaaaatacccaaaaacatcttaacctccaaatattgtaggcacttaggttattataagtataaatagtactagtaatattcatgatgaaagctaagtgagttcataaaattcaatgttgaatacaataaatagggacaaaatcattgttttctttggtttaaatagtatttttgaatctgatttatatgaatcaattgaatctaacttgtatgaaattattgaatgggagatactagcatcttggtcgctaaatgagataatattttgtgatactttgtgtaacatccttcttataatatgaagaaatgaggtcaataagatttacacatcaagaaaaagaaagctacttgttgtagtgattaataaaaacttcgattatgtccttttttcttaattgataagcttgttgtgagtgatttgtacttgttctgaaatttgaatagatatgcagactttacaagctagtgaagtctagtggaataaaatttctgaagttgtacatttttcaaaacaaaatttacaagaaaaaaaagattaacaaatctttaactgtaagtgtatttctttgtaagttctttgttagcttaactaattgttatgttaacatcattttctgacaatgaaggataaacaaccttacattgctaaggctgatgagatgagggttgcttatgaccagaagctgataacctatataaaaaaactggaacgtccacatcacacaacaaatctggaacatcacagttttatgttcggtacgatagacaagtttattattttataagtaaaatcaaatttaactaaaaataataattagcaacattgtaagtaaaaattatctttcaaaggtaaaaaaaatattttcactcttgtattgtttctttcaccactaaaattattgattaaaatattatttgaatggaaaatatataatatagcaataacttaaattatttgaatgaaaaatatatcacatagcaataactcttggtatacttatattgagaactaaaattaaaagtatttatcataaagttggcgaatgaaaccaaaatgttttaaatcagacacattaaaaatatagatttttaaattagacacattaaaaatatagagttaagttttcaaaaacatatattgatttttcctgcctaaaatattcgggaaataaaatttccgccaaaacaaataaattaacgagaaatagatttgcagtggtttttaactgatttttaaaggaattctaagggttttaaaaagatttttaaaggatttgcaaggattttaaaacccttgtaaatcttttaaaacctttgtaagtgttcacaagagttttaaaatggttcaaaaattattaaaaagatttttaaatggtttacaagggtttttaaaagatttttaaaagatttacaagagttttaaaaactcttgtaaatcttaataaaactttttgtaaggtttaacaagagttttaaaatggttcaaaaagagttacaaaatgttttaaaatagtaacaaattttttttaagagtaaaaaatgatttaaagacttcataagatttttaaaatgatttttaaaagatttacataaaatcatttgtaaattcttgtaaaactttttatattttttgtaaaaaaaaaaattttgtcatctaaaaataattagagttcaaaaaagctaaaataaatgatccaaaaaatataatccaaatttgcatagatataggcttatggaattattcctggcgtagaagagaatctaattataattaattagtgaatttgtcaagcatttgtgaaactatgccaaaatatccaaccaatatatagtttaataaaataaaatatagtttaatatattcagcttcggtcgctgttttggattcatgtacaagctcttcgttgacttgtcttcaagagatcgttcatctggaactctgttctgttgcaaggtaagaaaataaatcttgaactctgcttttagggagcttactagtctaactctggattcttctgcatcttcttttcgctttctaaagtctgttgcgatgaatgataaaactcaactgttttctcaatcctgaaattatggccgaaaactagtgaacgaaggcgtgcacatgatcctatagctgactaggattttaatttgggaactatgctgagattctttagtaatttgatgtttccttgtactctcagtcagaatcaaaccgttgactatctttaatgagaaacaggaacttattgacgaagaaggtcgatgatgatagctcaagaattgggaatatatgttgtggagagcaaaggaggagcaatattatgtctattgctttctctgctctgtttaggcacttggcctgctcttatggctcttcttgaacggcgtggtcgtctcccacaacatacttatcttgattattccatcactaactttttggctgcaatctttatagcctttgtgtttggtgggataggtgaaagtacacatgaggcaccaagtttcattacacaactcactcaggttagaacttgaaggattttgatctctataatggagattgcattgatgaatctcttgctgctgctgctacagattcaagataattggccctctgtgttgtttgcaatggcgggtggggttggtttaagtattggaaaccttgctactcagtattctttagcttttgttggtctgtctgttacagaagtgacagctgcgagcatcaccgttgttgtaggcactactgtcaattactttttggacaacggattgaacagagctgatattcttttctctggtgttggttgcttcatggtagctgtttgtcttggttctgctgttcactcttccaattctgctgatatcaaggcgaaactcggaaaactctcaggggattgtgaaactgtgacccctgaagagtgccagagactatttggaggtgaaagtttgacatacataattgtctgatagtgttaacaagatcactcatcttcacttctttagttttatagtagaagaagaagaagaagaagaaaaagagatggagaatgtaaaggaagggtctgcagcttttcttatagcactcgaaaacaaaagagcaatcaaagtaggatctttctctttagttcttctaagttggtcttgagtttcgaggcaacaacgtaaatcaatctctatgaacttcttttggattcaggtgttaggaaagagcatggttgttggtctgggaataactttttttgcaggactttctttctcattgttctcaccactattcaaccttgcaacaaacgatcaatggcacactctaaaacaaggcgttcccaagctgattgtctacactgcgttcttctacttctcactatcttgctttgtaatcgcggtcgctctcaacattagtttcctgtacaaacctgtgctagactcaccaagatcttcctttagagaatacctgagtgactggaacggaagaggttgggcacttgcagctggattgttatgtgggtttggtaacggtcttcagttcatgggtggacaagctgcaggatatgcagcctcagatgctgttcaggtcacacaaacacttataatcctaaactagaacgtttctttgatctttgcttgcgttttagtgattcttgattggtattcttgtacaggcacttcctttagtatcgactttttgggggatatatctgtttggggagtataggagatcatctacgcgaacatatgctttgcttgttggaatgctggtgatgtttactgttgctgtggggcttctaatggcctcggctggggaaagagagacgcgatttacttagagagctgatcgatatgaccaaaacagatggtgtcgctcttaatatgttgtacattgtggttacttcaattgaaagaaaatgtaaatgattgctgtttgatattcgtttttataagaaatgaaatgaatacagataatatattagtaggtgctacaatctccaaagtttgcaaaaatttgagtttcttctattcggtaagaaactctaatatcaaaaaatctaaatcgctagaaggagggatcgaacctccgaccttgtggttaacagccacacgctctaaccaactgagctattccagcttttgttaatatgtgttagttaacttttatatatcttaccataacaaaaaaaaaattcaacaaagattaatcgtgcaccgggggtcggggggatatttttaagataacattcaacaaagattaatcgtattcaactttattaaattctctatctgtattcaacttttttccactattgaaatttgcaatatatatactagatagaaactacaataatataatcccaaaacatgcatgtcaaatagcgaagtaattccatagtcaatccctgatcccagtcatgactcatgacaacgacttctctgtaatagcgttggaaatcatttccactagcttgttcaaaccaaacatctacatgttgactaaagaaatttcaaaataaacctgcaaaaaccaaattcaaagtaaacctatatgacaaaacagaagtcaattatatattaatttctctctattctataaactaaaatcctaatagagacgtaagacaaaattaaataaaaatatgaaagaagcactttctattttgtgtcttgctcttttggtttcggtttcagaagcagaagtaacaaaaccaaattctgaaaatttcattgaatgccttcgctatcggacaagttcggagaatccaatcaccgattccatctccattgccgataacaccaccaccttcttgtcttcttacttgtcctacacgaaaaacaagaggtactcgagccctaacttcaaaaaattactagccatcgtagcggcgaaacatgtatctcatgttcaggcaacagtggtctgcgcaaagaccaatggtatacaactgcgtatccgaagcggcggtcatgacctcgaaggcctttcttacaggtcgtctgtgccatttgtcattctcgatatgttcaatctcagatctattactgttaacgtattgagcaagaaagcatgggttcaagctggtgcaaccttgggagagctatacgtaaagattaacgaggcaagccaaacgctagcatttccagctggcgtttgccctactgtaggagtaggagggcacataagcggtggagggtatggaaatctgatgagaaaattcggaatcacagtggatcatgtcagtgatgctcaattaattgatgtcaacggcaagctcttgaatcgagctagcatgggagaagatctcttttgggccatccgtggcggtggtggagcgagttttggagttatcctctcttggaaaatcaacctcgtcaaggttccaaagatcctgacagtgtttaaggttaataaaacattggaacaaggaggcactgatgttctctacaagtggcagcttgtcgctaccaagttccctgaagatcttttcatgagagcatggcctcagatcataaatggagcagaacgtggcgatagaaccatcgcagttgtattctatgctcagttcttgggtccagctgataagctgttggcgataatgaaccagcgcttgcctgaattagggctaagacgtgaagattgtcacgaaatgagctggtttaacacgacgttgttttgggccgattaccctgcaggtacaccgaagagcgttcttctagataggccaacgaatccaggattctttaagagcaaatcagattatgtcaaaaaaccaatcccaaaagaaggattagagaagctttggaagacaatgtttaagttcaacaatattgtgtggatgcaattcaacccttatggtggagtgatggaccagattccgtcgaccgctacagcatttcctcatcgtaaaggaaacatgttcaaggttcaatactctacaacatggttggctgcaaacgccacagagattagcctaagtatgatgaaggagctttacaaggttgcggaaccgtacgtgtcaagtaacccgagagaggcattctttaattacagagacatcgatattggcagtaatccgagtgatgagacaaatgtggatgaggcaaagatctatggatacaagtatttcttggggaatttgaagagactcatgcaagtcaaagctaaatatgatcctgagaatttcttcaagaacgagcagagtattcctcctgttcgtgtaatagagtaacgttactctttgataagatttatttagtagtagtaataagtgatgtgggcttgttaaagcttaagttttcactattgtcccatttgcattatgatagttatgttatatttgatctttactcaataagtaatttcatgaaatcggttttaattccttattacacattaggatagatcagttatactttacctctataactcagtgtacgaacctgaaactgtttcagagaaaacacagggagctaggagagttcaaatcttatccttggaaccctcccagatccgtttcaatctgagtttttttgttttttgttttttctcagttcagaatcttctgttttagaacaagtctttgatgtgacctcttcttcaaacgacttcttcttaatgttctgactataataaatacatcttgtgtatgtataaacgtaaaaaatggatacatatgagtatgacgtataaacgtaatgatcacttgaccatgaggccaatgacttaaagtttagtggtttatgttactatttggattcaatatgacttaaatgtttttggttttagtgttaaacctgccataatgtctattttactatttagattcaacctgagttattgaatttttttaaattagatttatgtatttacagatttaccacagaataaataatcaacatttaaaaaaaaaaaatagtcaacgtttcggctatttgaaaagcctattgcatgtagttattatgtaagaaacaaataaaagtctatttcaaactcttcggctatatataaaatcattagtaatgttcaacaaacgttatccattaaaattcgaagtcaaggaggtgcattcatgaaatatcttttaaataaaaaaatcaacaaaattcaagaataattttctcaataaaagataggcttcttgaaaatatgaaggaagaagtctcacttacgacttaactacgtttgcatttatgaaatatcgtttctaatctctgtatttaactttcttcgtactacgtactaaaatctatatattatgattatatattacgttgtgaaaaaaacttgcaaattgccttgaattcaatcatgaaaaccattaatcctctgtcacatacgttaaaatttccattgtattagcctggtcaaaacaaacacctacatgttgacaatagaaaattcaaagtaaacctatatgacgaagtcacttttaaattaatcttctccctatattttgattctataaactacaatcctaatagaagtgtaggacatactgcataacagtaaaaatgaaagaagcatttgttttccttctttgcttgaccaacaagtttccaaagaagtttaatagttgctcaaaaaagaaagaaacactttatgttttgggtcttgttcttcttgtttcgtttatagaagcaccagtgacaaaaccaaattttggaaagttcatcgaatgcctacgcgatcggactactccggagaatccaatcaccgatgtcatctccatcgccgataattccaccaccttcttgtcttcttacgtgtcatacacgaaaaacaagaggttctcgagccctaacttcaaaaaactactagccatcatagcggcgaaacatgtatctcatgttcaggccacggtagtctgcgcaaagtccaatggtatccagctccgtatccgaagcggtggtcatgacaacgagggtttttcttacatgtcgtctgtgccatttgtcattctcgatatgcacaatctgaggtctattgatgtcaacttgtcgagaaagaacgcatgggttcaagctggtgcgacattgggagagctctacgtaaagatcaatgaggcaagccaaacgctagcgttcccggctggcgtgtgccctacggtaggagcagggggacacataagcggtggagggtttggaaatctgatgagaaaattcggaatcacagtagatcatgtcattgacgcacaaatcattgatgtcaatggcaagctcttgaatcgagctgccatgggagaagatctcttttgggcgattcgcggtggtggttcaagttttggagttattctatcttggaaaatcaacctcgtggaggttccaaagatcctgacagtgtttaaggttaacaaaacattagaacaaggaggcactgatattctttacaagtggcagcttgtcgctaataaactacctgatagtcttttcataacagcatggcctaggaccgtaaatggaccaaaacccggcgagagaaccgtcgcggttgtattctatgctcagttcttgggtccaacagataagctgatggagataatggaccagagcttccctgaattagggttaggacgtgaagattgccacgaaatgagctggcttaacacaacgttgttttgggccaattacccggcgggtacacccaagagcatccttctagataggcctccgacgaattcagtgtcatttaagagtaaatcggattttgtcaaaaaaccaatacccaaaaaaggtttagagaagctttggaagacaatgtttaaattcaacagtagcgtctcgttgcaattcaacccttacggtggagtgatggaccggattccggcaacggccaccgcttttcctcatcggaaaggaaacttgttcaaggttcaatactctacgatgtggtttgacgcaaacgccacagagagtagcctggctatgatgaatgagctttttgaggtggcggaaccgtacgtgtcaagtaacccgagagaggccttctttaatttcagagacatcgatattggaagcaatccaagtggtgagacaaacgtggatgaagctaagatctacggatccaagtatttcttggggaatttgaagagattgatggatgttaaagctaagtatgatcctgataatttcttcaagaacgagcagagtattcctccggttcgtgtaaagtagtgatattaagttatctgggcatgtgttataggcttatagtctctatgtagtttgccttgtttaatcattagtactcaataaagaaatctatacgtgagtagtaattagtttcataatcaattaagcatgttcatctaatttccttttgtttatatatattgatttctatttttgtttatggattgatcttgcaactacaataatggattatgctaagaatgtaacaactctgtcttcaagccatcgtaagtacattttacaggttaatgttttaagagttagttaccgtttttatattagaattgtgatttgatctctagtaatagtaataaaatacacgtgtaaacgtacttaattactatttgactaaaacatgtaatatagtgatacaagattagaatccaatattcagcaagaaactaagcctattaaccaaagatggaataagaaattaaatcatatatatgaaagttggccaactctctcctacaacttgacacatcagcatatgagaacttgccacctagatttcttaaatgagtaatacataattagtaattaattcaacatatgaacctatcataagtcgaaacttcaaccatcactctttctaaattttttaattcaatatatccttttttatttttttaggcatttgggtagagaatattatgagtacattttccggatgtaatcttttctttaatggatttctgagagatgtttatatatgagacttagaaaaaaatttagctggtatgcttcattagttacgttagattaagtgattatctcaaaacggtattacactacgtgaaacgtgttttatctacaaacaaatgtttaagtttatctttctgatataacttaaacacatcatctagagagttagaaccgattttaaaattaacaccaatgatgttttaggcgatgaactatcaaataaatttatgttctttttttttcatgtttgtcctctcttgttgttgcaagaaatttttaattaaaataaaatccaacttttatattacctatcattacatatagtattttcaatatattgttaaaactgttaaccatccataaaaaaaaaagaatgtatggggcaagaaataaaaatatgcaaaaattatgtagcaaacatttgaaaaacaatagttattattaaatacaattatacaaaataacaaaagaggagaacaaaatcaaatttataaaaatatgcaagagtaagctaaaatggtgctctactataatcttttacaactctcaattaaaaaaaagttactggaaaaacagattttattacatccattatattattaaaaaggaacaaaatgatattttttgccaaaacatttgtgaaaataacaaacaactatataaaaaaatacatatcaaaaaattggaaaaatattatgaaactagatttatatctaatcaaaaattcgttaaagttaaacaattaggattacaacaaaagtaaaacaaaaatttgatatagaaataaaaatctttattcaacaatattaacccatatgacagacataagacacaaataaaaaaaaaaactatcacaaaaataaatacgcaatatatatgtacacttaccaataccaaacaaaaagtatatataatacacctacaaattaggttcggaataaagccaagtggttcaactatggattaaatgcggtgcggttcaaatactaacaaaattgtatacatattcatatatatgtaatttcttttgttactattcaaacagtaccaaagcatggggtttcatcaccacctaaattaccaaccatttaaaaaattagagtgtcctaaacaatagtaataaataaccattatatgttagacatcattaaaatttaatcctcaaaatataaagaatgggaaccaacatccaacacactcaaagcttttacataggagtaaaaattaacaaacaatatatagtggttaataaaaaatatatagttttcatccttcgtaatacaatctctcttataaaaataacatttctaagaaagaatgataaacccaaatatataaaaaaaaataaagaaaatcaacaacaaaatcccgcgcttagcgcgggcactcacctagttatatatatgaaaattgaccaactttctccatatggatgacaaatcatcacataagaaaatgacatgtgtcatttaacattgattaaattaaaaatcagcaaaattaattgagagaaaatcaaatgtctcatattgtgttaaatcctccattaattcacttcttaaattattttttcaaaataaaaataaaattataaattatttatttaaataaatcaattactacttttattattttctatttttttaaaaatttaatggtcaatggtcatcactctataatgattaaatagttatttgtgttgtagtttagttgtttgctacctaatattagtttagttattttacgttgattttttattattattacgttatggttcatatcttatcatatgaaattctgtcttttcatttttgtatctttaggtaagtttgtaacattgacattcaacattttcaagtaatagacttttaagacgttagacataccatgaaattcaaaacaaatccatttgtcttatatggctatatgcataaaatctaaaaagtgttaataaaataactttttaatttttgtttcatttatttttttttcgtacgaaaactcttgaaatcaaaatatcttatatttttgttgtgtgtattcatgataatgaacaaattttagaatcttagatataaaaataatcagattatacataaaaatatatagaaattgatatttagagttaaaaatgaatctaacaataaaaaataagtacataagatgagtctaattttagtaagtataaaataacaaacaaaaaatacacataaattagcgacaaaaataattaacatatttttatctaaacaattttcaaaacaaacccacaggtaacgtgagaattcatctagtaaaataaaaagataaagcataacacgtatcaaaacaactacacgttttgaaacctaaagaacaactctgtcaaccactacttcgagcaaaacaccaccgcttccagcaccaccgcatcagagccctgattctcggccatcttataatcattaatatttataacaatacaaacgtaacttatttgaattcaattatgagggaaacaaaaaaacacaggaaatgaaaaagaaaagaggaagattcattgtattcgaaatatatatatatatctttacacaaaacttgacaaaaattaatcgtttcttgaaaatatgaataaattcattttcaaaaccatttatcaagtgttttttggcgtagtggctttttttgaaagaaaacaagaacactgatatttgttttttatattttgaagttaaaaaaaaaacaagaacactgacaagaaaatcatgggttttgagtgcacttggaaaataatatttgtgttatagtgctaaatatgcttcttgctctgcggagtttaggaaaccaagatcctaatttcacagaaaataaaaatatgtagaaaagaatatgaatgatgtctcaccttatgttccattattcaactttctccgattaataatctctccattcaacgttcttccactaataatcggaaaacacgctgatgtaataattcgatatgttcgacgcaagcgtgatgaaaataactagtcctctgttaaatccgttgtaatttccattagcttgatgaaaataacgactacatgtacaaagcaaaatttaattttaaatttattttctctctaaatttttattatataaactaaaatcctgatagaggcgtaagacatattacataaaaataaaataaaaacatgaaagcattattctctgttttgtgtcttgttcttttggtttcgattttaagagcagcagtgacaaaaccagattccggaatcttcaccggatgccttcgcaatcggactagtctggagaatccaatcaccgatgccatcttcacctcccgtaacaccaccaccttcttgtcttcttacgtgtcctacacgaaaaacaagaggtactcgagccttaactaccagaaattagtagccatcgtggcggctaaacatgtatcgcatgttcaggccacggtggtctgcgcaaaggctaacggtatacaactccgtatccgtagtggaggtcatgactacgaaggcctttcttacacatcgtctgtgccatttgttatcctcgatatgtacaatttgaggtctattactgttgacgtgtcaagcaagaaagcatgggttcaagctggtgcgacattgggagagctctacacaaagatcaatgaggcgagccaaacgttagcgttcccggctggcgtttgccctacggtaggagtgggtgggcacataaccggtggaggatttggaaatctgatgagaaaattcggaatcacagtggatcatgtcattgatgctcagttaattggtgtcaacggaaagctcttggatcgagctaccatgggagaagatctcttttgggccattcgtggcggtggtggtgcgagtttcggagttatcctctcttggaaaatcaacctcgtcgaggttccaaagatcctgacagtgtttaaggttagcaaaacattggaacaaggaggtactgatgttctctacaagtggcagcttgttgctaccaaagttcctgaagatcttttcataagagcctggcctcagattgtaaaaggaacaaaactcggcgagagaaccattggggttgtattttttgctcagtttttgggtccaaccgataagctgatggagataatgagccaaagcttgcctgaattagggctaagacgtgaagattgtcatgaaatgagctggtttaacacgacgttgttttgggccaattatcctgtaggtacaccaacacgcgttcttctagatagaccgtcgactccaggagaatttttcaagagcaagtcagataacataaaaaaaccaatcccaaaagaaggattggagaagatatggaagacaatgttgaaatttaactttgtatggattgaattcaacccttacggtggagtgatggatcggattccagctactgccacagcgtttcctcaccggaaaggaaacttgttcaatcttcaatactctacgatatggttggacgcaaaggaaacagagaataagctgactatgatgaaggagctttatgaagttgcgggaccttacgtgtcaagtaacccgagagaggcgctctttaatttcagagacttcgatattggaatcaatccgagtggtttgaacgtggatgaagctaagatctatggatacaagtatttcttggggaatttaaagagattgatggatgttaaagctaagtgtgatcctgataatttcttcaagaacgagcagagtattcttcctgctcgcgtaatgtaggaaataggaatatgcgcttttatcagatatagtatttagcaagtgtaataagttacgtgtggacatgaaaaaaaaaaaaaaaaaaattacttggcatgtgttatagcctatgcaggtcatacagatatcaagaagtatatgcttttttgcaaattttgcaaagaatttatgaactctgtcattagtcatctcaaactacattttaagggatgtagttgtcgccaacaaatgaaatcgacaaaataggtttgacgatatctgcattagttaagtattaaaagcgtagtttaagctagcgtactcaaacccagagactgagcattttaaagtttaacgattcttatgcaagcaaattcgtttattataaaattctctctttttgaagttttttttatcttcataaattttaaatgtcactattttcagaaaaatggagaaaatgagattttacgctgtcaatttatgtctcaacgaataaaaagctttatgtactttttttatttggtaaatagccgcgcacgagagggacccgatataaatgctggacgctggaccgactcgcacgcagtctcgcaccaagaatcaaagacaagacttttcaggcgaacccctatacttgttagatgttatgttccatacccaaacttttaattatactacattaaccaaacgacgcaccatcgtatgtctaaacgtttgagtttaatgcccctaaacttttaattcttccagaattaaccttaggtttcaagctgtagacatttttttttttcttttttgaacactcgagctgtagacataagactcctattatcaaagataagaatgtatgggaagatcaaatatcaatatatcatacttcatcaaaaacatcacatttcatacactactttcaagtatacgaatgtttcataaaaaaaaaaaaggttatgcatacgaaaagtctactgcacgttatatatatattaaaaaaaaaacgtgacatcaaatttgtcgtccatcttaaaatgttgggaaaatcgtattatacagtatttacagaaatacaaaacgtaaactattgaaatttgaattcaacgagtgagaaattgaaaaataagagataggaaaattattgtattctagaaatattttatgcataaaaatcaacaatattgaatcctaattacttcaatgaaaagataggtttcttgatccttacgtttccacttacaaagcctcgtttgcgtttatcaaatctctatattcaactacctaaaacaatcccaaaacatgtaaaacaaagaaattcaatagttacgacttaatccctcgcctcaatcatgaaaacgaatcctctgtagtagtgtaatatacgttgtaatttccataagcaaattcaatataatcctacattttgaaagaaaaaaaaaacaaattcaaagaaaacctatatgacaaaagtcaaacataaattaacgttctcactacattttcatctatatatagatcctaatagaggcgtaagacatattacaaaacaaaaacaaacacaatgaaaggaacactttcagttttgtgtcttgtacttctggtttcggttttggaagcagcagtaacaaaaccaaaatttggagacttcatcgggtgccttcgctatcgtactagtccggagaatccaatcaccgatgccatctccttcgccgataacaccaccaccttcttgtcttcttacgtgtcatacactaaaaacaaaaggttctcgacccctaattatagaaagctactagccatcgtggccgcaaaacatgtatctcatgttcaggccacggtggtctgcgcaaagtccaatggtatccagctccgtatacgaagcggcggtcatgactatgaaggcctttcttacatgtcgtctgtgccatttgttattctcgatatgtacaatttgaggtctattactgttgacgtgtcaagcaagaaagcctggattcaagctggtgcgaccttgggagagctctacacaaacgtcaatgacgtaagccaaacactagctttcccggctggcgtttgcgctaccgtaggagctggtgggcacataagtggtggagggtatggaaatctaatgagaaaatacggaatcactgtggatcatgtcattgatgctcaaataattgatgtcaacggcaagctcttgaatcgagctaccatgggagaagatctcttttgggcaatccgtggcggtggcggtgggagttttggagttatcctctcttggaaaatcaacctcgtcgatgttccaaagatcgtgacagtatttaaggttaacaaaacactggaacaaggaggcactgatgttctctacaagtggcagcttgtcgctagcaaattccctgaaagtcttttcgtgagagcaatgcctcaggtagcaaatggaacaaaacgcggggagagaaccatcactgttgtattctatgctcagttcttgggtcgaaccgatgcgctgatggctataatgaaccaaaactggcctgaactagggctaaaacatgaagattgtcaagaaatgagctggcttaactcaacgttgttttgggcagattatccagccggtaccccgacgagcattcttctagatagaccgtcgagtccaggagattttttcaaaagtaaatcagattatgtcaaaaaaccaatccccaaagaaggattggagaagctttggaagacaatgttgaaattcaacaataatattgtgtggatgcaattcaacccttacggtggagtgatggaccggattccagcaacggccacagcgtttcctcacagaaaaggaaacttgttcaagattcaatactttacgacatggtttaacgcaaacgccacaatgagtagcctgagtcaaatgaaggagctttacgaggttgctgaaccgtacgtgtcaagtaacccgagagaggccttttttaattacagagatatcgatgttggaagcaatccgagtggtgagacaaacgtggatgaagctaagatctatggatccaagtatttcttggggaatttgaagagattgatggatgttaaagctaagtatgatcctgataatttcttcaaaaacgaacagagcattcctccggttcgtgtaatgtagtgatatttctgttttataagtttatttatcaagttcaataagctatgtgggcatgtgttatatagtctatactgtatgtaattttcataattgtttcatttgcattatcatcgtttattcattactgaataaaaaatcaaatttccttaaacatattagttgcaggtataaataaaaccatgcagggccgaccctaagtgttttcgggcgtacattaacatggtcctgccaaacaatgattcactgccctcttctccgcagggcgatactaatatgtggtaggttgacaaaaagaagatctattttaggtgataaaagggtaagcgattcatattaaaacccagcaattgtgcattttaattcgaactttcgttatgtgagcccacaagcacaagtttgcgttcacaaatactataaaaacaaattcgacctcaaaattttgtgtttattaagtagtttagtggtaaaggctattcggagtaaccttcagcactcaggttcaaatgtcaagaaaagctaatttttcataatatatatatatatatatatatatatatatatatatatatatatatatattttttactaaaacaaatctgaaatttaaattattatcataaagctacttctttattttagttacttgtagtcttaaaatacttagggacggtttatattaagtcacataaaaatcatgaatcattctattatatactaaaagtataaaccagaatttatcagtagtatcatagttcatcaagaatatcacatttcatatcaaactttcagtatatatacgaatgtctgataaataagttagaaaaaaaaactaaaataattgtgaagcataacaattcacaaatcaaaattaacttgaaaaacatctaattaaaacaaaacaaaaaaaaaagatagttacatgcgtaaataggtttaagtctacataaattaatataacagtagacgcagacacaatttaatggtggtctgatttaacgatgacggataggatcgacatttctactataagaaaagtcaatcgcacttttaaattaaaagataagttatgtatcaaaatttctcggccatcttaaaataatgggaaaataataatatagtcattagtattttacaacaacgtagccttataaaatttgaattcaacgaggggggacaaagaaaacaaaggattcaaagagaagagagaggaaaattcagtgcattctacaaatacatttggcataaaattcaacaatacttaatcgcaattatttcaattagtagatagctaggtttggtcaaaatatgaatgaagtcttaccttaggtttccatttataaaatctcgtggtcacttaaaaaatctctgtattcaactacctaaaatgatcatttgaaataaagaagttcagttgatgcgactcaccccctgatctaaattatgaaagtcatttcccctgtactatacgtattacgtacgttgtaatttcataactttgttcaaaataaacagctacttgacgaaaagtcaaaccaaattcaaaagtacaccgatatggaaaaaatggtcaagattgtcaagttgaaattattgtctccatatatattggtattctataaattacaaagtagaggcataatgaaccaaacagcaaaatgaaagaagcactttttggtttgtatcttgttcttttggtttcgggcttagaagcagcagtgacgaaaccaaattctggaaactttattgaatgccttcggtatcaggctagtccggagaatccaatcaccgatgccatctttaccgtcgataacaccaccaccttcttgtcttcttacgtgtcatacacgaaaaacacgaggttctcgaaccctaacaacaaaaacctactagccatcgtagtggcgaaagatgtatctcatgttcaggcaacggtggtctgcgcaaagtccaatggtatccagatccgtatccgaagcggtggtcatgacaacgaaggactttcttacgtgtcgtctgtgccatttgtcattcttgatatgcacaaactgagggatattactgtcgacgtgtcaagcaagaaagcatgggtccaagctggtgcgaccttgggagagctctacgtgaagatcgatgaggcaagccaaacgttagcgttccctgctggcatttgcgctacggtaggagctggaggacacataagcggtggagggtatggaaatctgatgagaaaattcggaaccacagtggatcatgtcattgatgctgaattagttgatgtcaacggcaagctcttgaatcgatctaccatgggagaagatctcttttgggcgattcgcggcggtggtggtgcgagtttcggagttatactctcttggaaaataaacctcgtggaggttccaaagatctttacagtgtttcaggttaacaaaacattggaacaaggaggcactgatgttgtctacaagtggcagcttgtcgctaacaaattccctgataatcttttcttgagagcaatgcctcaggtagtaaatggaacaaaacacggcgagagaaccatcgcgattgtattctgggctcagttcttgggtcgaaccgatgagctgatggagataatgaaccagagctttcctgaattagggctaagacgtgaagattgtcaagaaatgagctggcttaacacgacgttgttttgggctatgttaccagcgggtactccgaagaccgtccttctaggtagacctacggatccagtattctttaagagtaaatcggattacgtcaaaaagccaatccccaaagaaggactggagaagatttggaagacaatgttgaaattcaacaatattgtgtggctgcacttcaacccttacggtggaatgatggatcggattccgtcaaacgccacagcgtttcctcaccggaaaggaaacttgttcaaggttcaatactataccacatggttggacccaaacgccacagagagtaacctgagtattatgaaggagctctacgaggttgcagaaccgtacgtgtcaagtaacccgagagaggccttctttaattacagagacattgatattggaagcaatccaagcggtgagacagacgtggatgaggctaagatctatggatacaagtatttcttggggaatttgaagagattgatggatgttaaagctaagagtgatcctgagaatttcttcaaaaacgaacagagtattccccctcttttatcaagggtgaggagagacgacgaattgtaattgttagaagaaaattatgtttaccttaactctgcatagataaaaggttgaaatattggattgtatgctctaaattttactagaaatttgaaatgtacactacaatattttaaaatttgttcggtatcttattattctctcaaaaagactttttgcacttaattaataattaaaattttgagaaaaagaacaaaataaaataattaggaaacatagtttttacaaatattattaaaaaatctagaaaaactattcattttaaaaaaattatactcaaaaagttttttttttctttcttggtgaaaacagatgatgataaaactaaaactaataattatgaaataaactatgacttttaattatgtaataatttagataacgattcgtttaatattacaggctcatcattcgtcagtcattgactcgccataacaaatgcatatcctaaaacatttcctacgggtacaaaatttccaacatgaatatattttttcgtaattgagacacatagcttgtaatattcgaaaagtcttgaaagtttggcattctcacggatagatggcacagtacaaaaactatgtacgtagttagcgcaaaaaatcagctatcatacatataacataccgaattcacaaatgatataacatcgccatctatggtaggtataattttatgtatttttgtatcataaatctttttacaataacaatttatactgcattaatatatatttgtgtaccgtcatatttagggttataatatatgcgtatataatagtttttgagaattattatatataatttagttatgacattttatatatgatataattcactcttttaaaacaaatattttttgggtacggtagaagtattgaactgttttttattggctattatatgtggttttacattttagagagctatatatattgatatacctaatcttgtgatattgcatactataaacaaaaacatatcgaaataaaaatcatttaacataaaatctgattccaatctaacatacagtacataagtttataaaatcattcatcatacataacgcaagtgtgcatctaaaatacataatacaagtcatattgattagcttagtcttaaacttatggatggaccattagaaatcaaagattgcagttaataaatatattgggccatggaatgctatgactgggccgggtcataagaaaccaatccggaggaagcgaacagaaaataattttgtttcccgtattactgtaccggttcaaccgtcccggtatattgaatcgaaccaaaatgtggcaaaacctaatttctttttttcctaagagagtttttatttttattttctcagaaccagaataaggagacgaaaggagcacaggcccagagacccccccataaacatcgtctctgagaaaggtgctgttcgaattgagctcgatcttaactacttctgttgttgaatttcttgccccgttcggaaaaattgagcttaaactactttgaagaaaccttgtggaatttttggggatgccatcaatggcgcaaggagaactcaagagctttgtacaaaacagtagaccgaaccctaaatctcctactgtttctcccttcaggttagtctctcacttcctactactaaccatagtgtctgatatgattcccagaaaaaaagattggattttgcgtaatgatttgtgaattttgacttaccacagcatgagacaaaagatagcagaacatagaagatctcttcctattgcttcaggtgcgagttatatataaatttggttatgtctttttattttgtgatatgttcattgctaactctgtcggtgattgtgttaaaaccagtggagaaacgtttggttgaggaggttcaaaagaatgatattctgattatcgttggtgaaaccggtagtggcaagactactcgtaagtatgcttgcttaatctcaactacacttgttggcaaattaaaagtgaatgtattgatgttgatcattttttttttttttttttctcacatgaagaattgcctcagttcctctacaatgctggattctgtcgagagggaaagatgattgggataacacaaccgaggcgtattgctgctgtgactgttgctaaaagggtagctgaggaatgtgaggttcagttaggccaaaaggttggctattccattaggtttgatgatactacttctggttcgacaaggttgaaatacatgactgatggattattgctgaggtaaacaaaataccacaacttataattttagcctaattttatgaaattgtgaaaatctattgctgatctctgttttaacaaactgaaaaatcaaaaactgcagagaagcgctgttggatccgcatctttctagatattcagtcattattgtcgatgaagctcatgataggagtgttcatactgatgttctgctggctttgctgaaaaaaatacagcgtactcggtcacagcctgttagtgagaaaactgagtttggtaatgtagcatcacaagtacagacaacaacaagggatgcgaatggtcctcagcagaatggtgtattaaaagggtatcaaggcagaaagttatctccgttgaagctgatcattatgtctgccagtttggatgcacgagttttctctgagtatttcggtggtgccaaagctgttcatgtgcaggggcgacaatttcctgttgacattctttacactgttcatcctgaatcagattatgtagatgccaccttggtcaccatatttcaggttattggtttggtgatctaaatattgttcctgcctctaccagtatttgtggaatggacttgcgaatgttctagtaaactaactctgtgtctgatttttcaatttaattcttttagattcattttgaggagaagccaggtgacatacttgttttcctcactgggcaagatgaaattgaatctgttgagagacttgtccaagaaagacttcagaacatacctgaagacaaacgaaagctactgccacttgctatcttttctgctcttccatcagagcagcaaatgaaagtttttgccccagctccgactggttttcgtaaggttagagaagtttagctatcatttgcttattttggagatttggttgtcaactgtgttgagatgataataaaccagtgtaaggtattttatttgcacattttaggttattttggccacaaatatagcggagacatcgattacaattcctggaataagatatgttatagaccctgggtttgttaaggcacgaagctatgatccaagcaaaggcatggagtcacttgatgttgttccagcatcgaaagcacagacgcttcaaagaaggtatcatgttctacattcactaattctttccattcaagatggtttgattgttttgcaaaggttagagttttacctgcaattttatttactttctgttttttttttggctttgaatttagtggacgtgcaggacgtgagggtcctgggaagtcctttcgtctttatcctgagagggaatttgaaaagttggaagattcaactaagccagagatcaagagatgcaatctctcaaatatcattttgcagctgaaggctctggggattgatgatatagttggatttgattttatagataaaccttcaaggtacttccttttgttgtggatatctctgtcactcttatactgagaatatccctgattgggtgctataactaaagtccttaaaggaagtttgactctcatagctgaagcattcattctctaatggtttttcataaacactttgttgatctagattgtcatctgatgttaaacaggggggcgattataaaagcattggcagagttgcattcgcttggtgccttggcagatgatggtaaactagagaatcccgttggctaccaaatgtcacggctcccactggaacctgtatactccaaagctctaattttggccaatcaattcaactgtctagaagaaatgctgatcactgttgccgtgctcagtgtggagtccatattttatgatccgcgtgagaagagagaagaggtgagtataccaaaggaccatgatatattcacattttcctttatatcaacagttgattaaaccagccacctttattctttgttttgccaggcaagaacctcaaaaaaccactttgctagcgttgaaggggatcacctaacttatcttagtgtttatcgggagtcagatgagttcttggaaaagagaaaagcagccggcagtggaaacaatattgataaaattatgaaaaaatggtgtaaggagaactatgtgaatagccgttccttgaagcatgctcgtgacatatataggttggccatgccttcttcgtagataattacagttgactgttatgccttatgatgaattatgataatcacacaaaggattgttgcaggcaaattcgtgaacatgttgaacagataggctttaatgtgtcttcatgcggaaatgacatgcttgcgtttcgtagatgtcttgctgcatcatttttccttaaagcagcacagagacaattggacggtacatacaggttggttccgttcttggttcacttattgtcttaacatgtaaatacgcctaatatactctactcttttgctcacaacaaaaacttccattgtcatctaattacttgacagggctttggaaagtggtgaggttgtccacatccacccaacttctgttttattccgtgcgaaaccagaatgtgttatcttcaacgagctcatgcaaaccagcaagaagtacatcaagaacctcacaataattgattccttatggttgtctgagttggctcctcaccatttccaaacggcagagtgaattttgcttataacaaggtaaaacacaaccgatatctctcatcagtttttgaacttggcatagacagaacatttacatctctatacctctgttcctagagattacaagtttctgactaaaagcttctgatgaacaagaaagcaaaatctctggttctttttgtaagaatcatttctctctctgaatgcagatataactatttctattctgatggagatcgaacacggataccactggagactgatggtaaacatttagaggaaactcgtttggttgaaagaagatgactgtggctgagcttagcattaatttataggtagcaagacgaccaagcttaatctatgctcttttatggagctggagacacctaacatttcaggtttattattgtatcttgtaatagatttatacttttttggctttcgcctgcacttgactcatcttgaaagtcaacagaatgtgccctccatgttccttcactatacatctgtctctccgtctttggcaaccaaatttaattttacatataacaatttataatagagtattgtcttattatatgtcaaattacaaacattccaactctgagcacagttatttctcagatatatttctgattaccagtcagatttagtcaaataattagttttttgagagtacatgtaatgtctagtgcagcacataccttttgtcacaacgtgaaggtctcaactgtttcgttatcaaccaccaacagaggcaagcacgaatatgggaacatgtagtatctataaacattctcttttgttgttttgttgagaaactaacacatagcaaattcagaaaaatggggaactcgttcacatgcatatctcacgagcaggaacaacgtcccaagaaatcttccggcggaggaggaaataactccgggaaatacaaatacgtgcgtcgtctgtcgctgatgccttcatttagaaggaggacgctacttccttcgctctcctgctctggatcatcatccacttcgtcttccaagaaaggcgggatcaaagcaaagacgaagaagataagagagagacatcatcatcatcatcaagaccacgaaaaagactctcatataattcaagagcagacactagcagccactaatctcctcttcaaccaaacccctcgtaacagcaactctgttgttcctcctagtttcagacgctccacctctgttgtatatccctctgctcagccatcgggtaccagctcaggacccgtttcagccgtccagactcctaagaagtcaagcgcgggattcgtaagaagctctagctctaggcaaaggtccagtaccgatcccatgatcaagcctaaccagctcgttgacaaggcaagtacttgtcttaaaactaatgaattagcctaattaaccatacgttaagattgtttcattgcatgaatttatactttaaaatatgataactgttttccaaattcaaacaacaatttttttatgttgattaataattaaaattagaaatattgttatatttgaagaatattaattttcgcatgcaaactcaaacaaaagctgctctttgagcaatcgcagcttatttatgtggtgacatgtatgtgtgacaggagctaaataaggtggaaggttcggagacgaagcggtttgtgctggttcatggtggtgggttcggagcttggtgttggtacaaaaccataactcttttagagaagcatggtttccaagtcgatgctgttgagttgaccggttcaggtgtgagctcgattgacacaaacaacatcaccagcctcgctcactactccaagcctctcctccatttcttcgaatccctcaaacccaccgagaaggttccaactttgtcttataaaccagtctttccagtgctaattgatgatgaaaagttacaacaattggatcatgtttaagaaattaatattataacaggtgatactggtgggacatgattttggaggagcttgtatgtcctatgcgatggagatgtttcctacaaagatcgccaaagctgtctttatctctgctgctatgttggctaatggccaaagcactcttgatctctttaatcaacaggtactttttaatcatgtgtatagcttacatttggtatttatttgtaaaaatgataccataacaaaattatagaattaatagatagaccttttaagtctttttaatcaaataacatgatatatcatgtaaaaatagcgtgtcaacggataaaataatgttgtatttgtttagcaaaataaaataaaataatgttgtatttggttaaattatttttaaaatatcatgctatttgcaaaaatgttacaatttttattattttttttttgcaaaaatgatacataaatccaagttttcatatatttgcaaaatagtatcaaaattgattaacatagtgcatttaccttttcattaagataaaaagaatctctaatgcttacaaatttatttttaactgtattaatatgtaattctttcagctggggtcaaatgatctgatgcaacaagcacagatatttctgtacgccaacggcaaaaagaatcctccaactgccgttgattttgacagatctttgcttagagactttctctttaatcaaagccctccaaaggtaaattaaaaccgaaccaatcaatcttataccggggcacttcgatttgattactgaaccgatattttttttgtatcataggacctcgcattggcatcggtatccattagaccgatcccattcgcaccggtcagcgaaaaggttcacgtgtcggagaaaaactacggttctatccgacggttctacatcaaaaccatggaagattacgctgtaccggttcttctccaggaagcaatgatcaaattgaacccaccggaacaagtttttcagctcaaaggctccgatcacgcaccgttcttctctcggcctcagtccttgaacaaaatcctcgtcgagatatctcaaataccgttcaagaaatcatcctgatatttttgtaaaccggatacatgtaaaccaaaccggttctaggattcttgttacattttagagatttgtttttgaaagttgctctgacagtgagaagaacaaaacccaatttgggaaacttgttcttaatttttttatttatttttgtcatttattactatttaatttttcattttttttctaacaacattatatattatctatctggtaatttgattactggatttaaacaacagtaatttgccaaaaattcaatggacgttatgatagatagcgattactgtttcataatgtttctgttggaaatatctgttttggccttttatatagaatatgaagttgatttgattttgcttcatatatcgtcgtcgtcactggcattttgtcttttagaggaacaggaaatcgaatgggtcgtggagtgagcgtaggtggtgggcaaagttctttagggtatctttttggtagcggagaagctccaaagccagccattaacaatgctcctgcaccatcatctgaaactctgcctataagtgctgatccttcaccaaaacatgttgctgctcagacggttaatgttaccaagcaaatacctgctggtatcaataaatcctctacaaacaactacattcgagcagatggacagaacacaggcaacttccttacggtattgattaaataagattgttgtttaattttatcccctggatatgtcatttaccaaaagcaaaaaccttgtccacaactagcatatattttcaaaagcatctctgaagtttcctactttcctattgcggttattcatttgaaatagggaaatttgcttgatacttcggtgcgttaagatatgaaattaaacaacgtcactcaagtttttgaatgagcgtttgctaggagtatcatttcttgtttacatataatcatctaaagatctacgttttggtgaaccaaggcacagtttactaacgcagttttggttgaatgcaggaccggccatcgaccaaggttcatgcagcccctggaggcggctcatctctggattacctcttcggtggtggcggaagcaactagcagcttcttctaattcacaactcttggtcttgtgggaaaatatgctctcatcttttttaacttggtcgtctcttaaatctgctttatctcatggtgggttacgccccatgctaattaataataaagttatgtaatcgataatagtccatttaaaccacttagctcatttagttaagactttgagagttaagagtgccccatgcaatggtttggaaggcgaattcgacgcccttctttgtaaattttttttatccttctattgaactttttttatttgttgctagttccaacttcaacggaaaaattaacaaaaatgccacattttagtggacctatttccatttctaccacatttgccttcactttttttatttataccacatttataatatcaaatgacaatttatcctcatatttatatatctttcattctctattctatctttcattctctcttattgagaaaatatgttcgtgtccatgtccctaactagatctctaaatttagtcttcccatttcttgttcctacttacttgttcccccatttagtcttttaattttctaaaagtcattgtttatcgtttttattctcagcgtccctagtttttattttgttttcttttgaaattattatcaaaagaagcgtctctgagtatattcttttttcaaattgtttcatgcatggtggctttttccatttttatttgcatgaattgattatatatagattagtattagactctcctccatgactcaatgtatttatactgttatgatttctctgtttggacgttgtgggactgggacgtaattgacacttgctcgataatgagcttatgatgttgcttttcaaacgttgatactatatgattttatgacgttgatactttaagaaatttacaatggagttcaaactccactgaaaatgaaaatgcacttgaactccactagtaacaacacttgaactctagtataacaacaaaacaaaactaaattccttgtgtgccaaggccaacattagatacataacatactctatctagtctctacatattcttctttttgctcacaacgaacaagagctttctcttttaagaaaaatggcttcaaagatttaccaactatttaaaggaaaaaaagcttccgatctttacaatgtgctaagttatggatcacaagtttttggcaaagttaatgaagttctcaagaacaaaaaatgctagggaggaagagtccaaaagagtaaaagaagtaactcttattgtgaagaagaccgaagatcctcctcaaattaaaccaccaacactcaaagaaatcatggctacacatggtacgtttaatttttctttctttttttcttaaatttgttttggtaaaaatttttttttttatatctttgtgttattttagttttttcttagatgtttttcatttgaagtcaatgttttattacaaagatctcgtagtttttccttagatgcttaagtctatatttttatactaagatcttttagtttttccttaatttgttttggtaaaaattcttaaaaaaaatccacaatgttatatttttgtgtaattttattttttgcttagattttttatttacttaaagtctaatttttctataaaaaaaaattaagtttttcttagatttgtttggttaaaggtctatatttttctaccataatcataattttagtgtaattttaattattttcttagatttgttttggtaaaatccacttccacaatcttatttttattattattgtgtttgacaggaattactcgtgatccctctccgttgctctatttctctcaaatccaccaagctccacctcctcaaggacctcaaccaattactgcttacgtggtttttcaatttctcaggagggagctgaatgtcgatgggtttggacccgataacctcgagtaaactacatcatgtttcttttatatttgctccattatataactttatattattaatgtaaggagtgtgatttttacttcaaggttgaatgatgtgtttgtgtcatgattgagatatgcgtaaaatgatttgaacgagtaattttttgcacattgttaatatgtgtaaaaagctacatacgtataacttgggaactttattaaaaatagtaatttataatttggtaattgtggaaataatttaatttgatgcgtaaacccatgaaaggcttaattaggtgttgaggttctagaagttggggagcgtcggagacttatgtctcgttggatatagtctcttctcaatttgttgcaagtgatgctgactgttataaattttgggggatgttgaaatcaatcaaaactgagaaccgagtcctgaattgttttagatttccaagaaaaattttggttgttattttcaatcaaggagagtaacacaactcaaaaaacaaaggagtgttgttgcaagaattagacaaagctgacgcagaccataataccaccagcattatcatcaacagaagccagaaccaacaagatctaacctgcaggattccctttttggtactggctggtcttatagaccgtggacaatttcaattcagaagcaattagcgatacatcaggtcctataattgcatgaacttgagaggagatctcatgtaccaatacaaagcaaagaaattctacaaagaagtggctttctcaactggaacctagagatagagctaccaactttcaggaattgggatttccaatcctaactaatatattctcatcgctatatgatcatagatccaccagtgtctcatactctctcagttacatatactaaaaggacaagcaaggaagatattttggtacatgtttttggtctttctgaatcaaatcgacagatactacataatatcaatgctatatagataacgtcggctttgcgaggttatctgctaccaaaagggacgatatgcaaagacttcttctaataaaaagattgataccagcaaaccaaaccatccattaatcatatataatcatatcgataataagtgtattgaaacatgatctcaactcaaaatctgataaaaatgaaaaataacaattatctctctatcatatctgttattcaaaaaatctataatgggggtgtaaagttgattccccaagtaattcaatatcccagagcatatcaaggtaagaaagagactactacttattaagtcttgcgagagaacaagacactaaccgctacagagatggtgataatggagacaggaacaacccaatactgctttgtcaagtcaaaaagcttctgaacagagtcttgtggctggtccttcttgtagatcttaagctcaggtatttccggtaaagaagattcatctagctcgccaataaaatacttctccataagttccctagcatctttgctgtgccctgcgtcttcaaaatcatccgttgcatctttgccttcaacaacaacatcatcacatttacttggattagagtagagacaacaacagatcagtcatttagcaaggatgggcaagaggaagaagaagaagcttacctgcgacagcaagaagcacatcatctcctccaggatgctcatccatataagaggatacatcatagacctgtaaagagaacgcatcagccatatcattttcttggggaccaagattgtgaagtcaacacattatcaacaaaaaaaaagaggaagaagattctgattagctcaatctaactacatataaacagcaattacaagattcttcattagattctataggcaacaagacacagatatggtttctgaaagcgaaggaaacttcaggattcacaaacacatgaacaaggattgaaattagaagattgagaaaaagagtagaccttgccgtcgatgacgacccagcagtcatcttgcttgttgtgagttgcggcttcttccatggaataaagctttgtgagtgtcggcatcttcttctgaaactgagtagcgagcgaaatagcgaatggtctttgatttttctctttttgggggttttaggtttggtcgaccacgcgaaaagatgagcagactagaggagaaagataataagagctagagccctctcagcaacgacgtcgtttaatttaattatttataatttcatattcttaattcctttttggaaaattagcaaaaatggaataaaaaattactgagaaatcagaaatgccttgtaagttgtagcaacgaatatacataaaagatttatttatcatcatttatcatttacatcttcgtacaattttttttaactagattagaaaattctcaacttgtaagccatatggtaaaagtttacaagcataaaaacttagttgacttaaaaatgtaaccaagccaattgaagtcattttggcaaaacatctttttgttgttaccctccttgattgattttgagtttacttttccggatggcaataaactaggagctgaccatcttcacttgctatgcatatatttctggaatcatcagtactgatgcatgaaactctttgacctgacaaaatccatgtaacaatattaacttttgagaattgacttcgttattttcatggatatatctagttaaaacttcaatcagtgtatacctttgaaatcatggagagagccgagtttagtgccagtggataagtcccacatatacacaagtccatcaagtgtgcctgctactccatggccagatattgtaccggcaacatcagccctgtaaaccacaaatccatagccaatgaaccatggatttagaaatgttaccattcatataccatttacttctcatataatccccaaagcaaaactaatttctcggaacatggagaaaccagaggagcctgagaaagacagtatccatgtaaagaaagagatgtgtgataatacctcggatccaactgacttcccaatatgagttggtctttcacaaggagagcaagtctccaacatctaactggactttctacacggtcacatttagcatctgagtcaagatcagtagagactaaaagccaaatagcagtgtctttgacttcagctggaaccaatgttttgttgttgaccccttttgagaaccataattttgttgcagctaaaatcatgtcaacgttatcctcgattgtagaatgactatgtacagggtgccatgcaaacaagctcgtcggaatgaactcaaagatcaaattgctgggagatacaaatcttgatactaggcttcgcttcgagatatccctaaatcgataataaacaaagttagcaggccgaaacaatggagacaggaagaaaaagatcaagcaaagttggctgctcctcatcattccctagcacggatagtgttctgtaatttaacaaagagatgggcagagaaaaaaactctaaagatagagggagagagagaaagagggagcaaaataccatattgtaaattctcctataccattatgcccaataacgagatgaggacattttggtatcttcttcagttccatgatgcatgatgatatgcaaggatttgcgagtataacatattcttcggtaggaccactgcaaattaaggatacaagaacattagcaaaaattccaatgatgatccaatagctccaaatagaagaaggatctgacaactattttaagagaagagtaatgaactctgatgagagtacctccaatgcgagttcatggcccagacaataaggtttccactcttaacagctgcaatgagattgttaggatcgcacaccaccacacactgcacactgtcatctgcttgaagttttgtcacaagagaaacatgaccagttttcacctggacaatcctcactgcattctcctcaaaacaggctgatgtacaaatcaaacacgagcaatcagtttccctcttcctgcaaaaaagggaaaataataatctcttagctaatatctttattctgtatctctgtaccatatgaaacaataaagagtccaaacctgcaataaggtgttttgatgttgccagttaaaataagatgcagcccgtctggagtgaagtgcaaattagatatctcgagtgttccctgacgaaatgtaacaactaacaactattagataactagagaggaaaaacaagtttaagagaagaaactacgaaaaagtttaatgaatttacatttccactagatttgtcatccacaatggggagtatggcaggagtgtgaccaatgatagacgggaatcctttgcttggtgcctcagctgacatcttgtacataaacagggtcctaactctatcttctgtagcaaagctcaacaccaaaatatagatttcatttccaacagtcctgagtaatactgatgaaacaggcatgggatgaaagtagcagccaagcagctcaacagttttttccatctcattgttgatctttacatctctgttgagctttaaatttgaactagctggaaattcctgcacagacgtgcatttctcgctagtattttccttatactgagactctgtagaaggtggttcagagacttggatgcccaattcctcaccaatattggcttgacaatcctcaaattttgaagctggaaatgaggatgatgatatacttgcacttccaaaagcatgagctgaccttgtatcttgtggtaccacacacgcctcattgctttttacattggtgaatgtgttgttattcaccttcactaactcaggaccctggtattgttctgttacatgaccgctttcattacccagaggattcgttctatctgatactgagttggtagacaaggtcggctgaagctccaagatacgtgaggaattaatcggagacatattccttatggaatcatcttctccagtatttctgcaactgtttttactttcagaggataaatttctgtttattcgatgttgattggtcgagactctttttctgatatacaccttatgattttcctttttaactgaacaagctt

SEQ ID NO: 15 - DNA, 106753 bp, Arabidopsis thaliana
aagcttcattggtggcattggcatatctcagatcagtgatatagtgttgatgtgttctgaagaaggtatgtgaggttgggaagaagatatatgggattcttattctagaacacaaagttgtacttcaaagtaattatccgaacagcgaatatgcaacaaacttgattgtaaacttaaatctccatggtgatgaaagaaaaaaaaaaaaaaaacttaaatctccatggttagaccatttcggtttctttgatatagctgctgcactcgtcttcctagatgaaaccttaaatggaacagtgaatatgcaacaaacatggccctaacacatgaaagtctattcaaattatctactagattacgcatgcgcacttcttgattgctaagtctaatatttgaatgaataaactctctcttctgttagtaggcactcttttgacggcagtttctattcttggtattgagaacctcataccaagcatgctcgaactcgatcttgatgcaccgtttcccccagaatatatatgttccatttgaaaatatctcacggctgctagaactttaatttcacttatgtcctaagaccggagtttatggaatattgttttaggttaagattaactcattgatgcgcagaatttgagggataggtaagagaaaacaatctttaccttcatggtactagatcattcggatggtatagctcacaaaagaaacaatcataactgataagcatagagttcggtggtcaaatcaagaaaaattagcaagtgaacatggaggtaattataaacttagcgagagctatgagtaaaaaaccatcaatctggttgacaacattattacataaaagtctggaagtttccagccctgataatggtgcaaactaaattagtctccatcaagttgtcaagaaaaggaaaaagaaactacaaacaaataaaccaggtcaaattatttgatacaaatgaattgttttccaaaacaaaaaatcttgactagtaaatagcacttcaggatgagcaagttttaagtagctcagctgctcaggtatggtgaattatttttaccttctaccatacatatccgatccgtagcctaccaccccaattataatgatattgttactatttgcttttgagctaaaatgaacagaaaacaaagaacgatgtctcataaatgaaatgacttgctaaggttaggaagaaaatgccacagataagaacatatgtccgtcttctttgatggggaaaaaacttagcaaaagaagaaaaacatgaaagtttgaccaaaaaaaaaaaaagaagaaaaacatgaaaagagtcctgtctcaaaagaatggccacaaaataaaataagggtttagagtcctgtttcatatcggcataatagcggagccattctggtcaattgtcacagatttttaatgcagaagattagagtagagcagaaaggaatataaaacttcaacatacgaactcagacctgatcttgcagtggtaacaatagtgataggtcggttcgaagacagcaaacctaccagaaaaatagagatcagacgaagtaaatttaagtcattcctaagtctttcttaatcggctctatcaaataacgtttctgcgtctctttctctcgtccttagctgctatgtctaacatacgatctggttgtggcaatttgtggaagtctatcttactttcacagaggcatatgtttaaaagtgcatgtatgatgattttatctgaattgatggtttgaaatttgaaacctaagtccaaaatatttaaacactggcaatgtcacagattatacatcaaaagaaaaagaggataatagtctggaaatgtgagaacaacaccagaaagcaacagaaagaaacagagcaaggccgagggagaaaccatggagaaggctagaatcaagaaggaagaaaccactgagcatcgttgaagttgaagttggagagaccgtggaagcgtttgacggtctttgttgcaagattgaagacaccgatgtcgaggcatgacaatttattgtgacagatacgatcatcacgagtgaaataaatggagttaggctcaattccaagggtatggtcagcaggcacggtaatacccaaatcatagaagagggcctcatcacctagagaatgtacctcaagaagccgggtgtcgagggttttcgggtcaagatctttaggatccctcttgtacagatggaacatcctgtgactttcagaggtacctaaatcgtacgtaaagacaaccaaaacttgacctgctcttgtaacagcaatgcctttgttagatgggatagacctcttttgcttcatacgttcacgttccttcattgtcatacttggcatccacattggaagcctatgtttctcggatacatccttgaaaccatcttcatcttgtccagacaaatctaagtgtcgaatgaactcacgggtggcatagacgtaaagattgtaacctttcagtaccatatcgtttaaacctcgtaactccctctgaacctcgagctctgttggaatctcgcggtaatgatcatcccctgtcctgcaaaaccctagaaatgggtacatttcaaactgccacacaacaacgtagtttccattcttgtcgtcaacccacaaacgacctctcagatcttcggcagcatgaggaaattcatcacgaaatggatcctcatcatccattagcatatgcttgacattctcctctccttcacgccaaatcttaaaatggctacccttaaatgattctagtggtggaagatcgatcctcttctcgctaaatacatctataatatagagtttcattcgggaatctaccaccagaaaccacttacctgagtttcccaggaatcgataccctgaaaagtcactcttcgtctcgtaaaccctatcattgtatgggttgtacacactattactacgacaaccatccttttctgcagaaagcatcagcaatggagatctggcttttggccgctgaatcaaattcgaacgcagagccttagcagagtcaagcgttagcgtagtagacctttgcattattgggacggagatcgattatctcgtgctgaaaaaattgagcaagggttaaattgtgcacactgtgtgtaaatataggtaccaagcccaataacagcaacaaaaaatattctaacgggtctgtggcccaatataacatcatcatgaattatttttggttattcaagattttgagaaacgtttgtgtgtaaactcatagtcgtagttattcaagattctcttgatattttcaagttgaattttgcaagagatactctcagttgtacaagcttcattggtgtcattagcatatgtcagatcagtgatagtgttgatgggttctcaagaaggtattaatattatgaggttgggaaaaagatatagaattctttatgaattgaaaggaacctattcttaccaaaaaaaaacaaatgctatgtcacagactgtgtttgaatttgagaattacgttcagttgtgtgtttgactcaaagtagacggtattgcgacgatccgttcatggcttcatagtttttgtgtaggcaatggcatgcgatgtttagtgagacatatagtcgattttgtttccacattactactaattcaataaagctatagttagttcaaaatggctgacttttgtttcgaagttgcttagctttgataatagaattattagtttcgaattttatgttagtctttcaaaacgaactagctagtgatgtaaaatcgaatttatctgcacttgtacatagcaaaaactctttattttggtttgtattttgtaaacatcaatgacgtacaaaattggttatgacaaatttaataaaccaaaagaaaaacaaatataaacatgttgtgtagaatgtagataacaaatttctgcaataaggttattcagctgtctgaatgaacctaaactatgctaagatagtgttactataagtcttagttaggtgaacaaaaacggcgctcattggagctcctacaaagtaaaacgacaagttgtttctgcgtatggcggacctaaaagtttttttagaaaattaattgaagccatccggtttttctgttctgcatttttgtaattgcgtaaatcgcctaattgctcttgtgtgctgctgcttctgtgtcgccaagattcttcttcttcaaccttgaaaaaccctaaaagttaaccgccactgcgatacggcaccgtatttgacgtttccgccggacgaatctagaattcagtaatggcggctccggctgccgcgacagcgagggcacaggcgctctctctcctcgccgctgctaataaccacggcgatttggcagtgaagctctcgtctcttagacaggtgaaggagattttgctgtcactggagccgtctttgtctgctgagattttcccctatctcgcagaactccacttgtcccgtgaaattctagttcgcaaatcccttatcgagtgagtccctttagcaattttacggtttctccctttcttcttccactccgttttgatgttttcccttgctctgcacgaacttgtagaagaatttttatgttgttgcgtggttagggttcttctctatttttcccaatctggagaaaagtttatggttattaatttgtctgacaaggtaagagactggttgatcgattcttctggatggcaggatcattgaagaggttggtttgcggatgctggatcattcttatgttctagtgagtgtcttactagtcttatcaagggacgaggatccaactgttgcaaagaaatctatttctgttggcacaactttcttttgcaccatcttggaggagatggcaatgcaggtccatactttttctcaagttggatatcttgtcgttttaatatgcatatttgttttgaaattccttcttgggatcttttcaaaatcctacatttggagtcagtaattaccagcaaaagtattttacatactcgtagttgctgatgagattgaactattattaacccatggaaactttcctcttgttttcattttcaaaacttcggttggtttttacgttgatgctacttatttgaagtttaaggctagtttcataaggctgcattgtaaatttctgttttaagtttttgttggatattatatatgatactctcgctgatatgtattattcttgatgatctctgcagttccatcaccgtgggaaagttgatcgttggtgtggggaactgtggacatggatggttaagttcaaagatactgtctttgccactgcattggaggtatgctggctgtttatggcctctctttttttttgtctgtctgttcctctcgcgaggtatgatctttggttgagtatttgttctgcttctctctcaatttaaggttttctaacccaagtccgttgtttctttcacaatagcctggttgtgtaggggtgaaagttcttgctctaaagtttatggagacttttattttactctttactcctgatgcatctgatcctgagaaagcttccagcgaaggtattatgctctaatcatgcagtttttattattattattccgataatattgtatttaaccgggaactgcaccatacatgatttgttcattttgttgcgcgcatgtcaacttttcctactctactgcaggaagtagacatatgttcaatatttcctggcttgctggcggtcaccccattctgaatccagcaacgctcatgtctgaagcaaataggacatttggcatcttagtagatttcatacagtcagctaatcgtttaccgggtgcattgacgatatctgttattagttggtatgtttctgaatccatcccactatgcttgtgtaggtacttttctttatattcatcatgatattaattgtgcttttgcctgttacagtttttgctattctacttttttagttgaaactatgttagttcttttggtcctcagtatgctgatttattcttgcaagttagttgatatgggtgctttggcgctcataaattttagtttcttctcgttaccttcataacgtgaaaaactcattctcacatgtatgttggtgagaaatgagccatacataatgtgtctgtgtcctgaatgatagggtgatattagaagtcttcttttgcataagttttatgtgtgcctcatttttgtgagatacaacaataagcagttgatcttccacttgtaagtagttttatgttcatgattggctgtcctacttgcactttcagtgtgtcttgaatcaaattagcttgtaaatgaataacatcaggggaatgaaactctggtttccatttgtatgtctactaaacttttggctgggagagataaagcgtggagacaggttatagcaccagttcaacccctatgataaggtttcagctaactgaatcaagtcctggggaaattggctcagttgatgctgcaccagttacagatattgacagttacctgggtatatgtggagctccagtatgcaagtgataaggacatcagacaatggatagaatggtctcagctctagtagttagaaatgtgttttccaagtaacacaggaacatgtttgaggaaatttttatttggttgtgtgaactggatgtatatatacacacatatatatatatatacacacttatgactgttatgttgggatattaaaaatgtatacattacagtataacagtttatgcacagtatcatttggcaatcagagctttctagcctatattttacttgccttgtggttttatcttctgttttgatgatactgctaggttaggtggatatttgatgtggttgatgatgcgttgaataaattatactgcttgatcttatattatgtgttgctctttagatggatatagaacttatctcatggttatcaattgtcatgtccagtagggggcatatttctagtcactttgaactatcaaggttccttcatctgtttgatagcaccttcagtttaacttagaaatatctgcatagcaaactaatttgtcacttctgaattttatttcaaaaagtagtaattacctagcagatgcttgtttgtttgaactaatattactaatcaatgcttggggacactatctttgaagaaagatcaatgtcaaatcctgagaggagagacattgtctagagagatggtttttgatttttatgttatatgcgtccagaccagaacttctgactcctcaaactgtgataatgggatatgtaaaaattttgattgaggatagtttcgtgttgttaaggagctaatttgctgtgttgtattctgcagaatcatgagtaaagtttctcacaggaatggttgcgtaataaagttatatcaaactctagtatatcttacgttagataattgtacatgttaaaagcagctcctcacacctagggatgtttctttgacatcagtatagttatttttgtttgctgagatgtgcagtgattcattaggacatgcttgtaggagcatacctgaaccatttgcaattttgaatatttcctgtttaagcactggtttcttatctgacagtagcttatctttcagtcttgcagtggtagcaaggaagaggcctgtccactacaacactgtcctctctgttctgctggagtttcacccaaatcttgagacggttaaggggtgccatgctgcaagcgttcagtattccattagaactgcctttctgggatttcttcgatgtactttctcaccaataatagaggtatagagttcacactttatattatttttgtttatgctgaaatatatctaaattttagtcatttgttactcttcgtatctttatgctaatgaaaagatagttgtttttaccacctttctggtcaaattctgaacctttggttatctggtttgtctactctaggaatgtgtcatgtcttttttccctcaaacgtgccattcattttctttagtaaaaggtcttcaatgactacaagcaagcgtatgttatttagtgtcatttcatagagcgaagccttgtagtaggtcgaatagagtgcaaagaagtgtttactttatcagatcatataacacaagtatcatgtattttctttttgtttgctgatatttcttttgttactgagataattttattttatttgtattttagtcaagagacaagcttcttagagcatttcgagcaatgaatgctgcagatgttgctgaccaagttctccgtcaagttgataaattggtcagaaataacgaacgtgctgcacgtgaaaattggtcaggcaaggtaaatgttttgttttcattctttatttcctactttttctttagctctacatcacctttgatcattctgaccagtaacgtctcatgataaacctacttttcagaataaccaggtgattagtcatcaaaattcttgggatctgtcaaagaaacgaataatgccccagggtgaagatgatacaatcaatggagaggttgctccgaagcgcgtacgccataatactaacatgcatttgacccagcaagttcaaacaaatgaatccctacagggacctgtctctatcaatggcatttcctctggtaaccatctttcggacagtgagttgactccagtggaacaaatggtttcaatgattggtgctttgcttgctgaaggagacagaggagctgcctcacttgaaattctcatttctaagcttcatccagatatgcttgctgatatagtaataacaagcatgaaacacttgcctagtacccctcccacgttggcaagttcagtggctactccagcagatattgtggtatcttcttctacaaataccgtgcattctccgactcctccggcacaacttccttttgatccaatccttcctgctgggtcatcgttttccgaagtgcctagcttgagtagctcggttgccgaccctagacgcgacccaagaagggtacaaacttctatatgttgcttgattctttgttgaatgttctttctccaagataacttattcatagttatgcaggatccccgtcgcatggatccaaggcgtttaaattcatctgtgggaccaacgtcactccctgtaggtgagggtaaagaatcagttccagtacagaaggacatctctaccttactgagtaagccagtctcagtttctgctgtcacgccaggggctactggttctgtacattcaacagcagtagagcttagccagaataagatgatgggaagttcaggaatcagaataattgatccgcctgaatgcagagaggacttgttgactgttcccaatgagtgttcttacccgtcaaaggaaatatcatccttagatgttccactatctccttgcagggatgatgaaggcatcagagagacaaagtattcagtcccagatttggatatgttgtctgtcccagattttgatcaacattcgccttcagcatcagtcccagattttgatcaagatccccctgcagcatcagacattactgcaccagaagaaagctatcgagagttggaccctgttccgtcatatgttgaacttaccacagagcaaagcaaaactgtaggaaagttggctattgaacggataattgaatcaaatagacatgtctttgggtttgattgtaacaagatacgcatggcattgattgcccgattgattgctagagtgagtgcctattttatatctgttacttgtggttttgctgtcaattctggctaccacttccatcatttggctttatccttagggaatccttatttcaagttcttcttgaattctttctttctacgaaaataaatattttttatatactatttttccagatcgatgctggcagtgatgttgcaaccatactaagagagcttattagtgtggaccatcgagaattcaaggtacttgttggctgcagtgttccccaaactcagccatcacttatttatataggttttggattttgaatgtcttttccaaatgttgagagtgtgttggctgtcataaatattgtagcatctttaaagtacgcagccagtgcactgctacagtgcaaatatttatttgtctgaataacttttccctccaattcccagtaaccgagagtctaccatatgtctatgcaaacctctgatctgtttgcttctttgtatctaggggcacgatcttgttttacatgttctctaccatctgcattcaatggccattctggacacagatgaatcctctttctatgctactgtttatgaaaattttctcatatcagtggtgagtgtttattcaacttttttccaattcttgtttatgaatctcgcttattaagatgcttactgtaggcaagatcatttctggatgcgcttcctgcttctgacaagtcttttagtagactttttggagaagctccacatttacctgattctgccataaacctactggatgaactctgctccactcgtcatgacccagttggaaaagaagtttgtgatagtgagcgtgttacccaagggcttggtgctgtttggagcttaattttagtgcgtccaaatgagcgaaaagcatgcttagctatagcattgaaggttacttatctttcttacaaaatcctgtcacattgcagttatgtaattatgttatattctcagtgatggagaatatgagaattccaataatataagttttggattttggttgattgaagaatgtatagcaaattgcaattacagaagcagtgtgttctgatctctaggacccagaaaggaatgctgtgctcgaaactttctttaaatctacatgtttcatggccatatggtcctttagatttttccgtgttcctaacgcatgttttattcctgttatcgcagtgttctgttcattctgaagaagaggtccgcgcaaaagccatccgacttgtgaggaaattagtcccgtatagcactatggtttttatttactgctggtacagcaattctaattgatgtttctcaaatgcatgcacaggtcacgaacaaactatatcacctaacatacatagcagagcatgttgagcaatttgcaacagatatgttgctgactgctgtaaactctgagacaaatctctcacagactgcatcaactgcagaaggaataaaaatggaggtaatagccaataacacttcccttgagtgcgtggagcttagttctctttaaattgtatgtataaaggctcattagtctatagaacttattagatgtcagttactttttgcgcctgttctcgtaagactctaaattttcgcttgtgagggttacctagttttgcaatgaacgcacttcagtttgtaacctcgaatttttgtgggttgattatctgacaattattttcaggcaaaaagccagataactttgacaactgagtctctagggtctggaaactccgacattccctctcagcaggatctacaaacttctcgtgaagtttcagttatatcaatttctgaagctcagagactgatttctctgttctttgctttgtgtaaaaaggtctgcgtagtctttggagatgctccttatgctcaaagttattttctatttaaagattcccctagatctgatgaatctcttttttcagaaacctagtctccttcgacttgtctttgaagtttatgggagagctccaaaaatggtaaaccaggtgagttagtctattcctaataaaccctcgtgtcacttatgtgcatcacatgtggcatggtacagaattatttttggataggatattacttttgattatcagatttttattgtgttggggcgatgtatggcatttcttatatgcatcacgtgtgttctcacagttttaatgggagtaaatgatattcacaaacttcaaattaattcattttggtgacttactgaaatggttcaggcttttcatcgacatatacctatcctaatacgagaattaggttcatcttatacggaactactccaaataatatccgaccctcctaagggaagtgaaaatttattgacatatgtaagtgacttctgtgtttccttgtagtaaatccacgttagcctcaaaagtagattctaattttgaataacggtctgttacttgtgaaggtgttgcaaatattgacacaagaattggcaccttctttggatttgattgctactgtaaaacatctatatgaaacaaagctaaaggtttgatttgttatgaagagctcgctcgtatctttttcttgtgtgtaaataattatgaaaataaagttcagaaagccttacagaaaatttgttttgcaggatgtttcaattcttattccattgctttcttcactcactaaagacgaggttagtttttactttctttccatagcttctgctctttcgctgtacgtttaccctgaagaaagatgaagaggcttgttatttttattatatatcttgttccctcgttattttacctatctgaaatgtggaaataaataagaactagtaatcatggaaggcttctgataaaaattttggtcctttgctggtggatgcgaaagatgatgttttgttattgcctatcaattgtggaaattccttattttatgacggacattatttttcaatgtaacaggttttgcccatctttcctccccttcttaatcttccgcctgaaaagtttcaacttgcacttgctcatatattacaggtatatgcatattctccaatccatcctttaattgctactcactgatcatgctatgcatagaggattgccttgatattttaatatctgatgaaatgagagattggtttgtccagttacaaaacaggaacaacagttcatttcatgagtatattttacacacctgtagtttttctgaactattccgatcttttgtgttatatctgtgatagggttctgctcacacaggccctgcacttacacctgccgaggtactgattgctatccacgatattgttcctgagaaggatgggccaccacttaaaaaggtatttccaacttttctatctggtttgaaagtacttctgaagggacttgttttctgcactcatttgctcaaaatcagtcgtgatactagacctacactgctgtgtatattttcctattggcatgctttctttactatccctatctcttttcgatgcatcagctctgcttaagttctgtggcttttggcaagtgtgcataaggaacttataaaacttcatcatcagttgcatatggccacgttatcataacttacgtagaggcagttatcataaatcgtaaattcaacagagacgaggtcatccagaaattagggtggaaatggtgggttgggagtgttggggattcaaataatacgttggtttaggtgtgtacgtctattacagaattttggtagcgtgaagcattgctgctatgtcatatcaaatgccctttttattttctgctatttcctcactagtaaaataggtatttcccagtaacttccaggcaagctatttacgcgaatattaatgattcatctcatgtcactcgctttaggaaggtagaaaactaggggcaatcagcaactggctaattagattgtcagagttgctatcgacaagattaatctgttttacccatggacgaccctttatgaaattctgccactatgctagctgttctatctagtctctattgatagcagagtcacatttgactgtgtttttttttgttttttgttttcagataacagatgcatgctcagcttgctttgaacaacgcactgttttcacgcagcaagtcttagcaaaggccctcggtcagatggtatgtcaaatatcatggaaaagaacttcctatttagttagatattgagatctgtgatactttttggtttcaggttgatcgaactcctctgcctttactcttcatgcgaacggttatccaggcaatcgatgcttttccaacactagtaagtgtcctactataagtttaaagacctccgtgacatatttacctaaaagcttttttattacaaaagaaccaaagtaacagaaatagaatttgaaataacccaaaagaactgcattcttcccttggcctaacccaaagctctctctagcttggatgggtctcacaaacccttaattataaagaaaatgtcaaagtaaagtgcaattagtatagttttagtctaagctatattataagattgtttagttgagaagtgacagtatatggtttaagtctatagatcgaactctggattcgtttggtcagaagtaaaagaactttctgattttttgtccaggttgattttgtaatggaaattctttccaagttggtgaggaagcaggtgagtaatttaaagatcaaacacaaggatcagcattgagacttattttctattttgtgtggttatgactgaatgtcttgccgtgtcttttggatgcagatctggaggctgccaaaattgtggcctggcttcttaaaatgtgtgtctcagacaaagccgcattctttccctgttttattggaggtacaagaaaacgttgtggaagaatatacgagtttagtgtattacccaaaaatccaaataactctttggtgttgttttgcagttaccagtgcctcaacttgaaagtatcatgaagaagtttcctgatctaagaccttccctcactgcttatgcgaatcagccaactatcagatcttctctaccaaagtaggtcttctaaatcaaacagacactctgttatcctgtattttaagtaccacatgtcagatactgaatggtgatgcatgttttaacagttcagctctttcagttcttgggcttgacaatgggcaagattcacgttcacaaatgcacccttcagatgcaacttcgtctattcatggggcggccttaacgtgactctctctggaagaatatcgccaagttgaagttattggaggagacaaagcacagatgattagatcctgtgtcaatggtgggagactggctaccacgcgtaaatctgactactaactacatgtctttgggattagtagcatgaccagtatggtagcccagcgtgtgtggtcattgataatttcttatttgttgccctttttgtgtatattatgaaaatttcaccttggccgtgagaaggggttcacatgtaatggatgtacaatcgcatcaacgttgttcctataaaaagagaagataagagttgaggataataatatcaagaccaaatatcaattgccattgagtttatacggtttcgagcccatcccaatttgagacaccctttaggtcctgtagtattatatctttttcctggaaaatgtaaaatcttatattcaacgatacctttttcctggaaaatgtaaaatctttcgtttacttttacaccctatctaattgtttgctatagcatcaccatttgtgttctgtattaagtatggtttttaacatgcggttgtttctttctatttcttctcttcttaggaagtgatgatttaagctctagactctagtatagactagactttgattatataggcggtgaatttttttcttcattgcaaaaaaaaaaaaaggaacaagaagaatttggttagccataggcgaatacaatgctgtggaatcatcaatgtccgaaggtaatataattccatctcatactaaaacaccaaggccttcaatttaattccaagcaactcttgcattcaggggaggctcacgattccagcaacgtttatccaaaatgcgtgcctcatcactatcctaaactaccctcgctcgtcttcttccattcttcatatgcttctttgatatatatccagtaatgagcacagcacatggggtaagtagaaacctgcaagacatataggagggagaagtcagatgattcttctgcaaacaaacacgcatagcaccatcaataggtagagaatccgaattttgattaaggatcaactagctagcttcaccctttccaaatccaaacaaacactgacttttcacggtcttgagttcacattaaaagttcggaaccttataaatcttaccagtcaaaactatcttcaaactatttcatagttatgagagcctgcagattcttttggatcgcccacccttgtggataagggacatccagggcatccaagtgaagatgccagttcagtatactcgagcaagctggtggaacaccttccatctcgctttcatcagccaccacctgctctataaatgatgtctcctgcttggaaacacacgatgtcatgtataagaaaagggttgactgcacaccagagaaatccaaagatatgggaaaaactcaaactcatacctggaaaccctccttcactgtgtctagttggcgggttggatgtgaaaagggacgtcgccaccttttagggtcccagagtatagtgctgttaaaagcaaatcccgacatatcaacatggaacctccttagtcttttactcttttcattagtgtgccatcctattacttgacttccattgcatactggaccttcaaggatggccttgtttttgctttgtgcgagcatagcaacaggccaagtcccaaatcggctacacaatgtaacagataagtatagcaaattaaaattggggacaaatactttagaagaagaaaagctttggaaatcaagccatcagcatttacactcaatggatgcttagattaaccaagacaaggtacaaaaagaatgtttaacagagtcctttccaataacgaaaaatgaagtattctctcaagtctcaaacaaacaagactgagcacatggcagagcaagcagaaaagtaagaatagaggcaggcagacaaaaaaaaactcagattctgtgcagaaaacttcaaattctcattactttcaacatcaaagtaataggcgtatattcggtgttcaacaacactagaatcacaaagactgcacgcaataaagccaaaaagatgccaataaaataagcgcagacgatagagttgctcaactaacaaactcaaacataaaccgcagtctctctaataagtctatttcacacaaaattaccatcaattagagacagcaaaagtaatgagcagtctttttgagtcacctgatttgtctcaagctttgaaagagctcaagcgagtagatattgtcatcatcagcaaagtagacaattccatcaagcttatgcaactcaatatgttccaatgcagtgtttctctgatgcactcctctatccttgatactcgtcatgttcctcttgcaaaccaagtgcctgtacatcactcccgtcttcctcagaatctctgaggtttcaaacgacgccacgttaccctccaccactatccacagcacaggcgactcaactagtctcagcgtttgagcaaccctgttcaagtaatacgcctgcatcgctctattatacgttggtgtgaccacaattagaagcttcttcggcacaaaattgacctccttcttcccattttcagtctccgccacgaaactcaccgcatctacagctgcttcttcccgtttcctattttccaaccgttcttcaacgtagggctgtttgatctcgaaggagaatcgatcggaaccgtttacatcttccatttttccgaaaggtgtcaaacctaatacaaatccaagaagaaagaagacgagaaactggtaaaacggtcgcctccatggacctctacgcgagcttttaggatcagacgttactccgaggagcttggtgagatacgaaagaaattgcgaagaattgtgtttgctgctactaccaccaatggtgaaacctttgtgtgaacctccattctcgtgagaacgatcgtgatacatcggcgagagagttcgccggattgacgccatcagataatctcactccaccgtcctatttttcacagctcccaaatcaaacatccaaaacagcaattttcgcagagatccgcaccaagtttgcaggagaatccgcgtaggatatagcaatttcaatctgaagtcggattgagtaaggtggttggttctaactcaaagtcaccgatctgaaacacgattggaatggatccgtcgccgccgagatctgaaattgagctggcggagaaagttgcggaaaaagcactgtttgtttgtttgttaaaaaaaaatctttaagctatgcgagttcgtgggacacgtggcgagattatggctcgtacactctggcaaaataatgattacgtttaagtttcgaggaaatggtctactatggtaaaaacaataattaaaacataaattggatttagttgtaattgtaaacgctgccaaaaaaagaaaacatgattaataagtaattctaagttttatcatcatataaagtaatggcctctacttacctattatccactatacttgaatgagttctaagttctaattacattgaaaattttatttattttagcggtaataaaaatagatataactcatatgtcaactagatttactattaaatttagcatgcatttcttacatcattgcaacacatatggtacaaaaagatattatattccgttttggtttttaacggtgcaaaaatattagacaaaattttaaaacatgtgtaatttacagtcctttttcgaaagtttgggttattttaataccagttttctataatatcaagcttggcgacgtaatatttgattaagcgattaattttttttgctgtggtgttttttttctttttctttttttttcaagtagaattagatttagtattgtatgtttgaaagcttagtcaaaaaaatttctcagttgttttgttaaatctatttttaacggtacaagcagatatctagtttcaaaaatagatttacataagtttttgtgtcaaaatattaaaaatttatgtagtgatttttaattatttattaaaataaaaatgtttaggtttacaagatgttaaatctattgatttgatctcatggcaaaaaacagataaaaacataaaataaaaacaatcaatttatcgactcaacgtatgttgtgaagcaaacggtatcagataaacgatacacgattctaaagttcttctaaagtgagctacaaaggaaaaaagatggctatgaaaattgtaaagacttgcaaaacaaaaacccaaagtagcataagcctttcattggagggcttcgtaggtagttcgtccatgaacccgtcattaatgaaggattataaataaatgtgatgaatatactgttcttcgtctccatccttctgatcaaacgacttggatgtacaaatccaaggtactctgaagcctacacaccacataggtgtacaaatccataaaatttgagcaataacccgataatatagcagaaagcaaaaaaatgtaatccaaaacctaagaaagtcctataaatgataatcatataagcacataccttgaaaagctcgaagagcttcttaggatcttcttcttttttgttgaattcctcgcggatccacttctcatccttagtggagaagggtttgtaggaatcttcttctggttgatagttgctttgaaagaagaagctccaacaagcatgtgttataagctgtctttctggtgtgggaaacagaactcttatatgaatatttataaaggtgttcattagtttccttcaatgtttacaatcttcctcatgatttcactagagacatccagagtacaaacgacttcgggatcggatgatttcttaagaatttctgaaacttttgtggatacttcagccatagaacaaggatcaaggattttaacaactgagtcattgcaagttatgtttacttttgcatactctcctccagtcatgatagatgattttacaaggagagaaaaacctaacagagaaaggaaaaaaaatcaaagcgtagagagtcgagaggatcatattcgtttacaaaagaaaatagaagatcgttactttagagatgaagatcgtgatggtttcagatagatagagagagagagacgagcgaggaagtgaaagaaaatacataaacttctattttatatcccaccctttttcttactatcaacaaaaaaagaaaattgtttaatgtcggttttccgattgttaaaaatatccgcttaattttcttacacacattttttattacaaaaaccaacttcaaactaaataattatgagggttatatatatgaaggataacaaacaaattacagattaagaaatactataatgaaggataacaaacaaatgacacattaataagaaatacttaaatttggcatgggtccgagatagttgaagactgacccctgtttaagcggattccaacttttaccaccaatttagctctccccaatcttgcttactactttcccttcccaccatctctatccatttttcctatctctctcaaaaaacaaagtgaaaaatataaacggaggatgcaagaactgccggattgtttgtacgaggaaaaccaaccaaccttaataactcctttatctcccacaccaaatcactctctctacctttcaaacctcgacgaccatcattttctcagattctctatcaagtacctttaccttttccaaaaatctatatcccctctcaccctgaaagattcgctctctagggttctagttgattactaccctttcgcgggtcggataagagtctccgatgaagggagcaagctcgaggtagactgtaatggagaaggcgcagttttcgcagaagctttcatggatataacttgtcaagattttgttcaactttctcccaaaccaaacaagtcttggaggaagctcttgttcaaggttcaagctcagagtttcttggatattcctcctcttgtcatacaggttcgtaatcatttattttatttttttcttgctgggaaacttatgatttcaatttcaaaagtcaaaaccatgactcgtattgtttccatattagttaatttcgtgaaagaattatattcgaatttgttttggagggggataaacgtagctcgaatattttaggtttcttaaagttagttggatcgactgttctgtttaaatataattcgtaggaataatctaaattgtttttaaattcctaactcctaaattgattcggccactttgttcttttcaaattagaaatgcatacttttactggtcgtgcataagcattcgatgtatcaataacataaagttattttctactcttaaaatacgtgaactttaataaagagattatatggaagaaaaagaagggcgcatagagaataatttgtctgttcaatcatactctttttcttttctcgtttacacgaaaaacaaaaccctttttttcttgcattgaattagttcattctataagtcgttttgttcaactcatgttatgtgttttattaaaactgcgtttctatgaacttacgtataaagtatcagcaagtttgattattaacgcttgaaagctagtcgaatgtaataataaatcgacattttgatatcttacgaatattaatgcctcaggtgacgtatctccgttgtgggggtatgatcctctgcaccgcgatcaatcattgcctctgcgacggcattggcacatcgcagttcctacatgcatgggcccatgcgaccactagccaagctcatcttccgacccgaccattccactcccgtcacgtattagatccgcgaaaccctccacgtgtcacacactcacatcccggtttcacccgaaccaccaccgtagacaaaagctccaccttcgacatttccaagtatttacagtcccaaccattggctcctgccaccttaaccttcaaccaatctcatctcctacgcttaaagaaaacctgcgctccttcgctaaaatgcaccacgttcgaggcactagcggctaacacttggcgctcgtgggctcaatctctagatttaccaatgaccatgctggtcaaactcttattctcagtcaatatgagaaaacgactaactccagaacttccccaagggtattacggtaatggattcgtactagcttgcgccgagagcaaggtacaagacctagtcaatggtaatatttaccacgctgtaaaatcgatacaagaggcaaaatcaagaattaccgacgaatatgtaagatcaacgatagatttactggaggataaaacggtgaaaacggacgtctcgtgcagtttggtcatttcacaatgggcgaaattgggattagaggagttggacttgggaggaggaaagccaatgtatatgggtcctttgacgagtgatatctactgtttatttttacccgtggcgagcgataatgatgccatcagagttcaaatgtccctgccggaggaagttgtgaagagactagagtattgcatggttaagtttttagacggaaaagataacgaagatgagaattctcgtgcatgctaaagtttctatatacatttcagtggtctataataaaagagtacttcacttgtcgatttttgattggttttaatatgttttatgtacgaaatattttcttatatataagtttgaaaacagaaaatagacatatgaaccccaataaagactaattaaagagagtactagagtagctcacttgtcgatttttgattggtttttattaaacacaaaatggataatatgatgagtttaaaaacagtctttctccatgctagtatgataatgatattgactgatcgatgaattcaaaggaatacatgttttagtttagttcatcaactttagcttaacgtacggttcttaaatcgaagccaaaattcaaataaatattaatatatatccaattttggtaatctctatcagattatagctttatgaaaataaaaaatttaacaatgattcaaattgctaaatgctaatatattggttaaagtgttattttctgcaaaagttcaaataatgttaagactatttctatgtagtttgatcatttcaatctcaaccacataaaaaacgacactatatattaattcgaagcccatatccattatcgaatatgatgaattgcttacaatcataaagtcaaagcccatatccattttataaatagagttagatatttatcttttttaggtcgcaacaccgcaatagatcttttccccaagtttcagacaaacataaagcagcagagaaaattttcaagtttcaaagagcttttccctcaccaagcaaaatttgggttagtgaaatctcaaattttgctatccaatttcgttaatccttcctttgttagagtcgatttcgttgtcctctgatctcatctcttgaatcaatcggctcctctaatcctttacctccttcacgtttcgtaattattcgatctgttttctgcagatttcgtgaatttaatttaatcgcctcctcgattttaatatttcgtgatttgatagaatctgttggaaatttcttgatgttgcgataatgggtcaaaaaatatatatgtgaagctgagatcagatttgtgtcgtattatgtcccaaagctatttaacaatgaatctgtgtttgctatttgcagatatttgtcagcaaaatctgcagctaaattgggacttgtcttgttagttcaaagattgaaacttttttggttaattgtttggcggaagaagatttacaatgggagaggagcatccgagaaagcggtctagacaacattttgaagcggaggcgagaaacgtatcgttgtttgaatcccctcaatgcgaaacctccaagtggtatttcagcagggaagagattgagcgtttctctccatccagaaaagatgggattgatcttgtgaaggagtcgtttttacggtcttcgtattgcaccttcctgcaaagacttggcatgaagcttcatgtgtaagctcaccatagtattactttgttgttttgtcatctaggaagaaatagtgtttgttctttggttgtttgctagaaaatctacttatgacgtctccttgtcttctgatatttcttggtacgtttttttagctaaagagggtgcctaatgcatgacaatggatagcctaactgttgaattttgtcgtagggccactgtgggaggtggtctggaggttctccaactatagattctcgattttgtctacatttatatctcgtgaatggaagaattatgtaataatagtcagaatttggtgtccatgcatcatatattgactcacttgtcacttctcatcggcaatgggaggatttgcatctgttgtgaatttgcttgggagctgttcacctgtttagacatgaccttctgatctatatgtctttgtatttgtaattctctgctgggttatcaaaaccctcagctgtgttcctacctttaccaactgatgttcttagttttctgagcaagtgcacgtctctctccggcctacttttttgaatcatctaatcataggtactggtgtatttttgtcttctgcattactcacgtgtgtcggaaaagtttataaatgctggtttcggtgaaagtgatgtctagctattagttgctgcccgagatatcataacattgaccttgttcatgttaaaggtttttgacaatctcattgcttcaggtcccaggttacaatatcatgtgcaatggtgatgtgccacaggttttacatgcgccaatctcatgcaaaaaatgactggcaggtaagaatgctttagtattcatatggttcatcaattgcgttcattggagctgacatgtaaatattaatgattgaatagtctgcaacagatatattgattcttcttacaaaatttgggttatgagcaatataatgttgatgaaaacaagtcaaaagtggttatttaatagttattcagtcttcctggttaattagaagtgtatatgattgctgctaaatatttccacttcggtttctcactcggtgattttgcagacaatagcgacttccagtctgttcctcgcttgcaaagctgaagatgagccatgtcaactgtccagtgtcgttgtagcgtcttatgaaataatttatgagtgggatccttctgcctcaattagaatccatcaaactgtaagtgtatacatacatctatgtattggtaaattcgcactgtgcattttgctaatttattacatgttgctctgcctgtaggagtgttatcatgaatttaaagaaattattttgtccggggaaagtcttctgctgagcacaagtgctttccatttagacattgaacttccctacaaacctctggctgcggctttgaatagactgaacgcttggcctgaccttgcaacagctgcatggaattttgtgcatgactggtaaagacccttgttaataatatctgcccgatttttcccctacattgagtttgaatcttattatgcattgtgtgtaggattcgaaccacactatgcttgcagtacaaaccccatgttattgcaacagccactgtgcacctagctgctacgtttcagaatgcgaaagtaggcagcaggagagattggtggttggagtttggagttacaactaagctattaaaaggtttgctgttcaaactctattttttcctctggtattattgcagtcatttgatcaagtgagatgtagtgtttctataatgttagcgctaggaatatgtggtactgtagctccagctcatgttaggttcttaccctgtgcacatattgagtttggaattaggtagtggcctgaacgaagagatgtgctgctattgattttagcggttgattaaaaataattggatgttttcattatggtgacagaggtaatccaggagatgtgcacactgatagaagtggacagaaggaggaatatgccacctccacctccacctccaagaagagagttaagttgggcaatacctgcagccgtaaagccggtccatatggctagagcttatccgtttcacagctaccctttgcagtcctatagacaggctggcatctggtgagccattgttgagcagcatgaagatgtaatctctcttagagtcttgagttggtttagcaataaaagatttccgtagagactcatgagagaggcagtgtagcattatatagagatccgagtgaggtgcttctgtctaagttaagcgtctcatgtatgaccaaagtggattctctcgagattcttggtctctgttctcgatagagagagattatgtatagaagtgtcccattcacatgttataatactagctgactttatatcgtttgtatatctggaatctatgtttttggtttctttaaaaagtttaaagttgttttgattttgactaattctctcattgttaagtaatttggtttttgatgaagtgctattaggtctgtgttgagttgagacttgagacgaacacaatcatcatatgatcaagcttataccgatcggataagtaattaaccggttcaattaactacacctagcttataccgatcgtataaaccggtcaagaaccaaaaccgcttggtttccattctagaccaaaccggattctagtttccattattattatcttttttatcggattaaaaatataaatccttatgtcaggagatcccattctctgtctctctgtctttctcccccaactcgcgaacaaagcaaaccctagatcatccatcggcgagtgagacggcagctcctcgtcggtaattccttccaccggcggcgaccactcaccctcagatctctcaatcccactcatctctgtaacattctgtacgctttctctctctctttcttcgcttttgtgatctattacggctcggtctctgtgcctcccagctctattttggagcactgcttcgtctctgtgtttatttggctcctttgtgtgtttctctatctctgcttttcttttgtattgctctgtttccgattttatatccatatgtctctggttatttggttatatctatgtgtgattctttgttcttttttccattgaattcaatagctgactaagatctctgccttttatcttcaatagttgctcaatcttttcgctttcgtaacataatttagtttcttgttgatgtttttgatatctaccaatctcttttcaatttatgtctatatgttgctaaatatcttgttcaatgactgatttcttaaactcagggtggaaattctgccatggcggagcatttggcttcaatctttggtactgagaaagacagagtgaattgccctttctacttcaagattggcgcttgccgtcatggtgaccggtgctcgcgtcttcacaaccgtcctaccatctccccaacactccttctttcaaacatgtaccaaaggcctgacatgattacccctggtgttgacgctcagggccaaccactcgacccgcgtaagattcaggagcactttgaggatttctttgaggatctttttgaggagcttggaaagtttggcgagatagagagcctcaacatttgtgacaaccttgctgaccacatgattggcaacgtatatgttcagtttaaggaagaggatcaggctgcagctgctttgcaggctctgcaaggtaggttctattcaggacgtcccatcattgctgatttctctcctgtgacggatttccgcgaagccacgtgtaggcagtatgaagaaaacaactgcaaccgtggtgggtactgtaatttcatgcatgtgaagcttgtttcgagggaactaaggagaaaactctttgggagatatcggcgatcataccgcagaggaagtagaagcaggagcagaagcaggagtattagccccaggaacaagagagataatgaccgacgtgatccttctcacagggaattcagtcatcgggacagagatcgcgagttttaccgtcatggaagtggaaaaaggagcagtgagaggtcggagaggcaagagagggacggttcaaggggtaggagacaagcaagccctaaacgaggagggagcccgggtggcgggagggaaggaagtgaggagaggagggcaaggattgagcaatggaacagagaacgggaggagaaggaagagggaggagcataaaaacagttgtttactcaaatcacaattgctgctatgtggtttctgcgtctgcttctctgcgtttattctgaaatcggtaaaatctggtgatggatttttcatttggctgttctaatttggaacttgaaatgagtggaatcaacttctttagattataaaatgtttggggttactttcttgtagttttgattaggaaaaaccgctctgtccccttgttattgattttcaccagtgttctttagaactttgtactatcttctgttggttaaaacttaaaagagttctagtttaattcgaagttgtctattgttcttcaatgcttgggaatactaacgagtttctgtgtcatggttcagttgtggcactaattcgggtcaaagcacctcagaattttagacaaagataaggggcaaacactttgggcctttgattgcattgatttgtgttccaaacacgtcagaagttaagtctttttctaaaccagttatcgaatgggttagtcttggttgccatttttcaaacatactggcttccaattggtcatgccaaatatgtagcttactagacctatatactttccaaaattacttcataagctgtttgtctaattcacgcaatgaatacatatatgcataaaatactccatatgagtaaaaagatgtataatatagcggaatatataacagaagtcgacaatgcaatatacatcaaccctaaaccataaaatcatgaaggtcattttggcttgtaggcgtcgtcgagtccctcttcagtgatcgttgtggttcttctggacagaatattcaaatggtcatataactcataactcccaaacggccaaaccattgttctaattgtgatgacgagtcaaaccactaatcacaataaattaattacttttttttttgtcccacacatgttcacaaatatatgtttagttaaaaaactcagaattaatcaattacaatgcattaaaatatcgctaccaccgtcacaccaccccaatacatccgtccgatctagcatcaacacccacagcccatcccattgacacggcggtgtcatttctaaagcatcaaacaaaacatgtcattgtttattcttactttacattgactgaatagtctgaattaacataatatatatatatatatatatttacggaattttatcatatgaattctcagttatggagattagtagttcaatagattggccacgtggagaagtctttgccgtcttcgcttgagtggatatattatagtaataaaacccatacgatatcttgttaactttttaaaagttttcttacatcaaaaatatacaagatatcaaagttcaaaaattagaaatctgaaagatcgtagctacatagtgaaagatggattgttgaacagcgttataaagtcacattaattccatgtaataataatacctcaaaatctcaaatacaacacatgcacgtgtctagcttgctgcgtttctatatacattatgcaactgaaaatcgaattataatgatactaaaatgaaatatatgatcttaaatttgttattgttaggaaaatataaagatgaggaatggggaaagtctgttggacagtgatgccctaaatttgagaaagcatatattcccctgctctaaagcctttgtcctcttcttagacaactttaaaataaataataatgctttcccatactttttaggaccctccttttaaggcctttgttctctacttttttctatttgacccccaacaaaaagagattatcttttcattttttcgtaacataaaaataatttatgattgaccaactacgactatctatctttaatttcttttgaaatcaatttaatcatgaaccattgtcagtacatagccttagcatcgcctttcctgtcaaaggatgcaattttgttatgttttggtagtttaattgaaaactcgtcatagtagacagatataaatatttctcttcatctcttttttgtgcttatgttatatgaatcaaatgagtatcccattaagtaaaagagaatgaatcaaagcagttataataatacaaaaaaggaagattgtagagttatatattattaaaagttcaaaacattgagaaaaagtaaatgtaaagatcaaagcttcaagtgttgagaagcatggcacctaggtggtctagtagactttggttataaatttcaagtaaaagaaaaaatgatcagcacacgaatttttttgtgccaaccagtaatagcaactcaatgatgtgtacactaattgacaaacaaaaactgaaaacaaactttgctttatataccattactattagtattactacatctaattaataccattgatatttattacttaaatcttcaaatattattttctatatattcctctacatattaatttatatttatcaattttatagtttaataaaatcataaataatttgaagcaaagacttcgttaattatacttataaagtgatgtgttatgaaagcgattggatgattgaaccctgattggtaacagatgtaaaacaaatttagctcctacacctaatactatacttttgaaattaatacttaaatttcttacagaacttttaaaaagagacacaaaatataatagattaacacaatatagttttttaagatctaaggtcaagttggataatggatagagggagcccatcatttcttaatcttccggtacatatggtgtatctaagtggtcatcaggtagtttgttataaatgagaccatggacgtaattagtgcaaccttagtttctatattttgcatattgtatctattagtttggctccatataatgattccaaggacaatcaaatatacaaatagacacattacaataaaaattttattgatgcaagtagatactctgacaatccgcgtggttagttaggtatagggcttgatgacactctagaatttcaggacgtaaattcgaagagactctatttttgattctcttgacgaataattaagttgtgcatgggccattcgtgctcgggttaggagttattgtacatgataagcttgttcaacaagagttcgttcatcttcgagattaatcgaattagatccagattactgctacaaaataaaatagatattggaatacataaatttgttttaaatattagaaacataacaagaatataaagaaggtgagatatgtgagcgtgcaagtagagacgagaaagaaacataaaaagtgaaaacaaagtttttcccatactctttttgatctcaacacattctccaacgtgcctttcttctgatgtgagtcttgttgctctctttttatatctggttgatctatttttcatttcttttatacttgtgaattattatgaactaactaattgatcgattaagttagttgttttccacactattaattagttaattaattaaacattctttttagatgcgatcgaattggtgacagctttatcaacagtacaatactcattttcgtaacttattgcacttttgagtcacactagataaggaatcatttatgtataaaatgagttcttcgctcttctaaaagcgttcatttcaaccaaaaaaaaaaaaaaacagccaaccataacatcagaatatgaagcatgttctttccaaaaccaataacacaaattacattgcacgacacatattatgtaacaaccaataaaagttcgccgcctcttctatatgctaataatgacaatcaactagcaccttgccaagttattatctcttgcataatttttttgctctatctctacttactattgattgtaatagttatcccctcctttcattgaatgtctctgatggttatggaattgaaattatgtcggactttctctagtgttccgatatagtgacttcgaccttaaaacacgcttataagtcaatacatggcagatatctagaaatatcgtttagccggagaaacataattttttaattcaagggagaactctttaattaatcaaaatgaaaagagaaaattcaagtaaattcattaccctttgactcaaaacacatagttttaaagtcacttatcaatattaagccagaaaactaaagcatttaaaacatgatatacattgatttcacatttcagtatatcgtaacttagttcagcttcttccggagggacttgacgtcatcatgacaaagagtgatgaatggtttcatgtcatgtactcctttgtaaattattttgggtatttatttattttttctagctgaccttggtggtggttcctgcagcttcaacaattattccacttggaaaaagtaaaaaaaaaaagccttggagatcatcatttccatctctagtagctatacgtaactgcctccatttaaacaacacaaaatgagtttcgttgttggctttccaactgagtaacctcataaccaaactttgttacttggatcctcaatatatatctaattaaagagaagcgagatataaataaattgttacctttttaaaaagttggttacagaaaaacaattgttttacgtatcagttatgtaaatatttgctttccatggaatatttattaatagaataattttcaactttgctatgatttcttacaaaaatcttagttttaaagactatttaacgtacaatatcatctcttatccatcaaaatagaattaaacgcttatttcttaccgtcgcatgcgcaccatgtaacatgtgttaagccttttttttgggataaagaacatgttaagttagaacgatgagttctataactaagaagttagattgggctcaatatacttggagttggacttgatccactcattttgagttatcgtaattagacatacacatgtacccctacaaaaagcaatatgtattcacatacataattatattcatagataaaattaagagagataaagaaggaagtgttatatactgtgggggtgagagtagacaaagatagatggatgccatcattctcgtctgagacaactgttgcaaagccttgggatcgaaggcaggatagcttgggacactaatcatggctttcatgaattttaatcatctccctctaattgcagagagagagagagagagagggcctaaaagctacattagataatacaaaatcatatatatacaaatactgaaaaatagaaaagtagggcatatactctagaaagcgagtccatgagagagaatcatttcataatatacattacaaatatagatttatttaatttgttattgtattattgaatgatttttcccctcctttcttttgaaggttttattgcttttcacaatataggtacttgaaatagtagagagagagagagagagagagagagagagagagatgcgtcaagcttcaaaaaagctaaggtaatgttatgtgatgtgcttttgaaaggaatagagagctatgagagagcacatatatacaacaacaatttttattaattacacttcatcttaatctcttgggatttgtaagagaaactcttcaaaaatcatcattctttttcatctttctttacacacaaacacacatacacacacatatataatacagagatcaggtataataaatacttatatatatagcatcatcaactctcatacatatatggactctgctaatctccatcagcttcaagatcaattacagcttgtggggtcttcttcatcttcttcttccttagacaataactctgacccttcttgctatggagcttcatctgcccatcaatggagcccaggaggtatttctttgtaagtttcctcactcaatctctctcctctgatgtatcatatatttacatggccatgtatctattatatacatccatttaacacgtgtatgctactaggtttccgcagctatatgtgtgtgtttagaatattcttggtatcaagatgatatgaagaatttggaatctttcttcttctttttttccttcttttttggtttttgaaagataagttagtgaagaagacaacaagatagaatttaagtggctgataaattattaaatgtctattacattatccttcatatatatagacatagtactctgattttgcattgattcgaaataaagaaattttttgtgtggttttctggcaggaatagtgtgagcttgagtcataattataacaatgagatgttaaacacaagagctcacaacaacaacaacaacaacaacacaagtgaatgtatgagtctctccagcatccacaatcactccttgatccaacaacaagactttcctttacaatggcctcatgaccaatcttcatatcaacatcatgaaggacttctcaagatcaaagaagagctttcctcatcaactatctcagaccatcaagaaggcatatccaagttcacagacatgttaaatagtccagtgataacaaactatttgaagatcaatgaacataaggactacactgagaagcttcttctcaagagtatgtcttctggattcccgatcaatggagactatggtagcagccttccctcttcttcttcttcctcttcaccttcgtctcagtcgcatagaggcaacttcagtcagatttacccaagcgtaaacatatcgagtttgagcgaatctcggaagatgagcatggacgacatgagtaacatctcaagaccatttgatataaacatgcaggtttttgatggaagattgtttgaaggaaatgtattagttcctccttttaacgctcaagagattagtagtcttgggatgagcagaggaagccttccttcttttggcctcccttttcatcatcatctgcagcaaacacttccccacctttcttcttcccctactcatcaagtaagtttattttgaattattactttctatttcttttctcttttcgctttttaaaaaaaaacttttctatatatatatataaatgatggcttagaaggattggtctgacggtgaatctcgtgaagttagtgcatctgaaaacattacgtttagggctctatttctattatgtaacatagattcactatatatatatatatatatatatatataccctcatttcttaattctaaaatgtagtttaatattactgtttcataaaatactacggcctagttacctttcagctttaatcatataatttcatttcactcatgaaagagtgtctaaaagattagttttctgttttatttataaaaatgcttagttctctgtgtaccccttcaactttatttatgcatcaatggaatgcattgcaatattattcgcataactttttgtaaacgtaaaatcatattcataaggtggataaaatatcatgttcattaaaagtttgtggcataaatcagaaaaaaaaaaagaaaaaaaaaagaacttgagaaatagcaaaaaacaaaaaaaatatatactgaaatattataatcacgaagtatagatagattaatcagattagtgtaaagtgcgagacctttgtgcaatattgaagctttgcaacaaagttatgaatagagagataatatttaaatatatatgtaaaaacttttaacctcttttgattcatcttttactttgttgttgtgattcttggttggagggccaaagcttgagctaaaaaaccttttaacataattcataagcagcactctttaagctgaaacatcaacctttgttctatcttttcttttcctttctctttattccttactttgttttattgtctttttatgaatctcttttcttaacatttttttctctcattgtcgggggtattaattattacgttacgttctattattatcctttacatcgaatagcaataatgaacgttatttgatacttgcatacatatatatgtgtgtgcattacttatggggttttggtttgggttgaagatggaaatgttcagcaatgaacctcaaacaagtgaagggaagaggcataacttcttgatggcaacaaaagcaggagaaaatgcttccaagaaaccgcgcgtggaatcacgctcctcttgcccacccttcaaggttattacttttgttttaaaaaaaatacatgcaattaattataaatgttttttttggagaaattaaataaagcctgaataaattttagtagttaagaagaaaaaaaaaatgaaagaaatttttctaattggaggatattaatttaaaaaaatatatatagtcaaatgttaagataatccattgaatgatcattgtagtgtttatacgttgtgaaattgaaaaacaggtgaggaaagaaaagttaggagacagaatagcagctctgcagcagttggtttcaccctttgggaaggtaattaattagcaacaattagttttacccaatttattccttacttcaatatttcatttcctttttgccccattttagaatatgagcctaatcattaataaaatatatagctgtatgaaaattgattttgttacaataagatatttttgtttctaccatttaaagatagtaaggattttaagaaaaaaattcacaagtagcggattgttattttttgcttgttactcgattgttgatgattaattacatgatgattaaaatgttaaactgcagacagatacagcatctgtgttaatggaagcaattggatacatcaaattcctacagagccagatcgaggtacgtaacttcaatgcatgcatgtcactcattcatatccatacatcctatacttatagttatcagtacatgacatttgcatgagaaaaggaaacatattcaaggaatgaatttggagtggtagaataacggtatttacatggtaataccgtgctaagttccagacattcttcttgatcatcgttccgttttgtcaaatattctcaactttttatatcaattattactaaatatactatcttatatattaaggactttgacatgtactgaattatcaaactttaaaacactattgtgtatgggctaacttattacttatgaacttatatttaattagttccatagggtttagcttgcctttaaattaaagcaagagattagttagaattgatctttattttatcatatcctcttaggcgcactacgtagtaattaagcacctttctcctgtttcttttatggatacatgtttagataagctcatgctcaatattgctcatggtcgtcaatcttaaggatctaaattatatgtacaaattaaagagtaaagtttttataactcaaatgtcaactttattgtttgatgagcagactttaagcgtcccctacatgagagcatctaggaaccgacccggaaaagcctcccagctggtatacttttgagaacctatataattcattactagttttacataaaagtaaatcattccggatatatttagtccacaaatttacttatatagtaaaatgttgattaggtctcacaatcacaagaaggggatgaggaagagacgagagatcttagaagccgtgggctatgtctagtgccgttatcatgcatgacttatgttaccggagatggtggggatggaggaggcggtgttggtactggtttttggccaacgccacctggttttggtggcggaacttagccgtggacttaacaaaccgtaggactatgatgagtacatttatcggacttggaggtagagaataagaagaaatgttaaaggtggagtattagttctttaatctcttttggttttggtttattaattgaaattttcggttttgatagtggagcaaagttggtcgtcctgattagaaagaagtgttacaggatagaccagctttgatccatttaagattagtagtgagacttgacgatatgtttctacttacatgatgggctgtgggggctacataaaatatcaaatagctttggattattttgttaaatctcttttgtagataatgtgtcaatatctttaataaatgtattccttaaaaataaaaaacatatgaaaatatttcgccatgtagtaagaggactagaaaaagtgtatgatcaatctatgagcaagcgctaaaagatgatgtctattaagaaaaaaagaatcttttagtcactgactttagttaacttgttgagttcacctatttgcctcacaatcactattagatgaatttgatggttgtcgagcttaaatggcctagaatgtgcagagtcactcactctcccctaatcagtttcggaggtagcctcaaggactttcctcgttttgctttgatctacttcctcttcttgctacaaatcttaagttaagaattcttttttatggtccttctctcacgattgcacggggtccatcaattgtttgagtcggccctggctacacgacacccaattcttccttgcatctactttcggcggtgctccattgtagctggttcaatccgtactaggtataaaagaaatcttgggtagcctgtagaacgaccggccaatggtccatgaagttaccactacttgccttattacatcgtcctttgaaaacttatgaccttgtaaaaagtggacgtggatttatgaatttcctaaatggtccctttagagcaactccaatgagggttttttaactaagtttcttagttttagaaagagaaaatatattaataaaaaatatatagcttttttgaatagtaaagaaactctcttcaaagtttcttatataaggtattttagcactttagaaagaatttcttcaatatttaagaaaaccacacattttttattagtatattttctatctctaaattaagaaacttatgtttggaaactaccaatggggttgctcttagaccatccccattggacaaatttagagggtgttttcaaattttaacagaataaaaaaatagacaaatgagaattaatgcactgaacaggagaaacacggtgactttaatgtctgtgagaagacattttttgatattggaagacacgaatgtgtcaccatgctattggttggtgctactgttttctatttttttccttcatttggccaacaaatttttctctcttttcattttgccaataaatttttctctctttatttgaccaataaattatagttaagacattcaatataaattaatatcaccgatgtggatgctcttaggagttcctggatatctatcatacgtgtcacacactcttctatttgatggtatttctcatagataaagtcacgcaacatgttcctcctcgatgatcttcccttttatggccagtcaacacgttttccctatatccttcaacgtgaggatcagttggacatgcgttatctctagtttgagttggcaaatatttggactagcttgtcctttggtgtttccatttccccaccttctagactagcatggtccgctatgtccaaatttaagtgaaaacttcaatttaccttccacttgggtcgggcccgtcctattctctccccgtttagaaaagaatatcttacgttttgtttagggaaatgtttaagataagtgaacgtacacaaaagttttcatttatagtttcgtaggaatatgctaagactcacgtagatatgactgtcactaatcatcccaagaaatatatacatccaaattgaacgttaaattaaaggcgaacaaaagtgttcctcgttataataagtcacggcttaacccattccttcgacaacatctttttttttccggctataaacgtctccaccgttgacctaaactcatcactgctcagatcatccatatcgcacaaccgtctcatactccggcgtaaatctccccgcacgtcaatcctctccgatttcgaccttctgtaaacctgatgatcagtagcagtactctcagtagtagctggaggcagaaaagtcatttcttgcttcctccttatagcatgagctgtctcccccacagaactgaccgcccgaaccatctctcgcctcaacggtcgagcctctccgacggttagactaacggaggtaagttccgtacccggcattccttctgaagtcttttcttcgctatcagatgccaaagattgtgatactacggcggaggaggaggaaacgtattgaaaatacagatcgtgttcggttagcttctggtggttagataaagagaagatcagggcaacgagaacgttcacgacgccaaatatgtatattccggcgccggtcataccactggaaataatacgccggagatactcaccggcgaagaaagttgacgttaaccaatagagtagaagtaacacggcaactagagcttcaactgccggaagaaagttcaaaaaaattctcgtaccctcgaacctcctcatggcgtcaactttctcagccgcaacatccattttctaagctctcttgcaactccggcttagattttccgaggaaataaagtgttttaaaataaagtggatggtcacttagacttgtcgatctaatcacttggttgatgattttataaagagatataaggactctataattggttcaataattgaaacaaactggatatatcgtatttctttatagttcggtcgtggaattttcatgactaaaaagcattaggtgaataagtccaattcctgaaaaaaaagaatacaaaataaactcattagatgaacaattgatcatagaattattggggacaatttgaataaagaagtattataataatgtagaagaatggttggaaagagttggcgaggagagagtgagggcaggtgaagctgcactgcacagcaacgaccgggccaatataatgcacggttgggcgacgtacaccgccggacgaaactgacacgtgtaccctttgttctttcttcttttttgtacccctcaattactacattcattgtaatgttttcgaaataatagagtatatatgtattttgtctctaaatagtagagtatgagtgactagattcactatatgataactggagagtgcaaaactaatcatgacaaaaagtaagggtatgaatgattttggttattcgtttcgattctaaggtgatttgtgagttagatttggtactaattacagtttagctcttttcatcatattcttacatgttatatatttcaaaggaattatctagacgcaaacaagctttgacaagaaaaatgaaaacaagcaaaatcgagaatacatcttaagtaaggcaggggatgcggcccgattcaaaattctatgttctaaaaaattatttattatatatggagaaattaattcagacaatttgtgggttctttggatgacgatctccatctcttcttgacactgggagaagaattctaattcttactcgttaatttatatgcatttgatgatattatttttctcacatttgtctaattagtgttagtattaatttaatttggtatgctagacgggctcaattgggtgagtttttttaattagttccaatgaaagttgatgtgaaaaaagtattgtgagccaattagattggtaattagtaaaatttagaaaagtcaaatgtatggaaacactatattaaaacatctattacttaatattgttaatgctatagcattttattaatttataagaaattgttagaaactcctttttaattctatttgtttatgcagttcattctttttatacattcttttattttaatgactgttttactcatatttgaaaatattttagattaacaaaatgaaataataattttttccgtcaaaaatatttcgaaaataagtttctcgtaaaacaaatccgacaaaaaaaaaatctaccaaaaaattttcccaaaaaactttttcttgtcaaatttttttttccaaaaaattcatttcccccaaataaaatatttttgccaaaaaatagatttacttgggtttacttctttttttctgttttctagctaaaaccaattgacaaaccgataccataaatctaagataatagataaatattgttatgaccgaccataattgtaaatttgtttggtgaaaatgggtttctcggagctgaatcttctctaactgtggagagatgtggagaaaatatagacattgcagagctcacagacttcctttgtgctgcttcgatggttagagaatttagtgagtttcacactgaccctgaagatcgaaagcttagatatgacgttaagaaaaaaagttagaattgaaatatgagccaatgtcagttgttgatgacgagccggtttgcctaccaatgataaaatttggggtttcaaaagagacatgactcatcacacatagatcacttccggagttagtcacaaagcaactttttttctactatgagaatgtctttctcacacctaaaagcgtttgaaaaactatctcaggatacttgtttgatatcccacctaagttttttgactcgaaatatttatgtatttcagcacaaatcagcacaaagagaggtaacatccacaatcttccaatccataatagaatccatcaactgccaccgaaatacacaattcgtgatgcatttccatttactaagagatggtggccaacagactaggataaaaaagcccaagctaaactgcattttgatttgtacaaggagtgcccaattaactaacatgatccgtttagcccttgaaccttacaatggagaactaaaaccgcataatctttttctgacgaaataatttaatgaaactatagatgagcaatactattgtatctaatgaaaattgatgttaaaaaatattgtgaaccagttagattggtgattagtaaaaatttagagaactcaagatgttcaataatggaaatccgaaaaactattattactagagttttttcttttttctttctgttttctagccaaaaacaattgacttaaccaatgccacaaatctaaagacaatagacaaatattcaacttatgctttccaagaaaatatcatcaggaccatattgagtgatactgtagtttgttttgctctttctgccattttggatctgatttgtaaaaatgtaaaatcatcttagaattctgcataatttttactaatcataaaatgtaacggattagtaattccaatcatttagtaattagtaaggaccaaaatcacatgaaagatatcttataagaaccaaatttggttattccaataaaacccttgaatgatattttgccgttttcaaaacccttaaaagaagaaaaacaatcagagggttggcggtgttcccgtcagaagatcacgaggatcatcacattaaactctgttttgttgatctctctttctgttccgtttctctttccactgccaaaagttaaagctctctctctcactcaatcacacactcatttctcactatttcacaacttccttgtggacaaaattagtcgacttctctgttctctccaacactgtttcgttttcactacccaaaattcgaatctgggttattgaaaaagttccaatttttttatctgggtttttcgaaagctgatatctttttagaatctgatctatctcttctacttcatttcccttgcatttttttaataagttgtagaatctgtcttgttctggaaaaatatggagtcttgctttcctgccatgaagctgaatcagtgtacctttggtctcaacaacgaaattgtctctgagagagttagtgcgttctggggaacccaagttgtcaagcccaatcatttgaggacaacgaaacttaggagtgcacctcagaagaagattcagacaaacctcattcgctccgttcttactccatttgttgatcaagagtctcatgtaagaatattttacacttgcaattcccaaaccaaaaaaaaaaagattctctgtttccttggaaatgaattgaagtccttggtttattagttctacttgtgcatttgagtctgcctagcatcaattctgtgtgtccatgtttggtgggaatttgatttggactgtgttgaaaatgacttcttatggtggtaagatgttgcaactgctcaaagtttagctttaggtctactataactagcctaggacttaatttagcagatggtagcgattgtgagttggttgagcagtttagtgagggctggctaataaggcttttaaggtttggttgggcaggagagtctgtcatcaatcaaaattttctggtttagtgaattgaagcttcttttcttaaattaagtcccttggtagctttatttcttccaagtcctattctgatataaagaatcatttttcaggaacctctgttgagaactcaaaatgcagaccctaagaatgtagcgtctatcatactaggtggtggtgctgggactcgcttgttccctcttacaagcaagagagctaaacctgcggtgaggattgttttgtttgtccattgtttcttatgattcattgtcaatgaggttttaaacttgttaataatcgtaggtgccaattggagggtgttacaggctgatagatataccgatgagcaattgcatcaacagtggtattagaaagatcttcatcttaactcagttcaactcattttctctcaatcgccacttgtctcgtacttacaactttggcaatggagtcaattttggtgatgggtttgttgaggtgataccattacctgccatagattagatttatcttcctgtgtttttatttgctactaaagtttctcctctggagatgattaggtccttgctgcaacccaaacttccggagatgcaggaaagaaatggtttcagggaactgctgatgctgttaggcagtttatatgggtctttgaggtcttcttttgtctttcatctcttagtaagtgttcttgtacattgttggaaacatgatatggcggtgtttctgtaggatgccaagacaaagaatgtggaacatgtcttgatcttgtctggggatcatctctatcggatggattacatgaactttgtgcaggttagttttatttttcttatttgtccacactgagcttcatgtaaactttgtttcatttctcgtctttgcagaagcacattgagtccaatgctgatatcacagtttcttgtcttcccatggatgagaggtgtgtctgaggatcattaacattgtttcttgccttgtttattcgatgaacttatttgagtttttccttattcacagccgtgcttcggactttgggctgcttaaaattgaccagtctggtaaaatcattcaattctcggaaaaaccaaagggagatgacttaaaggcaatggtaatgatttattttgtttgtcaaaacgttcagtttcttgcttgcaatattacgagaacttaaatgttttttgcgttttcagcaagttgacacttccattcttggtttaccaccgaaagaagctgcggagtccccatacattgcatcgatgggtgtttacgtatttagaaaagaggttttgctaaagcttctaaggtcaagttatcctacatccaatgactttggttctgaaattatcccgttggccgtaggggagcataatgttcaggtctggtttttcttcattttttgtttagcatatcacatcatcaatcaatatttgtgtttcctctgacctttatttattaacttgctgctacataggcatttttgttcaatgactattgggaggatattggaaccataggatcattctttgatgccaatttagccctcacggaacaggttttcaccgactctttattgtttcatctccagtgcagggtggtgactcagtgaaacctaatcatgctatttgtttctgttttggcagcctcctaaattccaattctacgatcaaaaaacacccttcttcacttctccaagattcttgccacctaccaaagttgataaatgcagggtacaatatcttgaattcgattatcccgttgtttcagctaatgattcatcgatcctcatgttgtaaagtgtattatggaattgcagatacttgattccatagtttcacatggatgcttcttgagagaatgcagtgtgcagcactcaatcgttggcatacgatcacgtctcgagtctggagtagagcttcaggatacaatgatgatgggagctgatttctaccaaacggaagctgagatcgcgtctcttttggcggaagggaaagttccggtaggggttggccagaacacaaaaatcaagaactgtatcattgacaagaacgccaagatcgggaagaacgtggtcatagcgaatgcagatgtatgttttcaaagatctttttggttattttgaagaaatggttgtctgattttttgttgtgttgggttgtggcagggcgtggaagaaggcgatagaccagaggaagggtttcacataagatcaggcatcaccgttgtgctgaagaacgccaccattagagatggtctgcatatttaagcttttaaacctctctttaggagcagtgtatgtggcttcttgtgattttgtaacgagactagttacgttcgattaataatttaataaaacaagaggcacaaacgaatgacagttttagcaactttaaacgtgatcgttaatcttggtaaatcttaatgattacgtaaaacacagagagaaaccaatcacaaacagacgagaaaaaagcatgtgtaaaattcttcactctcacgatcacaagtcacaacacaagacttgagactcccatccatatatacactttacaaattatagatatttcattcgagttttatgggactataaaaagagtcataaaactcttgtctcttattgcagtgagaatgagagaataggttctgaagactaaatggtctgatctttagagaaggtaaggaccactagaagctacctcaccaactcaattagtgtcaaattaatccaaggccaacagtcctgaaaaagtctcctaactttttatgtctgcaactgtatatgggacatccctagttttcttaattttgaatcttgattcttgagttaaaacaaaaacccaaatatacaagtatgcatgaaacgtaaactttcagagaaggtttctcacattaagtatcctttgagttaagtatatagtccataagactgtttttggttttaattttagtatttgtgtgtttgggcctcccaaagattgttggcagaaaagttgtcattatcactggaccaaactcgcatgctcaatatttatcatcaccagttataattacatacaccgactgcttttttaattttattcattttatattctctcggcctcatggcaccgttacttcccgcctcacgttgacgatatatgagagaatattttatcatcatatcatagtgaagataatagcacaaaatcacaacacaagtttttggtaagtaatgatcgtccgctgtaatgatcgtccgctcaatagggttattggtaagtaagaatgaacctgagctataataacttgatatcaaaatcgtgtgtgattgtagaaaaaaaaaatcttataaatgattatttgtttactttttgtcaaacacttatatataaggtatttaaaactagatataaggtattttagactggtaaaacaaaactaagaaaacaattatatgaactaaatatggacgacaaaaaaaaaaaaaaaaacataagaaaagttatttttttttcttttgtcgtccataattatttttctgtttgaacacacaaaggcgcacttgagagtttagaagtaccatggaaaatggttatttgaggttaaagatgaaaatgagtaagaagcaaccatataaatatatatccattctaatttggtcccatgaatcaaattgaaaactccagaaaaggaagactatttttaataattttgtgttatgttgaccttttgtgacttatgctcatgctcatgcacaccctactcgtctatattgtatattgcttttagtaatataacacctttttttttttgttaaaatagtaatataacactcaattgctttgttttgactttaattaatttccatctctaagagcatgcctttcgtgttccttaaggctaattgctcactaatttatgctgcttttgaaataaagtattatatatatatatatatataatgattaacatattatcaacttttatgaaaaaatcaaaacatattaagcaactccttttaactcgttgttgtggtcacaaactgtaacaagttttcttcttatccaatgtggaacgagttagcccaaaaaaaagacttgagagaaagaagacaaatatgaatgttttatgtcttataaatggaatgtaaaaccatttcaatagaaaaaaataacaaaaaaattcttataccaattttcataattaaatcttatcccgaatcccatttgcctgtaataatgagacttttaaaagtttttattcgagaagcagtgattcataatttcaacgatgtcgagaaaaaaaatgtgtataaccctaaataatagccaaaataagaaaagaataattaaattccaaaagaaatggttaaaaaagcgaattaacgaattaaattcgacatttatattttgcaaccttcccttcgacgcaaacatttctctcttttttctctaatcaccaaacctgcgtcttctctctcacactactaacaacacttccttcttcttcttccgactatggataagaagcacggcttgttctccaagtctaattcccggcgaccacgatccaagagtccagtcagaagcgtctctccgatcatcatccgtcgccggaaaggccgttacgtcacacaaccggaccggcacatgtctgagatgcttgctccggttatagaaggtcctgatccagacgctgaagactccggaagcagtggtgattactctaggttcgagagacgttggtacaattggatgaaatgtcagcttccggtggctccgccgtcagtatcgtcctcttcggatttcaaacgaacggatctgaggcttctcctcggtgttcttggcgcacctttaggtcctgtgcacgttagcgctctggatctccttccacacctcagtatcaagaatacacctatggtgagctcttaattcactgttgtctcctcaaaattaggacagtgttggggatttggagttaatcatgttgaattaagctcttctgtgccataatctagcttgaatttagctgaatcttcttttagttgcctactaattacggagaaagactgcgcaattaattgagatttatcaagttttatctctgctttaatgtgttgagggtaaagtctaatgactcttactaatacttgaattttcaggagacttcctctgctcagtacatacttcagcagtatacggctgcatcaggaggtcaaaagcttcatagttctgtgcaaaatggatatgttatgggaagaatcaggacgatggcttcagagtttgagacaggctcaaaaggttcaaagagcaagaataattcgtcaaaagctgttgagtctggaggatttgtgttgtggcatatgaatcctgatatgtggtacatggagcttgttcttggtgggagcaaggttcttgcaggttgtgacgggaagcttgtgtggagacacacaccatggcttggacctcatgctgcaaaaggaccggttagaccattacgacgtgctctgcaggttaggcctcttgtcccaaggaagccttctcatacacttttctttgcttgcataactgaattgttactgttgtcaactttcagggacttgacccgaggaccacagcgtatatgtttgcaaatgcaaggtgcataggagaaaaaaagatcgatggagaagactgtttcattctcaagctatgtgcagacccggcaacactcaaagctagaagcgaaggggcatcagagaccataagacatacgttgttcggttacttcagccaaaaaaccggtctgcttgttcacttagaagactcccagctaacccgaatccaaaacaatggaggcgaagcggtttactgggagacgaccatcaactcatacctagaagactacaaacctgtcgaaggtatcatgatagctcactctggtagatccgtggctacgcttttaaggtttggagatatgtcatcaggacataacactaagaccacaatgcaagaagcatgggtcatcgatgaaatctcgttcaatgtccctggcttgtctatagattgcttcattccaccttcagaactcagatttgattcccacgttgaagacttatctcaaggccccaaaattaggacattgcacggccataaaaatggttgatgtgaagaagcaggagatcaatgtgtataactcattcaaaaacaaaccctagaccggttattttacttttgctattgtcgaagctaaaattcttgtaggaagtttcgttgaagttgtaaatagacagcaggagaagttcgttctttttgccgcataatgttaggaatgtgtagtcttagtaaggtcagtccaatttttagtttataatattgtttcatatactatgatagaagctcccatctatttcacctaatagcatatagtataaagaaatattacttggtcatccataccaattggaactgatgaatacgatcttccttgtattgtatatcaataaattcatagtgtgagtgtagtttcttttgtagcacaaactagtaaatgttatttctcctcctactgtctatttcaaaccgttgctcattagtttactccaaaaaatggccataagtacttatctgtttgtctgtctcaaccatccaaatcctatttgtgagttggatttcaatgggacatgagcatttttgcatatggattgatccatttgctcactagatcgttttattttactgttgactgttgttgaccttgagaaaaagaattaggccggttcactgttgaccaaattcttttacataaaatcattttgaaaataatcccggttcattagttaaaccggttcgattaatttggtacgtctctaaaacaaatcgtcttcacctttcttctcttgctttcagggcttgcgattttaagtgggggaggtagagagagcaatctaccagattcaccgattaccaacaacaaacaaggtatcatcgggtaattcagattcgcaatttctgctcatttgaatttatagattcctaaattggtttctttttttttcttgtgaagatcactatggtgctctctgacttcactggagtcggtgttggatttggtaatgcccccattcgcaattgttttctccttttaattttgattggaatcgtaatttagttattggaattcatagggttcggtgttggttgtggatttggcgttggatggggttttggaggttcgttctcaacttctctctttttctgcttttacttgaacaaaatctggactgaattacaagataattctattggaacaattctcttgctagttgctatgggatgtgcaatgcactctgctgtgcttgtttagttttgtgatcatattgcttaatgtctcttatagagattatcaactcctacatatcatctttactcaaatgcttcttctttcctagctaatggttgcttaaacgcatagctagtatcagttgcgcttacattttgatggattcatactattttgcaaacctactgaattggagatttccgttgctttcatgcaggaatgcctatgaacatcttaggtgttggtgctggtaagcatttcaaacttctacttcaaatatcccacactcgcatagatacacaccgagcaggtttttcctaaattctaattacgtaacttatgcgtctggtatttgacaaaggtggcggttgcggggtgggtttgggcctcgggtggggtttcgggactgcgtttgggagtcactatcgttcatctagacttacatttcaaggcatcgagttagagactgccgataaacgggaggaggtggtggctaacatgtccaaaaactccacttaagcagtcgtgtgcttcaatactctgctcggattgattgtaaaagaattctgacaccttttcttatttctcaatgaaacggttacttcaaataatccaatacgaaatgcatttctgtattctgaattgtcatttttagaaggttccacttcaatcttgggtttagtcccaaataattctacaatggttaataggattggtgcctaagaaaacaatgattgctcaatgaaacccgtttcaaataatcgaaccaaaaaaatgcatttctatattacaaacaaccaaaaacagttggaatttactgtacagtaaaaatgtggattgccaaattcgtctctttcgctgttacacagaagatgaatgaactcgaaccttgctattccaaacctctcttctacattgaatgcactgcaactaccactgcaatcagaaaaaaaaacaatttatctcaaaactcaaaagtgatgcagtaagctttgcgttctaaacataaatgattcagagttcagtaaatcttaccaataagaaaaactaaaagaataatccaaattgcagcgtgaaccgatttactatatcgcattcgatactgagaccgttggagttgcctctgtagagctccataccaaccatgaagctgcttttcataacagtcctcctcacactccatacaactcttgcccctctctgaacatccattcatatcttgctgagaaacaaaaaaataaaaagcatttcttagcaaagattttcaaagcaggaggcaaaaatcttgcggttggagatcgatcgatcaaacttacttggttagcttggataggtaataaagcagcatcagagtctccttgacgatctaaacccttccactttctattgcaatgcttggacacaggatccatataattcaagaatccagagaagctaggtactttcctcggaggtcgaaccactggctcatcacaagatttcttcactaaaccatcatcagaaaccgcaatgttccaagcactgaattcagcagcacttgcagtccttctatgtccattaggatttgctttagcagattcagatggaccagtcaagaagagagcaagctcattacgatcatcttcatccaaacgaacccatctcggtgttcctttcccatcggattgcgcagcttccttgagagatttctcgattttcgacacttgagcttccattacgaaagtaaactcacgatgcctatctctagtttcatcactcaaacgattgtcatagctagatttgacagctttttggaattcatctaactacaccaaaaatattacaggtttcataaatcaacattacagattaagaatctgagttctgaggaaagaaagaaacctgccatttggtggttccaagagctgcgtgaagatctctatgaagctgctcagagtcccatacttttgaagagtctcgtttcccattgagccatgtcctgtacgctgactccatcctacacatgaatcgaagataacaacacacattgtgagatttcagatctaagacttgatttgattaatcagaaatcgtaatcccaaatccgaagcaacacgaatcgaatcgtcgacattgcatcaccaacaatgagagtttatggtatcacagattcaaaacgaaaattgggagatgaggatccgaaaaacgcaaacctgtcggcagattcctgaacttcttcagcagcgggaaagaaaggatctttctcccaccgatccaaactcgtcgtcatcacttgagcagatgaaaaaaaacaaactaatttcctaatccttggaagatgagaagaaacccagaaatggaggaaaatggagaagatggatggatcgagaaagatttcagagaagagagggaacgttcgttcatcgattagccaaattacggcctttcgttacacacacgtgcgaaaattagtactattaatgtttggtttattcaatgtggttctcaataaaccggtccataatctctaattctcttcattttggttaacgctttatttatgacagcataattaccaaaagaactagtaatcgaaagtatgattaaaggaaaaaaatatgccatgatcctacttttgattacttatgacttatctatcaattttattcatgttataatcattttattacagtttcataattcattgtttcctctggaacatatgtgtgataaccaatatgttcaaatcagatcaatggattggtacacgagtcactccttgttttcttttatttaagaaaaaacttgagactgcaaaatgaataataatgaaaaaatgcagcaaaaagtgtgggaaaaatcatgcgaatgagaaccatcacctgttacacctttctggtgagtcaccatatatgcacctctctctctctctactggcacgcccatgccaaccatcaccgttgtattatgtcccaagatatataaatagtggtgtgtgtttgtggctgtgtattattcaaacacacaagtccttttacttcctttttcagattctaagcaaacaaattgtgtcactaagcagccatcatggctagagtgatcttgtggtttcttgtttcctcgtatctttgtctcatcggtcatatgattgccgaggctgcaagagaaggtgcctccatgaggaaggaagcacactccagtgggattggaagagaaagtaagctcatgaggaatgaaaaacactccactgagattggaagagaaagtgcgtccatgaggaataaagcacgctcgagtgagattggaagagagagtaagctcatgaggaatgaagcacactccagtgagattggaaagagtatccgacacgtaaccggatttaagggtgaactcacagctggtggctacggcggtggaggcccgggatatggtggtggtggatacggtccaggtggcggcggtggtggtgttgtaatcggtggtggatttggtggaggtgccgggtatggttcaggtggtggtttgggttgggatggaggcaacggaggtggtggtccaggatacgggtcaggtggaggaggtattggtggtggaggaggtattggtggtggagtcatcattggcggtggtggtggaggatgcggaggttcatgcagcggaggcggtggtggtggaggaggatatggacacggcggagtcagcacgaagggatcaggcaaaaactagaaaaaacatgcagcttgctttaggtagtgaaaggaagaagaaataaggatgtactttagcatcttgatcatgtttaggagtttgtaatggcattagttttaatggaataagaacctttctacaaaaaaaaataaagaattggtcctatgtcttttcttggtttcaaacatccgagcagattctattgtatacgcgatacaatagcgtcgatcttgacatctgaggctccttttccaccacagcgatcacatccttcacagagattgaccggactacttttggtaaaccttggttcttcccaaattgtgtaccacctacataaagttcgaatatgcaattaggagcacgaaacacaagaataaccagcaacagaactgagagatttactctttcagatcatagaaacgggattaccaatcttaccagaaagtttcttggagtttcttcctggccctggagaagatctctgacgtgcttcagccataagtttccattttgaaaacctatcatctcctccaacggctgcacgaacagcaacatttgcagccttggctctctctttatcttcgtccttcttatttgcctgacttgtgatcaataaacctctttcagtgtacgtatgtgtatatctccaaaggtttaggtagttggctcaagttctaaataccttcacttcgtttgaacgttggtcttctttttcagtatcattttctttgttctacatcaatgaatatacaaaaaaaaaaaactagacattactactgataactaagacaaatagatattaagctcaggacaaaccattaccttttcttctccagaatgtttcttttcccattcctctttcaccttctgattcatttcattaatttctttccggatatcagatgtgataaaagtccgatttctacacttctctgcatcagtccgctgcaaaagctcttgtaacttcagaaagatttaggtacaacaagatctaaggaggcatgagaagagaaagtagactgacctgctttgatattcgtattatattaaacagtagtcctcgcatcctctcctccacacactgaatgcgcaaagccatgagaaaaacgaaaacaaaaacaggaaattgaaggctaataattccaagaaaaggtgttaacatctcaccagagacaagcaccgctctacatcatggtctatatgctttaaaccactttttcccactgtcatatatgaaagcatacataaacttcttctccaagtgattccaagtaaggaccaaagaagcagctaagatacgagttgaaacacaaactaatttctgtcagctttctctgcagtggaattttctgcaaaagcgttctttcttcctctccatgcacaagtcttcgatatgctttagaaacacgatcgttctttttaggaccagaatctaataattgtttttcctcttcctagaacagatgcagaaagtaatttggtttattgtttctctatatccaggttcaaaatgagaagtgtagcaactcgtaaacataccctgagattgatgccactgactgcagtgacatcattaaacttttcaatactttcatctgaagaagtcccacatattttttgcttctttctgtatattaaaaaatacataagacttcaatttagcaattctaaattgttagtaaggtaaaaaggatattatcagaaaagcaaagaaaaaaggaagagtaatttatggacgctgtaagtagttcatctttcacaaaccagccagctcattaccttgatggtggcagcgaagaacctagtgcctcaagaggtttcttctgaccaacagaaggcattttgggtgtcaccgtaacattagcaatcttgggaatggtctcagatggggcaggcatattaacctgaagtgtacacaaataattttcacgtaagatagatagtccatttactcttcacaaccaaagttcgaagccagtacaaggagaaatagaagccagggtggtccaaaatataagcaaaacgaaaccaaatgcaacatcggttgaagagaaatggtccccctatgagcttaaagagaagatcaaccaaattgaaatctgtcttttgaaagtataatttataagttaccatcgtgctagagtccagctgtgttgtcattgaaggaaaaacagagctggcagaagtggttgatgtgaataaacccattttagaagactgcttctccaagtcatcatttgaactaattggaatagcattcttctgtttcagtggaacattagtcacgccttgctgcaccaaataacgaggtttatgtgcctgttcaaaactttgatcaatcaatttatgctccacatggatcactgatgaagaaggtcccactgtatggtccttggtgactgatccttgccaaggagcagaatatagaggaaaggatgagttctttgggaagtcggatataggaccatcctgaaccctacttggaccatttacaaaagttggcctctcaaacttgggtactgtcgtcatgtttattgtagacttggttggtcctccaacactggctattcccacattctgattgttttccctatgctggaaatcagggagctttgctctcgatgatgaaccaggagaagtgacatttgtccctgggtatggattaagacttccagatttggtatccatatgaaaagaacttgatggaagctgcatgtgttgctcgggatgcttatttaatccctgcacagtagttgaactgtttaaggtgcctgaagttgtagaagacagttggttaacatgaacttcacgaggatcagattcttgagcagtgaattctgcagttaatgattgtatctgggattagttttgtatgctacaaggaaatcataagataagatctaccagaaagttaagatgatctatgataattgcaaaagtaaatggcatcaactaaataagttataccagcagatttagacactttgtcatggtttgagcgtccaggtactttgatccccatatttccctggttacacatacagttcattctgaaaccagtaagccacaattccaagacaagaagtattcagcttatactattaaagtgagaattctttatgttatttcctttttaataaggttcagaagtgagatttctttctcagcacatgttcatatacagagaaggaagcatataaaacaagaaactctcttggaggctgctaaatgaaaatcattaaagtacttataaatgctaagaaaatggaaagggtaataccggttttaactgaggcagttggctaattaccgatctgattatctgatcacctacaagatctctcagttgtcgcatgaactcttccattgtaagttcttttctctgcaatcaagtatgaaaagaaacgtaatgtattaagaaacttcgatcagagtgccaattcattcatggatgtaaactgtaaagccacaccttgagtttataatgcaggttaagacaatgcgtctttttgccgggttggtggtctaccacggtacgaagcaaatcagtaactcgtgctaatctaagattatgattcacagggtcaacagtcttttccacccaaggagtctctttgctactcatcttctgcagtttcatataccgaggttgcggtttttctgattcattaccagtagtattgtttatagacttcaagttacttccttggggcacatgagttcaagcaccaaaatcaattatgagtatgctctaatatttttctatgactaaccgtcactaaagcatcatcaagaactaacaatctaattgcatccatcaacattcaacagttaacatcaagtgaaacatgaagatacatgacaaaccacaaaaatacgactcgtgaacctaaatcactaaagaaatctaaaggcatttccctgttttgatacattccacagtttcgcatatgaattttagggtccaaaacgaaccttcaatatctcgaatcagagagtcctgaaacatttgcaagtcatcttccgaatgcttagagtcaacctaacgacacgattagcgggaatcgacatttaggagcttcgtccacagaacaagatagcgcgtggattttcgcagacagtacggaaatgaaaatgagagtgggaaattcgaaacctaacctcttcgtcttcttcgaggagcttgacaatggagagatccatggaggaatctcgcggtaccaaacgtcaatagctcaaaacgaagagggaattttcaaggaaacgatttgttgtatccaataagattccaaattccgcaagtttttatataaagggagattctgcgagaacaccgtgtcgttttttctttttgataaaacactgcgcgccgttctgttgatcttcttttcggtagttgtttcttttggataaaacactgcgcgccgttctgttcttcttttcggtaactgggcttgttcttgtatatcaaaatttatttttcttgaatataatgttggagttcttaaacagttattcatattagcatcagacttttgcaaaaaaaaattaattaacttttagatgaattttgatacacgtttatgaccattgagttttggacttcccgtagataattcaccaaattaaagaagggattatctacgttaattaaacagtgctactaaagaaaacaaacgacccgtcaagaaaggcttttttcaattgaaagttacggtattcttttggtaaaagaaaaatgaaagttgagttttctttggcagtcttccgtaagatatcacaactctttttatttgcttagagctttccaaaatataagaaagaacaatatgtggatggtagtagaaactagaacgttcttgattatgcttaattgtgttataaattttttgaaaaaaacagaaccaaaaacagagttgtagtggtgtcactttatgcttattcagataaaaaaaagactcaacgcgtttgtaaaatatgtggtaaagaatcggtttaataatttttaaaatgaaagaacaagaagaattggaatcagtcaaagtccaatttggtatgtacagtcaacaaattcctacacaactctcaacagtatacaaacgaaatcttatcgtctaagtaaatttccttaaagttgaagtttgaccggaaagtcaaaccgaggcttcttcgccggcatagggctcatgacttcgtcgtctccgttgaccatcgagaattcagggatcggagggatgttgaggtcaaacccacggtggctactgctaacgtggctagtggaccccgcaccttcggagttggacacgctactagtgttgatgttgttgtttccttcgtagtggcaccgcttgtgtccgccgagagcttgaccggaaggaaaagacttgttacagatggtgcaaacgtgtgatttcccacttccagtagtcacggcggatgtggttgtcgccgacgaggttgaatgatcatctcctccgccggagagagtctgtgataagttcttacggtggcttgccttgtgaccaccgagagcttggtaagaagagaacgtcttgtcgcagacgctacacttgtagctcaacttctccaccgccggaggaggaggaggctgacggttgtcgcgagcgagaagcatgaggcaaaaagctagatactcttcctcagtgaggttttggtggtggaaatcggatcttgatctcttagatcgcttaccctttgtccagtgctcgactccatggaagactgaagaatcttcgaacaaaggaggaatcggagaagctaatcttggtgatgtaagagcctcgagcgccattaagttaaagattctgaggatttcttgtctctcgagttttagtttgaaggttgcttgtgaattgcagtgaagaaattgtttaattgctgaagaagaagtaatgaaagtgtgtgtaaatatatagtagtaggtggagtgtggagaaggaagttgcgtgacaagtggtaggaaagtgtgaagagtgaaggtggcgattagataattactatatttttctaaaactctttttaatatgcggaccaaagttgtgatgaaagtatctagatgtttttttgggggtaaagagaggaaaataattagggcacgtttggtttgacctagtacacgtgtgtgtgtgtgcaagtggtgttggtaaaatgaagaagaggtcggctataagacttttccttcattacttagtttactagtactgatgccgccttacaaaatattctagagtttctgtggtttctggtcgttgtcatggatggtactcgtatggtacacgtttcggtttactttaagatagatagatagttataacttataacaactaaccagttgacaaaaaaagaaagaaagtctataacaactaaccaatattgatttggaaagcatcttcggaaatatctatctacaagatcaattcatttcgaaaacgtttttcttcttcttacttttacattagaaaattgagccatcacttaaattaggtgatatatgtaaaataaaacgttggctagttttagacttgctttgtctaaagaaacaatttaatggttcgaccttgctcgatggtaaaataaattctaaaacagcctaaaagaaaaatattcgtctgatatttacctgtttttttggttgggtatgcaaccatcaaccatgattaaagagaggaataagaatctaaatgcggaaatgtatgtattaccactcaaagcttttgaacagttattcatattgaaaaggtggaggtaatttaggactaataagaggtctgagacggtgcatgactattataaaagaagactatttcaagtttccacagtcaaataaacaaagctaaatgcaaggagccaacatttttggtacaactatactagtgatagattaatattatatttatgacagtaagatgtgggagacgaactacatttgactaaaacaaagagcaacgacatttgacttcttcacgcggcgctcttcaaagttcaaaccggacggtttactctttatttgacgcaaacagttaaccggaaacagctagtgttacaccaaatttggtgtgatattgcatcacactcatgtcactttttagtgttctttggaaaagttttttagtgcaaaactttactaaaatgatgttttaattagtgtcccactagaaatgacttagaataatctgaagatgatggacctaaaattcagattactgaattctctggaaaatcacaaaatttcatcttgaacaaacggggatatttattatttttaaatattttctgtagtaattttttgtgtaagttcttctaaattttattatagttattgataatctaaatgtagtatatttgaaaagtcataaattaaaggagtttttggtaacacgttatccaaataaagacaataatacggattttatataacgcgtcaagaaatatgtatacatatattaattaagcaattggatgtatctgctacaaattctcatgggaggctgatgtaatcatgatatctcgaatttgaattttactttctgcattataaaacatgtgtgtggattactaaagtgtcgtcgtggtattcatcatgttatgtatggattggatccaggttcaaaacagtgcacgtaagacacattttgatgtgtatataaaggaaaacatgaaacttgtgaggtggatatatgtgatgcagagaaccaaaaatgtatctgtcggcgtgtcatcatgcatgggtcacgcattgccttctggataaagaacactctcactcacaccaaacttgtaatacatgataaaagtacgtttaaagacaaactcaaaagtgttatctagttatcttttgggttagttcgactttgagaagttgatattagaatacttatcagcttaattcaaactaatgttctcaaaccctttagtatcgttttatgatatttaaatatatatattttggcagattactcggttttaaaagtatgacaagaaaaaatgtaatttgaaagtgaactttgaattatatctgtatttctatattttagactggataaatttaaactgaaggtgagtaggtatttaatatacgtaaaatatattagttgagccaatgggtaaaaaagtactcatattatcatcatatatataggattagaatattagtcaatcagaaatgggaagaaaatgagtattttgattggttaatttcaagtagggccttgggttagaggagtcattattctttgggtaatacgcgttgggcttaaatgtttgggtccactcttcacattattaacttcttctcttatgatcgtattcgttttcttgtttctcatgaaaaagaactctctcctctgtgtgtgcatgcatgtgtgtcaattgtcaagtaacttatgcatttttaaattgttaaatttgtggttaaatcataatacattacgtctttctcacatgttaaattttggggataactattaatcaaatgcataattttggctaataatttcgcttgatctacgatcaactttttaaaatacttaataatgtgtaaatcatatctttatgataaaatttaacttgggaccagtaactcgacatctaatttcattgagaactaactaactaacttagttctcaatggtggataaaacctctaaagttttacaagtttttgagttattccatttcattttgacatttagaagaatcaaagacttactatatgaagactaaaaggatttaaaaaccactttttcaactaagttattttcgcagaataaaaaatacattcatgaatcatgatctttgattacaagggatatataaacctaaaacctaaacgcggtgtatatagttagcggttgattaattgtttaacataaaaaggaaaagctgggaaacaaatcttgacgatttatcaatatttttatagaatcatagatataatcgtataatccaattagttcatatacatttaactcttcaagaacgatttatcaatatttttatatttctattcaaaacaaaactaattgacattaacttaaatatatttaaaagagcagagcataattatttagtaataatataattaatgtgctgaatgatattcttgcaataaatctcacttagaagcaattcttttgttttattttagtgaacaaaaagtattttccttgagttgctctgtggttctcagcttgacacattaacattttctcttacatgaactcaattaaattatagatgatatgtttgtctttataattaggagtaaatgattatgtgcatacatattatattcaggggttttatttatgtctgtcaaataatttaacagaaactgaggattgaaattatatatgtataaggttttcatttttattttgttctagttgacttaaaaagaagaagaactgattgaataacgaaacccttatatacaaaaaagcaatttgtgtcatgaataacctaacttaggatcatgaataacttaaaaattaaaatacatgcatgaataacgaaacccttatacaaaaataaaaataattgtaaattaacgatctcatattgtagggatattagagaagtgcaagttactccatcgtatgtaaattatgtatagtttttcgtcgtattcgaagtttaaaatctaccaagcattctcatacatcggatttattataatatcggaccagaactaacgattattgtccttaaatccaatggaatatgaatatggcgacattctgactttaagcaagacaagaaatcgagcagtgatcatgccaccacatttcacttttcattttaatatacataacatatgcatgctaaaaaaacaacagttcgtacaagtcaaatcattgataatgaactaaaatgtgattataccataagagtataaaacgatatgatgtaattacgacacattctttgaacccgtgtgtattattcacggaattggaatgttaagaggagttataagtcttaagaatgaatgaaacagataggcaaatccgtaaggtgcaatgtaccgtaacccgtcctctaaattttgaaacttagagacaattgaacatatcttcaagctgtgattttattttctttgaatatttttttgtttgtaaaaaaactgataaagaagattttatgtggggatgatcttaagacaaaaaacgagtttgaatctcatcttgtcggaatctccaactctgttctgtgccgtcctaatataattttaattatgtttatttatcttttgtacgattatgcatacctacttgaccttttataacttataaggcaatttgcctcccagccggaccaaaaagataacaagctcagataactttttttaaaaaaaatttagcaaacagtcaactataatacatacaaattagcttattcttttcacatgcccataactagattaatttatgtgtatatataaggtgttgagtttatatataatacatacaagtatacaactacaataccatgcatttatatataataaaagtgttgaattcgccttatttgcttataaatttgaaagtcctcgaagtaacggaattttcaagtatataacaaaagaatgttcacactttaacacatgaacaaacgaatgttaacactttaacattttaaagtatagtttatggcttattcttcccttctagtgttgtatggttttaaaccccacacaagaccacaaatgtatatagtaacattttgtgtttaaaatgagctaagactcaacgtgaattattcatttataactcatttaccaatctatccattacagctgtatgtttttggtatcgataagtgtgttagggcaaaatatcaccatggcttttgatcactctcttacgaatgagtttttcttcatatattattattcttagctcatagcttcatccaaataagttagttatcgacgccggatatatatcatgctgcctccaaaaaaattagctaagagagacctaccggacaattagtaatttaaggtaaaaagcggcatggattaaaagtttctttttattttcttgttctttttagtgttgttgaatttgcgataatgattccacaaatcgtgcattggcgtggccatattttatacttcaccgcttctcttgtgtggccaatgtaaagtctttctcattattatactaatctcttaccatcttatacataatgtattttaattaattgagatgaatggatagttataaataagaatatgttaatgtgtcgtgaaggaacaaagcctgttgttgtcgaccccacaagttgactgatcgtgttcatcatcatgcatggcttcgtttcacttatttaattaacgacttgttcacgacacaaatgattgtaccagtttaagaatctcttgatctctcttcatcatcaccaaatcttccttgagaaatattctctccatcatcaagtgtctccaacctatatatatatatatatagttgcacaagttcaagaattatcataacaacaaactaacaaacaacaacaacaacaacaagaaaggcaagagttgatcagttagagcgatggacgtttttgttgatggtgaattggagtctctcttggggatgttcaactttgatcaatgttcatcatctaaagaggagagaccgcgagacgagttgcttggcctctctagcctttacaatggtcatcttcatcaacatcaacaccataacaatgtcttatcttctgatcatcatgctttcttgctccctgatatgttcccatttggtgcaatgccgggaggaaatcttccggccatgcttgattcttgggatcaaagtcatcacctccaagaaacgtcttctcttaagaggaaactacttgacgtggagaatctatgcaaaactaactctaactgtgacgtcacaagacaagtaagtggaagatccaatatataatgtttactttcattcactactactacgcaataaactaaataaaatatcattaatttgtgggatataggagcttgcgaaatccaagaaaaaacagagggtaagctcggaaagcaatacagttgacgagagcaacactaattgggtagatggtcagagtttaagcaacagttcagatgatgagaaagcttcggtcacaagtgttaaaggcaaaactagagccaccaaagggacagccactgatcctcaaagcctttatgctcgggttagaaaacatactttatattacttcggtctcaaaaccaaatgacaatgagtaaagtcgttcttaagtgtgttatcaattgttgcagaaacgaagagagaagattaacgaaaggctcaagacactacaaaaccttgtgccaaacgggacaaaagtcgatataagcacgatgcttgaagaagcggtccattacgtgaagttcttgcagcttcagattaaggtatgtagattgttaaaaggattttttgtttttagtcagaatcttatcataactcatgttcaagttaactaaccaaaatgcatattttataaatgtagttgttgagctcggatgatctatggatgtacgcaccattggcttacaacggcctggacatggggttccatcacaaccttttgtctcggcttatgtgaaggacttacaagttacaatgtcaatgtaaagaaacccatttagaacatatatatccctatttgagccaaactaaagagatctacgctaagatcctaccattttcttcttgttgttcattctgatatttttattattcttaacttcttttgtctctttcgtcattatggttctaagaacttttggtactctttttcttttcttttttgtaattatatttttaaattatgaaaaagtcaactcagactaattaaataacaatcgtctttccttttgcaatttgaaaacaaagataaaattgtattattttatgccagggtttcggttatgtttcgtacgactccaaaattcaccaatcttcgaaaaaatatattgatttattcgaccgactttatagcaactcatgataaaagatgtatatcaacttttttttttttagtggttacttcatattgttgattatcattatcactttatcagtgcatattcagacataaggtgcatattggcacaaataatcttttaattcttgtgaatagcacataacttgtgtctaaaaagttaagtttttgaatacctaattaaacaagtgtttgtggaaacaccctacaatttcttttggccacttaattttttatgatttgagtctagagatgtgattgtgaatatgtgatgataccgcacaaatcgttctgctgtgcgacgatgtgatcgatcaatggaaaaaacgtccaataacaagcggatttgatatcattcgcaaagccacgtaccgtacgttcaaaagatgtccttcatatgaatatcgactaagaacgttttgatttttgatttattaacctttcattgcatttctttccgacatcttctctccattgtatttagaagatgaatttagtcaaacattgaaataaaatttgctatgataacaaattttgtgtcattcatcataaattttaaattaggtgttataggctaacacttatattctaggttttagaactcataaagttatcccaaacatctgactgtaacaaactaactatacatcccaatttatgcttttacacgttttacctcccaaactttgatctattaccattcaaaaaaattacagctcttcactaaacattacgatatattagaagctacacaattccaaatctctaactgaaatattgttttttcatttagtatactttgaatttttttattagttgtttttaattagatgctatatgtttttttaattaaagatgcaaagattcaaattccatgattttgaaaaactcattttttttttttttttttaaataccaaaactcaaaaattatcaaaatacaactattatatgttgacaaaaaaacaatttatccaaaatttttacttaaataccatcccttgaacacgttcctagtttcggtttggtttggcttgatgttctaaaaagcgattcggctttattagtcaaaccaaaccgtatcgtgaattcgtgatcgcctttagccaccgtgaagcttctccgcgagctagagggtcttaaacactaacaaaatacggaactgacaaacacagcaaccgagactctctcttctctctctctcgctctccgtcgctgccatggcttgcgccgagcagcctatcaaaaagcgtcgtctgtatgagtcaatccctgaatctcaccctccgccaccaccgcaactagaatcccaatccccttctacggtggtaagctcgttcccggctccggtgacaccgtcgcctccatctcaggaggaaattcaaacgagaagtaggaacagagaagagattcgaagagtgcatgactgctataagcgtcttaaatcttgtgttgctcagagagatggtggcggccgctctgcgaatcttgagcaagcgtatcgctccctcatctccgcttccagaggtttattttctctcattcttagctcgatttagttctatcaattggatgattgagaatctgccattttccggagttgattgagctcattttttttttttttttcctgaaattgagttttgtggttttagataactttgtatgagaaagaatacttcttaactgaattaagtgaatattagggttacagattcattagctctagcattatgattctaatctttggacacctcctagagtaatttttgttagtttgttggagtaatgatttagttagttggagtaatgatttagttagttgcttatacttgcaggttgtactagcgttaagcgccttgtggctgatctcgttcctcgatatgcattgtactgtcctacggctattggagatgcagtgcaagctgttattgacatgcataacttcagcttggaagctttaaagagaggacaagatgctgatggtgttgcttttcaaactgctaaagcctgcatatttggtctagttgacctatgttctgctgctttatcgaagaaaacgtcatcaccaggggctcgagatatctgctctgccgtgttcagaaatgtgttaaccttctttgtgctttcttttgaggggaaaaatatcttccagatagttgataagagcgatttgaagttgcaagatcctgacgaaattttttctcagctgatgcaaaaactttcagatggaaactcgttacctttgatcaaattatcccagtttcgtgttttagctttactgaaagtattcttcaacttccctaaaaaatcaattgccacttgtttcggattcttcaattcttcatccacggaggatgtagcaacggggaggtatctcattactcatatgacagaaaagattaatgatattgatgccgctagtattgaacctgaagtagacgagaattctggtcagacaggttctaacaatatagaggctactggtaagaatgcagaagggttgaatggtgtacaagaagcatcaaacagtctaacgagctgcttgttagaaatggtaatcctctgagtagtgtagaatcaaaataagtagcctttgcttttcttagcgtgttatttatttgtgtagggctttagttattatttttccctgtattgagcatcaaccgtgtcactcattttattcgcttgctctgttcttggaactttgtatggctaatgtgtaatgggtatattcaaatctgatagtttcaagaatccttcgtgcaggttattaggaagagttcctccattggtaggtgggccttctttcagtataagaaaatatgcagcctgtcatccttcgtggatatatccagtgctgttacttctctagagggaatctttggatttgttggaaaaaatatcaagttagaagattgtcaaatggacagtgacgaggatgattatggaaaattttcagtttcacatgtgaaacctcacagttctgcagacaatgatgtccgctctagtgctggatcggtttatgatgctggaggttcacgatctatggattttgagactgttgaccagagagacttgtcatgtggtagatcttcagtcccaaggggattattaaaccagcatacaccatctccttctgcaagagggccttcagatttaagaagtaactctacggatcgtaggaacaattttgttcttgcaggatcacctgtttatcaggcagtaccccatggcccttcatcagggcaaattgcttggtatttggatggggaccccactgcttttgacatttttccggcttcggggcagttgtggttaggctatttaggaccagatgaaacagaaggtcatctaaggtttcagcttgacaggtacggccctgtagaccgtttcttttttgatccagtgaaaggatttgctctagcagaatatagaagcataattgatgcaatcagagctcgagaatatctgcgagcgcaatttccttggcgcattaaatttatggatataggagtgggtgcaaggggatctttgaatggagtagcatatggttattgtactcatctgtatattggaggcatcagtagccagtgggagagggatgaaattgtccatgagtcgcggcaagccctttataaggggcctcgcatggtgactgacctgtactatgaacatgcccttctgatggagtttgatacacctgatgatgctgcaattgtaatggcccatctcaggttttttcggggagaaaagagtaaatttcatttggcatcaatcaatcgtcctttgcctcatgaagatggaggaaggtttgtcttcgcttcttctgacctatgttttctttgatgattttgaactattgacattatttttaataatgaaatatccacaagactttgtatcttcttctcacaaactctgaagcgttttgactttggtatagttatgcactttatgtcgttttttatgtctcattggtttaatgtggaagtttcttgtctgaacagtcatccagagaggcaccttcaagtacctccctcatcaaaacaggatagtggttcaggagaatatgtttcccccttaatgagtacggataaccactgtaattctgtacctcctggagctacctttcagcaaaactggcctgcagctggtagcactcttgtgaattctgcacaaggaggttagttttctatctactctttcctgaatagtgaatgctttttaacttgtgactgaagatgtgtatgaaactaagaccacccttcctcagtctcaggaactcctccatgtgtgcccataccagctccgggccagcctgcagtgcctgctacaccgacatctcaaatccctccatctccgtttgttcaacaacccatttaccctcctccaaacagctcttgggatacaagatccctaatctctccaagcggtgatgctgtagcaacatcatctcagatgcaaggacctccagcgcaacaggtttcaggtcccttcatgccgcctcctgtgcatccagtctctcagccacaaggacctcaagttcagcaatttgatcaattgtacccacctccgcctttaggacattcattaccttctgtactccagccaccactacaacctcaatcccagccaccggaaccaccgcctgaaatgatgccgcctccgcctcaagctctaccacctcctttgcctcactcacacccacctctggttcctcctcctcctttttctccactgttgtccccacgcttacctccaatggtcacccagttgtgtggatcagaggcttccaaacagaacatagggcaccaatggcagggtgctttgtccaaaagtggagttcattactccaccatcattgcacagagattggaatcagacatttgcaaatatatcattggatctcccgagcctgtgcagtgagtgacaacacctcactctaatttgttgtgttgtgtctttctttataatgaagtgatgtgctatgagatgaatattctttcctgtctttttacttcttgcagatggccagttaaactggatatgactaagcgcacggatatgaagaacgtaaaagctacttttgcgaatacacaaccacacaaagtaagtttccacctccattgcgaagtaaaatttatcgactgtgcaagcttttttgttacacgatttaaggaatgctgttttgcagagggaggtttgtcagttaattcctgctgctttcagcgatcgcaaaggggtatgtgtcacattttcaaaccctgaatcatcataacaccattttgtcttcctacgtaaatataataactctatcaaaactctctttctggtggcagctccaagatttcataacatacttgaagcagagagattgtgcaggagtaataaagatccctgcatcaagtcccatgtgggcaaggcatctcttcattcttccacactcgcaagagacatgttccttgctttctgtttccccatcttcctcggaatgcttgatcggtttggttttgccaaaggatacaaatgctgaggcctcatgacacaatagactggtgtaccaccccgggacaaggtagaataaatgaagacttatgtgtttaagatagtagttctaaatcacattgtaaatgaacttactagaatctcactctttcttctcccttttgagggttgtcaattgtagatttgtttcaacgatttaactgtcttcctctacataagagtcaatagtctggttaaggttttgtcagtatgcgcgtttttttacttttaaaaactggaccggaccggaccggaccggcggattagaacacaaaatttagaccattaatggtcaaacgcaatttttagcaatggcaaacgcaaacgctgttcaaggaatctcaatcgtttagcaatcacagacattgacgagtacggatatcagtggctgcgccttttgctcctcctccctcccgccctcttcgtctgaattacaggtttcctccggcgagtcatcatctcttctcttccatcgctgatcttctcacagaaacaaccatgtctaacagacgctcgaatcggcaagatgagaacacaagatatgtccccaagggccatcagcagcagaagtttgtacccaaacccatgaatccaactcctacctctaattcaacccctttccctgtttctctctcttcttcgcttaggcaatcagattcctccggtgcgagttccagagtctccgcttcgggtggtagtagggttaggattggggatcagggacagttggtatctagcaaaagtccagctcaaggcggtgggagttttgtgaattacttgccgcaggacgaggctgttgccgctggtttagggcctgatgatggaggtttggatccagtggagtctcagggagtggtggatctcctcaatagagagctcacaaggctgcttaagctcaatcctagagatttttggagagaaggtcatgcttcttttgattttatgtcagttttggttcataatgagcttcggtctctcgggtttcaacttttttttttgtgtgatggatttttagactgatattacttctcttggttaatgacagtggctagtgatgcatcgttgcatgattttttggatagcttcctgcagtttagaagcagatggtatgattttccttttcatggtgtcaagggtattgttgcgggcgtgattgtcggagaactcgagttatgccgtcgtgttttcatggtcttgtatagaatgtgagtcgctgcttgtttcataatccaaagctttttgttgaatagtcttttttcatcatggatactagtgtcattattttttattcttttgggtcttgtgagttgagggtttgtatatttggctgtggcagatcgtccaatagggatcccggtgctaaagctgctgatagcctcagtcagaaagatcatgaaggtggccttttgctctttgtctattctaatcccattcagttgttgttacttatttcgttctgaaaaggacatgaacatagaatgaaagattaacatgcctcaatgtttatattactaaatcttaggctataattcttttgtgtctcatcctcgatgtaagctgcctttcctaatctaaactagagaatgactcacaatgttcttttcttaccaagtctctgggactattataccatctaaagcttaagtaaaattccattactcactcaggggtatagttagaagtaggactgttgtaaaggtgatatgactattgtgattattttcacacagtgattttttaactcaaggttagattcctttacatgttccatttggattttggataagctttacgagtattatgtgtagacgttgtgtgcttatgttggttgactcctttacatgtaccatttaggtttttgataagctttacgattcttatgtgtaaaattatgcttatattagtcgacatttgttctcgggtagtttgattatatttcttagaccagctcaacataggtaactgattagagttggttagtcttgggcagggtaaaatagagctagcagctgaacatgtggttcttcttgaatatattggaaattggtattggttgtacgaatcaggtagtgagagtagtccgctcactgatcaagactttctagaatgaattgagtttttcttcttttttctttacgttgcacattttgtaggaaattttaaagattattttctagcttacagctattcaccagttttgtttgtagttcttctgcaggacaagaagttactggacttgccaaagttattggatatatgcgctatatatggacatgagaatgcagagctcacaaaatctttagtaagtcataggagaattataactcgtccgaaagctgagataatcttttaactctgtgcatcattttttgctaggtttgattctctttttgtgacatttgacatcctggaattcccaattgctgctggataattaagctgagataatgttctattcttttgctaatcgaattgtatattttaccagattgaaaatgctgtgaaatcacaaaacggaatttctgaaagtttgaatatgatgttgtctcatttcttgggcatcctgcacacaatgcatcaccgttgcacctcatctttggaggtatgttatatgtatttgatttcagaaactcttctttgggataaattaataaaattaaaggtgtaatatatgacacacatttatattatgtttaaaatcacatcaagtgttgaatttaacattcttggtctgtaaattcttgttttaagttttcttcttcaacgttatcttggatctatagatctactttcatatttgcagaccttagtatcaagtgcaaatagtgaagaccacggacgtagacaactccattcagaccttttggaggtgaatttccgtccccttttttctattaatttctctgttgtgcatttgcttctgtatacacatgagactagtaacattttagttatattcgtaaacatataattataaacgtaatacagtatttgtttgtgttgatctcttccaagatatctatctaacccctgatatggtttcttgttacataggaattaggacatacatattaactcgttattatagggtaagaaaatttgaagcttgctttaggattggctttaaaataatttagtatatttcatctttattatgtttttgatatgaatacgtgcgagtgagcatgcagacacttgcatgagccaaacacaagtgtgcacactcttagcacactcaactgatcaaaatatagcatgccaagtttctgctcttgttgtaattcaaaacatgaagtattttgcttgtttatagtgtatgggcatgtactgcatccgtgctaatgtttttttctatctgattaggttatggacttcattaatgatggagttgtgtctttggatgctttcatttctgcttatacaccagcagttttcatcttagcatgtcctgttgagacaaggtatgcaccatcttctatctaaatcttttaatttctcttgtgagagaaatgtactctcgagtagtatccccaaaccttgcgcctatcacacatgattagttggcataaatcatctgttactggatttgtattgaattccactatgagattcccatgattgatggaaagcagtattactagtgaaactttggttgctattaatgatctatattaggcttgttttggatctgtatttatcataacctaaatctgtctgtgcagttatgggagcgatgaactactccgcagcctagttcggttgcatgattcattgcttccatcacttcatcgtggctttcaggtcttgttcaaggatgaagaccatgattctctttcagacatatcaacgagtttaaacatgttatcaacaaggataggaagtttatgttggaaaatattagatatctgttatctcagcaatgataagttcaatcacgaaacttcaattccagctgtcacaaagatgttcccgtcaagagttgaggaccctatggtaagggcagatatattgattcaaacattcagggagatcagtggactttctgagcagtcactagaaagcaagaaccgattactccaaaagattgagaagaattacagaatcattgatagacttaggagtttacagaatgcaggtattttcttctacaatttggttctgcccagctgttacctgatttttcatttcaaagtcggttccagtctttagtatgtatggtctgttaggatagattgtgtagttcactgaaggtgaaataagcaacacattaacttcactgttagcaagtgaaattttctgcataagctagctctttgtttctgaatgccatgagtttaagcagtagtctaaagcagcttgttattggtttctatgcaggatggatatctatggaagatgagcaacttcaatatttgtccatgatcatgttgcattcggcagacactttctctatgaaggagtcaccgcttcttctaactgatggtagaaacgccgaagagcttatggatgaaaatgctgtagttatgcaatccaagatcagtcaaataaaagacatattccctgagtatgggaacggtttcttagctgcgtgtcttgaagcctataaccagaatccagaagaagttatacagaggattcttgaaggaacactccatgaggatttgcagcgattggacacttcactggagacgatgccacaacctaaatctgctccaactcttagaagcaaagacaaagggaaaggaaagctcattgaatctgacactagtagctctgctagtgccatctatacagagaaaccgatcacacggccctcccttccagcttcatcagcctcatcagcaacagttggcagatttgtcagaaagccaaaggatgatactccaagttacaaaattctcgatgctagaaaagaatccgacagagagaggaacgcagccctacttgcacaatacgaatatgatgatgaatacgatgattcttttgatgatctgggcttgagtattgcggaatcaggtactgaagaaagcggagcgtttggtaacagagctggatccgagccctctgatgctccaaagtggggtagcagaaagaatcctcaattctatgtgaaggatggtaagaactacagttacaaagtggccggcgcagttgctgtggcaaacgccaacgaagcttcactggtaaatgaagcagagggagataagatacttgggttgggacgtggaggaaacattcctctaggagcggttagaaagttgacagagtatcaggcacagagagatgagaaaggtcagtctaatgtgaatgtgaacccaagcgatggaagagagaatgggagaaactggagaggagtaaggggaagaggaagaggagtggtgaacagagagcaaccgcaggagaagagtaatgagagtagtaataacaactcagaggttaatacagaggcggagaacggaggaggacggggtcgaggaaggggacgaagaggaggaggtggagggagaaatcataatcataaagatagagctatgaagaaacatattgctagtgtttctggcttctagaggtttaaaaagtaacaaaaagcacaatacgtttttgtgggtctgttttttcggatacaggggagaaacttaattacaaatcgatacttcatttgattgtaatgcttgtttctggtaattaaaagaagaaaactagcatattattattccctttggttttggttaaacaagtttcttttgtaacaggttggtatgaatctaataaaaaaatgaactttttgtgaaaaaaaaaaaattcttttgatatatatgcaaaggtaacaacaacttataaccattccaaatctccaattgaactcacattgtctaagttctatctttttatctttattcttcttcccgtaaaagaaagagtagttattacttcgagtgacagaagttgtaaaaatttgtaagcatgtaagccgcaataatataaaaagagaagaaacatttataaatgtgtgttatatataaagaattgtattttatttgaggtagataatgaatgatctacaatcaacaactacacggtttgtgattatatgtatccacgtgatttaatatacaaatagatttgttttctctgcaaaaaatacaaaaataaatacataaaagaaaagccaaatcctaaacgtaactggaaaataatatacgtatgagctaatttcaatttggattagacaaagaaaagaagaagagagagacgtaattatacaaaagcttacgagaagtttgttccatcatcacttgagagaaagatgatcaaatcatacaagagaaacacgaaccgttcaacgggagggaacgcggcagcactatcattcgctttggttcgtcgtgcagaatatttaggtacatacatatgttttataaattttatcatctttttgaatgcatcataatttacaatatttcgattacgagaaaactagatgaagagaaccttaaacatcctttttaacataaaaaagaacactaaactaacacaagttctacacattagtataatttcttagctgataaaaaacacaccattagtatttttccctttttggtaacgttttttttaagataatctaaaccataatactgaatcacaaagctcataaaaaaggaaatcgaaattataatcacgtcggcaagtaaagagccaacggtgagggatgagccacgtgtgaaaggatattccttagatgtgaatgggatctaattcttgtccgattaaaccgagaagagtcttggtacgcctctctatatataaaagtcatcactttcctcctcacgtttcttcctttggcatcgacgaaagtctgaaaactcttttctctccacctctttctctcttaccccaaacacaaaatctcctctttaatggatatatcgcctctccgatctcattcttcctcgtttttatctgccaaactcttattgctcttcttcttttgtagttttcgtgcttcttcgatttcttcttcttcagttgtttcccatcgtcgtaatccttctagctttcggtttctttgataattccctttgaattcgtttttcttcttctttcaatttccgcaaataatcagccgccgataagataatcatggggaggagtaagatttctcttcttcaatttttattctttaattgattcaatttgcaactggatttgtttgttttagggttttaattgattactaatttactatgaaatctcttatataaccaatttctgttttcgttaacgcttttataaatttggatgctttgattaacttttgctggaattgtttttttttgtgcagaatctcagcgtaagaacgcgacaatgtttgatagtgatgatgatacaagtagtgtaagctcttcctccaccatgccatctgagagattgttgaatcctggtatggatgaagttactgttctcaaggatgctttgttagatcaatcccttgatgctctctatgagaaaaggtttgtgtttctttgttttctttttgatgtgcttttgcttgattttgatgcaatactgatatttttggatttgaaggagctcaactagagagcaagctttggccaccattgttgacgcatttaacagcgacttgcagtatgagtttgttgaaaagaagtaaatatctgacactctttcctattttagttttatcaatccacgagtcttgtgtagtttaatcaatcatacatcatacagaatttaaccatgtttcttcttaatgagtgcaggtttgccactttattgcaccagtgtttacactgcaccaagaaagggtctactaaggagacttcattagcaactcatgtcattggtgagtctcttagtaatagacaactcatgcatttttttttgtcaagtcatattaacagttaatcgtggtggtttacagggttgctagcgttaactgttggactcggggatcatgcacaagaggttttggaagaatctgtcactcctctgtctcaagcccttaaatctggtcgtgaaatcttgaaaataacttcggtatggatgatttgataatcgatcagtttgtcattactttacaggtttcttaataaggttcatcttcgattcatggttgttgatattctgccttttcattgtagatacttgagtgtttagcagtcataaccttcgttggcgggaatgatccagagcaaaccgagaaatctatgcagattatctggcaaatgatccaccccaaactagggtctaatgtatgcatcttacttttttctcattttacaagccttttcaatctgatttattaagaaagtaggctcacatgaaggttggcgttttttttgtaggttgtggcaactaaaccttcacctgctgtaataagtgctgttgtatcttcctgggcttttctgctcacaacagttgatcggtggactctaggtcctaaaatttttcaagagtaagtggggcatcatgcttttcttcgatctaattttacttattcatagactgattgaatattaatgtcattgcaggactgtaacttatctctctacattgttggaaaaggatgaccgatctgtacgtatagctgctggtgaagcgcttgcagtaatatatgagttgggaactctagagaagttcgctgccgaagtcaaagggtctgctaatggatcagtgaaagaaggaggtgtctctcaggaagcattgatgcacatgcatggcttgaaagctaaagtcactaaacaagttagagagctctctgtagaggcaggtggtaaaggttctgctaagaaagatctcaacacccaacgaaatttgttcaaagatcttgttgaatttcttgaggtatatcttcttcaccttttctcctgttgaggtttaagttagactattctgataggattttatatatgatgtgttttaatgatgattaggatggatatgctcctgaaacctcaacaaaagtcggaggggactatttacagacgtcaacgtggtatcagatgatacagttgaattatttgaagcatttcctagggggtggctttattaagcatatgcaggtctgttttcttatttaccctttcttttcaagtgtcgaactctcttaagttttctttgttataaagctgacgctgtactgttttatacaatttggttatcaggagaatgaattccttcatgatgtatttagtttcactccaaagaagattggtggaggaaagttgtctaatgacgaaaaggtatgtttccggtatcttcattcactgtctcgaatcttatcccattgcaaaaaccttgttaacaaaactggattttgcgattatttgttgcagaggttgtttaaatcaccaaactcagctcttaacaaagcaagaacgcagttcctggccaagcaaaggatgttagctaaggtattataaattttgattaatcgtcttatctgggaattgtgttgtgcagaaagaataacagtgtgttgtttccaattgtgatgcagaatatgaacgttgggcattacgcagctacagcaatggaggaagaatgatggctctacaattgatttttgaagaatgatggcacactcatctgctgcttttggaaaatgttgttgttccattagtacactttttcttgtttcatgtttttgatttgataattggttccaatattataaccaactcttagaaatgtcttttcatttataacaattttcgaccgttgagtgtaattcctatgattcaacacttgttgtttctgttaagagtgccattgaccaattgtattttgagctgagactcggaattgtcactgaaaatttgtcagtgtattggtgacagacaaaatttagcccatgtattggtgagagacaatttagcctatgcttcacttattcagtaaaaggtatctaacagaagaacaaaagataaagtaacaagttccacaacattgaaatatttacgaagcaaatgctcctccaaatcacttatacatttggccaaaatgaaaacataaaaaagcaccgtaactagtccaaggccatcttgggatatcaaacttccaaaggccggagaaaaaattggtacctttcaatgccaaagttgtggcacaaggaatcacattatacaatgtgttgcttagtgtgaaccaacagggatcatcttcaaggcagcagcaacaggcatgccaaggaacccgagtatgatgctaaccaaccattgtcccaaatttaatggtgttgtatccgcaaatgtacccagcagctcgattatgattacttggaacaccactgtacatgttagaaccgctacgaatacgtagttctttagtatccccttgaacacatcaattttttccatttccctcgagcttatctcattgaatacctgaaacaaatatcatacattatgatgagaacgtggttatggtcaatgttggttgttttcctttttaagatccagacgcggcaagttacctggcagaagacaaaaatgttgaaaataagggtattgagtgttagatcagagtcggggccatcgagaccaaacattgtctttccctttgtttgaagacaccatatgatgacaagctggtagagtgactgaccaaggatgttcctccacattacattacttatgaagtttcctttccttcccactggagatctcttcatcaggtcgtcctgtggtggttcagtcgctagcgcgagtgctccaagtgtgtccattatcatgttaacccacagtagttggacagcagtcagaggcgcgtttcctgagacccacagtagttagtgtcaatgtaacagagaagttagttgcaatccctgaggagattagtcttttgaacaagagaaaaataaatgtgggttgggaactaaccagtgaggcaggctgataagaagttgacaataagagccacaacatttactgtcagctggaactggacaaatttctgaatatttatgtacacagaacggccccatttggctactgtgacaatcgtagagaagttatcatctaggataatcacatccgcactttcttttgccacctacgaaaattgaaaaatagaatatgtaagtgttgtccttccatgagaacccaaactcaattgttagattttctcacaaaccagataatgaaatagggacaatgaagattgagtacacacctcagttccggaaatgcccattgcgagtccaatatcagcttcatgaagtgctggagcatcatttgttccatcacctgtcactgcaacgacttcctgaaacattgtgcggaggagtctcaccaaagtatgcttatccatgggcgaggatcgtgccatcacctgcaagaaggaaattatacttgaatcttttgtagaagagtatgtcctaaggagtttttcagaatccggaagctaatgcaatgaaattgagggtttgtttcctgtttgcggatgtgaactaccaacacactgcataaaacaggataaagtaacttgtgtttggcagacaatcacctgcaattttgggattagcttgagcagttcctcatcacttttctcccggaattcaggaccttcgatagctatgccatcatcagtcaatatgccacactccctggctatggccttcgcagtagtaaggttatctccagtcaccattctgacagtgatgccagcagatttacaaatcgcaacagactccttgacaccagggcgtacagggtctttgatgcccacaatacctatacaagtgtatccaccacttggaataggagcctctaatgagaattcatcaccaatttcgaaatacgctaggcaaagagttcgaagtgcttcgctagcaaattcctcaattatgttcttcaggtgactggtcgatttttcatcgagaggaacaacttcaccatctttgttgatgtacttatcacaagaatctaaaactatctctgaagcacccttacaatgtgcccggaaatgtctttcaggcagctcaatgacaactcccattcttttctttgtagagttaaagggctcaactttcacaacatttgaggcttgccttacttcttggaagtcccctccgagtgacaacccaaattctaacagagcagtttctgtaggagttcccagtatctcggttttgtttcctttgcccacaacaatctcaccaccagtgttagtaaatatagattgcagtagaagtttaacagcagactcagggataccagaggcaaatttcatagcagcatcaggaccattaacctctttggcttgttcacagatgcaggcttttacaactgtcatgtgatttgttgtaagagttccagttttgtcactacaaatagttgttgcagatcccattgtctcacaagcagcaagattgcgcactagcgctttgtcattcatcatctttttcatggcaaaagcaagacttaatgtcacagccaacggcagaccctccggaactgcaaccacaacaattgttacagcaacagcaaaatattctagcatcgccatcaattcatcagcagtccagatccagtgagaattatctaggcgcttctgattagccaatccttgaaccaaaacagcaaacgtaatgacagcaaaaaatagacctattttaccaatgatggttgccacaccattaagttttacttgcaacggtgtctcatcatcaccgccttcacttagtgtagccatcagtttaccccattgagtcctcattccaactgtagtcaccaacattttgcaagatccatcctgaaccttggtaccagagagaagaaacgggtgttccacactgacactaaccggttcactttctccagtcaagctcgattcatttatcagaacagaaaaccctgagataaaaagcccatctgctggaatctggtctccaatgccaagatgaacaacatctccagggagtagatcatatattgagattttttgcctcagtttgtctctcgtaacctgaaccacaatctttttcttctctgcatccaggtccttgaattgcagggattgcctataatcactagtggcagtgacaaacacaacaagcagaatactcgccactataccaagtccgtcatgggcaccaataggccacccttccatcagtattccaactataagtgaaacaaacgcacatgcagctagaatcataagtgttgtatcctgaagggcttcccaaacaaataaccaaaagccacggctggggctttctgtgaattggttgattccataaatttcttttcttacactcagcaggtcttcagatgtactaattccactagcaatagacgtggaaagtttttcagtgaggccctcagttccaccatgaattttcaactttttcaaatcatgaccttctacaattgatcccaactcatcaggacaaatctcaaaccctgcttttcttacttcttcaggtagtgtatactcactggacaactttaaacctgtaagcacgcaataccttctcgttaaggaaatcaaatacatattgaataacacaagggagtagtctattctcactattaatgaactgaagtgcagcttgtgaaactaagaccgccactcgaaatttttcctgcattcataaggttgacaaaggaaaatggtattagaacaaagcaccaatagcagtaagaatttattctcaaaggaaaaatgaacagaacgctttgatcgctctaattaacgcctccttcaatacaaactacaagaaacacaaggcttgaaatgggttgtttgctactaatgagtcatatttgcttgaacattcttactagcaaacaccacgaagaacctaaaaatctacatcttaaattagaaacagaacctaatgtaatcatgtctagtgataacaatccctaacctgaggataggtaactagaaaaatactaaaaacgagctcacttagatcccatccagtaagtacagtgagtcaaccaaacaaaaaactcggaatgcagaaagatcacttattagatctccaacagtatacaagcagaaatagaaagaaatgtttcagtaatcaaagtgagaagaaagaagcacctgattggaacgccgaatcgcctcggcctcggaacgcttagacagattagcagtgaatctaaatctccttttaggattcttgacgatccagcagagcttcctccaacgctgcaacgcctcatcggacgagttcttcggcttcacatcgccgaagttttcgttcaagtagctctccatttcttcagcttactactctcgaacaacgagtgaattcgtaactatacttcagatgagataagattagagaaagagagaatcaaggatctcgtaaatcgagaacgaagaagatatgatatataacaagaagtcctctcactggtaatgggtgcttttaacttattgttatttacctttatatgggtcaagatgaagacgatgctttgacgcgtcgtctcgcactaagtgagcttcgtcgaagtttcgtctgcctgttctgaaatttcctcatggccatggttttttttttttttttggaacactcatttattcggacatgactcggagctggtcaagaaagtcaaagctatttactgacttggactttatttcaacaaagtttttagtatattctaagttttgtgacttttgtccattagaaatttcacacaaataaattagaataatttactaagtatattttctaaagaaatttttacaaaagtagacgaaaaaagatttgctctcattgtttgtcaaagtgagaactggttttcacgttttgtcttttcattcaatttcggaccaaattaccctgggaaaacttaataatggcataaaccaaaccgtgcagcagttcgtatcggttaagttgacggcgtaaaccaaaccctacagcagttggtttcggtttagttgatgcggttcagttttgaaaaagacaaaaaacaaaaaaactgaaacgaagaaaccgagaaaacgaaaaagagaataacggagagattgagagagaatcagaaagcgaaacgaaattcagtatccattgcttcaaaattcgacataacttcgaattgttgggtagttgaattgtgccactgaactcccacatccggtgaagtgaaagttactgtttttcccggcgaagccaagagaaagttactgtttttcccggcgaagccaagagaaagttactgtttttcccggcgaagccaagagaaagttactgttttttccggcgaaatttgaacctccggcgagatcgcatctttagctatggctgggaataaagctaacgacgaagtcccgaggaagcagcatggtccagggaaggagaagcgtgtattaagagtttccccgcggagaaaacgctctgcgacaaaggcaacggaggaactgggttagaatctctaatttaccgtttgttgtctttgggtgtatcagaattgtaaagcttgtttgattaaagtgttagaatttgtcggaatttagcatatctttaggatgaaaaattgagaagtagaattggaaatctctgtttccgccaaaaatatgattttgagttataatctggaaaatgtctgtgtacgtacactacttctgtttgctcaacagtatatgacttttaattgcaggtagtccaagtgttgctccgactgaagatcttacagttgaagagttaccaccaagactctttgctctagaccggtacccttccgagacgaagatgaacgcgtactctaaaccggagtacatttctgacatagcaaaagtactaaaggggaaaccagagatgcagtttcttctcgattctccatttgggaaactttttaaaatacccaaaaacaaggcatctttcaatgctaagcttgtccttggactaatatgccgtcagttagtgacaaagaaggtgaatgagatgtggattgtattcggcggtcatccaatcagatttggattaagagaatttagtatcttaactgggctggaatgtgggaagtatcccaagaagaaagacgttgatgatgttatcagtgtgaaacctgagtgtgagagtgtttggaatactctgtttcatgagaggtttggggacacggttccaacaattgctgatttggtgagctggctgcaggaggaggaaagcatggaggggtggaaccaactggcactatctcttattattttggttgacggtgtggtagcggcccacagtaaccccaacaggcctacttcaaagactgtcgagatgactaagaacctggagtttttctgcaaatacccatggggaagggtgtcctttacccgtactttggggaggatagcaaatttccaaactccttacgatgctcagaaactaataaggggtatacttgtagggtcttatgcactccatggtttcccattagctctccagcttttagctttcgaaacaatcccatcaattgctaagctaggacctgatgatgtacctaacaggacatttgctgagaggtctatccatcgtcttgcctctctgcgagcaatccggacatctcgcattttggagtgtgaggctgctgatgaggtgtgttaaattgtgtatgtacgtacataataagtaaatgtacattatctatggttaacatacttatttgtgtaggttgaggtcaactatattgtgaaaccagctgataatgtttgtcctccatctctttcatgggatgatgaagttgatgatccaagggttgattacattgaggcactgttgatagatgggcaccagtggcaggaggatgaatgggttggaggctatgctagagtaccaaagcagtcgcgcccaccacaactagaagagacaggtaagtataagtataaatgtttttacaaatttttttggtattgcacctagaagaaaaccaattaatagcagcaactggtctattgtagatgttaagaggaaacgaaatgcaccgggcccgagccctaaagaacctgctatgaaaaaacagaaatctgaaatggactgtgataaagaagagactactgaggattgttttggagagcttgtgcctgagaggtttattgttgaaatgaggaggtctttgaaggagctggaagaccaaatgtatcaaatgcatgaagatatgaaagactttgtccgtgaccagatacgtgctacccttgatccaaaaggcaaaaggccagaacaaaccataccttcccatgattcgcgggaaccacctacttctatggataaggcaccggttactgcgaagaagccatcgagaaggatgtctacaaaaggaagcactggaacgagaaagtcttcaaggctgactcgtgtttctcatgatgtggacactcctgcactttctgttggctgtaattccaaagaggaagatttggatgtccctggaatacataccactgctttcggcggaagaagaaaaccttcaaagccgaagaaaaatgtttcttttgctgttgacactattgaggaacctgattccaataaggaagatatgcaaggattcattgatgaacaggtaagtcatgtacgtacattgctaaatattttataatccatatgtataactgtactgtctggttcgatacaggatggcgctaataatgaaagtgattttactgcaaatgatggattgaattcttctgccgctgaagaagagatattagacactggatttttaatagttccttatgctggatccacacaatcccatctggtatgtcgtctactaatactcttaacaatctgtttaaatggtgtacgtacatattcgcttaagaagttagttaaactatgtttcaggatagaggaaatgttgttgttggtaagactgtctgcttaggttcaatgtctgggactgtctttgtaacacaggaagagaggcctgtggaagaagctactgttgacaccgagatggaagaagttccatctaatgtgtctgcaagagtttcagaggtagatcttctcgtaatcgttatatacagatttccatgactatatgcataactattacattaatttcttcacttatctaacgcttaactctatggtagcctatgtttcaggataatggaccaaaggatgttgctgaacctggcttagttggtacccatacaggggccgatgaaatagctgatgctgacatagagatggtagacaatccatcaggtttaccttcaacatctgcacaggtatgtgttagtcacttgttcttttttcatatgtgtacgcccataagactttgcaaattatttttgtttcaggaagaagcaagagatgccagtgcatcgactgaagctaatggcagcgagtcagaagaaatttatgagccttctgatggagacacagctcacgtacctgccacaagtgtacgtacatttttgtcactatgttctgtgtacatatatattgtttcatacattactaaaaagtttctttccgatgctaaattctacaggttgaggcggcaggagaatccaaattagtgacagtgatggaagttgaaatacctgagaagacccacagtgatcccccgtcaccatttcaagtagttaacaatgtaagctaactcttgcaacaaataaaatgtactatttactgttcaaatgtataaaatttatattatgcaggtcatacgggagttggataccaaagccgttggtgatttagctgcagccactaatttggaggtaacaatttgtgtgtttcaattcctattttcggaatagcatacataggattatatgtgtacattatatatacttgtgtacgttaacctgcacaggtagtcatggaagagccgtgtattgtcgaggggtctgtagaaactgaggatcctaacccagggtcagatgaagcagacaagaccgatattcctaaaaataatgtatgtacctattttaaacatagaaaaacgtatgaaactgttgttgacaatcatatttgttaacaggatgaatcagacaatcctgctgctgtcgaagcaaaagaagaaaaaaaatcgtccccaaagaaagtgaagaaacaacttgtctatgaacaggatgatgcccatcctcatggttttaaggcaaaaacagtattggtgcccgatgtaccagctcaacagatagaggttgttatcagggctggaaatgtctcatacaaccccctggacgtagttgacccttcaaaagtagaggaattcagcaatatcattaaaggaccctctgtgtaagtacattatagtaaaatggattatttaatatctcaatcatcatttttaaggttgttatcaaatatttttctggattttacaggattcacactcttttcgggtttcgaaaagtgcccaacgacttttttgcgaaccttctaacacctggtgaatgggtcgaaagtacggtacgttccatttatatacgtacattccttgttataaattgtacatagatgattaaatttttcgtggaagtgtacgtacactgatatattttttgaacatttcagcatttagaaatgatggcaatgttgatgtggcacaagaacggggaacagatgatagcaaacagatgtattgtattggacatgatgctgacgcatcttcttaccaagcgggtgggcgacttcaagaagtgtattaataagaacgggttcaaatggggtaaattactgtccgacattgctaatggagttcacataaaccgtgaacccaatatgaagtggatgaaggatgtcgatgttgtgtatgctccgatgaactggaagagtgaacattgggttgctttgggaatcaaccttaatgaacggctaataactgtgtatgacgctttaatatcgcacacgcgggagtcggctgtgaaggcgagaatgactcctatttgcgaaatgatgtcgtacttagtcagagcgatgtgccaggatgtattgatttctccgtactcagttgaaccttttgagtatgtgcgttgtcctaccgttgctcaaaacccaactacaggagattgcgggccatacacgatgaagttcctggagttgcttgcgtttggacaccctttttcggatctgacaaccattcgagaagcagattatgtcttctaccgtcagaaatactccgttgacatctacgagcacggcaagcgggaggccggtactgtgcacttggtttaatcgtccaagaacaatattctggttctttgcaaccaattattatgaacaaacctgacttatatatatgattgcaactacatttaatttggagattgtcagaagttaatttattgtcctctatcatattgtcgtacacatcgttcacttataattacataatgtaaatgtgtacgtacatatctatatgtctcgtacactgcatattaactttataacataactcaagtgataaattgatttgacagccaacgcttaccaacacaagtatgacattcatttcaaccgtaattgccccaaccaaattcacagtagtggttattaaagtgaagaaattactgacgacctctgactatctaatttcaaacatggttaacccgactcttcccgacgatttactctcgaagatagctaagaacctggctgaccaatgctggtccgaccttcgtccattggtacgagccggcactcgtggaagagacattgtctaccgtccggatgtcctcaaagatgccaatattctcaccttgtgtgactcgcccgatgacttccaagctggagggggccacaatccctccggatccgctgatgaaggccgacatcgaacatttttcttaaggtgttttacagctaataatcccacggcagtgtattacgaaggtattcgtgttctaacgcatgaacgaaacatcaatggagccatcaggctcttacagcgtcatgctccagtacgagcaaatgcaacacttgcatgcgccattgtattcatatgtgctgggtatgattatatgggcggcttgtttctacagctcttcacccgcaaccattatccattggactcggttgccactcgagttttgggtgatgagttcatcgaggaaataaagaagtttgaccctccatacagcaatacatatggtcctacgttctcttatcctaccagccatggaattagtatgcctccttgcgccttatattgttacatggtatcaggagctttccaaaacgtttgcaaccgctgttacctctggtcgtgtgccaggcgtgttagtcaaatgctatagttattccattctactttatatgtttgtttatgttatccgctatgtcatgtttcaaattatgataagccttctactatgttgtttatgtttatgttgaaattatattattgctcaagttgagaatttttcagccaaattcacatatgatatttagacactgcagtaaatgtaaatttggatattaaaatctaagcgtccacaactccgtacacgtgcatctaccaaataatacttagaggttttttctttgtctcggaaaactagatatggacgttcactagcatgagatatcaactctaacgtacactaaaaaataacacatgcaaacatatgaggtctttggtttgtctcataaatggtgatatttacgaatgaacgtacactaatagtacactacagcgtacactgtctgttgagtaaatgtagaaatgtaaatatggacgtacactaaaacgtacactacaacgtacactgtttgttgggcaaatgtaaaaatgtaaatgtggacgtacacttaaacgtacactacaacgtacactgtttgttgggcaaatgtagaaatgtaaatgtggacgtacacttaaacgtacactacaacgtacactgtttgttgggcaaatgtagaaatgtaaatgtggacgtacacttaaacgtacactacaacgtacactgtttgttgggcaaatgtagaaatgtaaatgtggacgttcactaaaacatacactacaacgtacactgcaacccttgcatgcgcaattctttacatatgtgctggtaatgctcacatgggtggtgtctacctccggctcttcggaagcaaccattatgctttggaatcggaggacgcacgtgacatttgtgaggaggtgctagaagatataaagaaatatggtaatactttaaaatacacatacgctaacagtttttcgttcccggaatgtgttgacgtaagcactcctgaatgcgcggaggtgtgttacattagatcgagactcttcaataatctttgcaaccaatgttacatctggttgtgtgctaaacagattagccagatcctgtagagctcacattcgccacgatcctgtcatatttataagttttccatgcaacaatatgtgagctttttacgttgattatcagtaatggaagtttgtttttaattaaattaccactttgtaattgattcaaacatactagctcaaagtattctaatatgagacatcattaaaataataaaataataaaatatctacgtacacgatatatgataatgtacaagtggcatagtttaattccaactataaagattacatagtgagcgacgatatttgtaaatgaagacgaaaggaaatttgatttgacgtcgtataacccatatatagaagatttcgctccaaattaattactcgctgtcaaatacactctagaagtgacctccatcacactctcattaatatctctattagacgtacacggttaccgagcaatgtactcaattgatttggcagataaaataactaagttaatgtttatttgaaaagattgttagtaaatgcgttgacccctaatatagcactatacatgaagccatattgttccacttatatgccatacaaacagacgtcaactcaaccttctgtcagagaacgtaatgagtattttgtagacgtacacggcgcgattatgagaggtacacaggaatttgtttaaattagaagttactaatatgatgcactaaatatacatccacgtcacccatccacttacattgatggttattctcctctttaaaactcatgacaaacacacttagttgaatacacgaatccgtgtaaacctcctcgtttgaaaaacaatgcctttcctacctccgctaacccctccaaccgagttgtacctaggaatccaattgccaagccccataagcatacttgtcaactacctccccgtcagccagactcccatagagacgctaaggaacttagtctacagttgtgacatcaacacccttgcaatcgatgaattcatgacgtggccgtcgttactccaaccggggtctcccttccggccatacttcgaggtgcttgtagaacgtggatccatcccggcggtttaccttgaaggtgttcgccaagcgagcaacttcgtgacagtagctcagggcctttcagtcatgacaacggtcgctttatctgatccctttgcttgcttcgcaaccggtttgttccttacgtgtaccggtaatcacttggatttcctccctatcagcgaaaagttctgggaaatgacacccacccttgaagctggccacgcagttgcagagatggtgatgtatcacatcagccagctccacactgaaaatgctcgccgctgggaaaggtcttggaggtttgtccacctgccgagttgcgtagggcaatgcacgttccatcatggctgcagggtttgttttttctactggtacgccagggagatggctatattctactagaagcaaagctgctaaggtctaagctactctactcggctctactctcgagtcttttggtatgacggatgcacacatattttgcaacacatgtgtatgcttcgtttaaaaaattatgttttttgaatcgttccagtttatttatcttatcttatgaatttccctttatataaactgcctgtccttttttatgtttctggcttttgaatgaattaccactttaagtattactagatgtcttcgtgtacgtacactatatagtacattaaacttcgtttatcgtacattgggaaattgcgtacacaacataagtataaatctaacagtttttgatgttgaaggcaccaaaactaatatatgtacacgatagcgtacaccagaaactatacgtacattgcgagaggatttgaacaataaaacaaggcacgtacataaaacaacaaattagattaaaatttaaacggaaacaagaaacaacaacgactgaaatgtagtttggttcttatggaaacaacaacaacaactgggaaagaaaacttaattgaaatgtagtcttatattatattaaaacggagaataatggttcattccctctagctaaaaaaccaccatcgagatatccgcaacttcttctctgtccggattggcaaccacctttgaaatagcaccatggctctcaagcttcgggttagacagttcggttagccgccaaaagctgagtgcgacaacaaaatttcccttacccaaactctgaaagtaaccatccaagtactccgcctgttgattgcgggcttcgcactccaagacttcattgctacgttagaaataaggactgttagcgtttagagtgacattgtaaataaaacaaatgaaaagaacacttactatctattttttaacttgaaactcagtttgagaccgtaatagtctgtagtcaatgcgccaacatcaaccaacgctccaatgacatctagatgatggagaaacaaagataataaacaaacattttcaaaaatgtaataaatgaagcgtcagagttattcctcctcaccgactaaaacattcttgtaagcggatttatccaaaatgtagtcgaagggagtgaaatcgaaatctggaactggtggtgatctcggtggggcatgaacgacgacggtccgatccataaacagtatgccgtattcatgctttgttgctctgactaagtcagttgacttacggaccaagaaagaggtgatcgtcttccactcattttcaacgaatcggtcttcgtaaaacggagcaaggcgacgatcaacggtggcctcaatacggttattctttacatacagaacatgatagtagagagtttaatatataagttaagcgaatgaacgagaaaaacacataatgatttaacggaaataacctcgtaatctgccaggataaggccgagttcaaagacgttgggcgatataaccttcttgaagaccctcacgacaaagacataaattcgccacccagtgatcagaggacacaattctgagactgtatgaaacccctccatctcacggatagcaagaacaagcgattcgaaagactaaaattttttttgtgaatgatataactgccggcacaagaaatgggtttagaatgaggattgtggataaaattaaggaagggaggagacttaaatagaggaaatctggaacggctacagttattaatgcggttacaactacacttgattcaaatttttggtaatagcctggtaaccgtcatatagggtaatcataacgttgatttgacaataaacagcaacagttacgtcctttccattaaataccaacacaaccacaatatacccaaccatgtctccaactccgttcatttaagagggggaataagttagattttcaaaaaacttatttcaaattactcaaaatattgagcaaccacctctgtgtacccttattacatgaactttaacacgtacacagacaaaaacgttcatagttatacgaacgtagagtttaaacgtacgtacacaacgtacatagttacaggtggattatatataaacttacgtacaccgagaaaacacagaagcgtacactatattggccggctcagaaacttgtcaccggaactagattggatttttgcacgtcttcttgttatgacctgcttgtcgacagcgtgagcactgatttggtaaaagtcttttctgtctctttttctgaagtgacaaagacaggaagttacaaatctccgcatggtaatactcaaaatacaagtagatgaatgaacgatgttagtacatacccggtttttacctctagatgggatccttttggacagtggtcttcctggtggccgtctactgtatggaggaatgagtatcaaatccactatatgttgtgggatgacagcatctttcggatccgcgataggtagaattggttcttggaaagaatcagaaaacgtttgaaggccataccaccatccgacacaagacttcggatcaattccatgctcgattgcagctgctagagcgtgttcacatgggattcttaacttggtgtacctaagacacgtacacgtacactggtccaaaacgacatgaaaatgctccccggatttacttgtcacttgatagctccacggtccagacatcttcacagcgtatttacctgacgcaggcaactcttgtagaaatctctcatcaacctcaggtgtcacagaagatttgcacctagcaactttcttcctcctcgatgcgaaccatcgcattaggacatcccgaatgaactcgatcatgtaaacaatcggataagtttttgcttttgttaacacatgattcatggactcagagttgttgctagacatgatattgtagcgttctcctctacagtgagctcttgtccaatgctcaaatcctatgtcctctaggtattttgcgcatttagcactcttttcccttaacagttcaaaatatttctcgaaatccctgaccctataagctttggcagcgctgaaaaataaagcagacacaccaaacttaccataataggtggagaggtttcgctcaaggtgaacagcacatgctccatgatgcgctctcgggtaaacaacacttaggcctttgtatatagatgaatgtctgtccgagacaatcattaaatcgtcactgtctggaacaatctcagctaacttttcaaaaaaccatgcccaagaagcatcggtctcaccatcaacaacaccaaaagctattgggaatatttagaagttcccatcttgggcacatgcaataaggagacatcctttgtaaggtccgactagctgcgttccatctaccacaactaccttcctcatatatatcagacctttgatagaagcgccaagagagacaaagacatacttgaagcgctgcttaccatcatcttctggggtatagtgtaggtgtgttattgtacccggattagctaattggagaagatacagataggtcggcaaaaacctgtaatttgctatctcatccccccgtacattttccactgcaacctcttttgctctccaagcggtagaatatgaaatacgcacattcagatcatttaggagcagctgtggtaagtcgacagctcgcggcccaccctgcgtagaactgtatatgctcctcacaacttctccgaggagcttataattagcatgtttattgtagttcttccgagagtcgatgttacacgtatgtgtcgtagcatacgaagtgattttgaaatttctgaatccttcacgacgcgagcagtcaattgccatggacaagtctcatcaacgcacaccatcttcaatgttttaggacatgacttaggttgcttgaagcaaaagcattgctttatcgcttgaagagacattgtttgttgcaggacttttctattcttaaaaacacttccaacaaacaaagtttcgcctgtggtgctgatttcaacctgtgtctcatcagctcaaaaattgagtaagtcatcgaacacaggagcagcatcgttaccgagattcgccaactcgccaccatgtaacttaggaaattcattatacacttggtaagcctcagctgcggtaactaccccattatcattttgtgtcccagttgaggaagctccaataccttcgatcacttcatccctggtgacttcgtctatacaaataagattggaatccctttgcccttcgcagcgtgtaccgtaacccaatggagagattgtttcttcgccaggtacactaagaccagtgtacgtacacgtttccaagagacgactgaattcccctgtatctccgctaggtacactaacacccgtgtacgtacacgtttccaataaacgactgaatttccctggatgttgagcagtctgttgagtgagactgacgtcttcctcaagatttccttgtacatattcttctactattacatcgttccacttgttgtaatcgtattcttcgccaataccttcactaccgtctgtggtaggatacagggtacttcccccaatagatccatccacaccaagataatcatcacacccatcatcatcttcgttgccctcctccaattcatccgcttctgttgtatcgtcttcaacatcggcttgctcctctgcatcctcattattttcatcaacatttgtagcactatcaaacacacggtcactttcagaaacttcaccatgagacctagagacagtattcccgaacgccttcactgtattattgaaagagacgaacaagttgagagaaagatacccaccacgaaccaaaaaaaacgtctcgagacccatctgactgtcaatgtatacaggagggcgtttagtatctatcagcactgacatttcacccggcatccagtagctaattatgggattgatctcggtggacttcaaactgaaagcctctcggagtgtacggacaaagtccgtgtacgtcatggtttcctgaacgcgtacacaacgaccaaagatgccttcctcaggttcaaatttccattctccttctttgcatttccactcaccgaccatggtaaatacgggaatatccataacccacctgcatcataaattcaggagacacacattaaatgcaactgaaaaatactatacatataaaaaacaaatggaatgtcgatactacacatttataaacctaaataccaattatcatttgactattttaaacaaacaaatatagattttgcaaatattctgataaaaaaatggagttcgaacacaatcaagatcctaatatgacataaaaaaaacttcttaaaagaacttcattacttacacgagcaatgctccaaacttggtacaaaaacaagatcaacacttcttcagcagcaatgtacgttcgcaataattctttgttcctgggttcatcttcttcatctcaacaaatttttttttaattattattaataatttttttaatattatttgatgtaatgatgattttgcattaattgtgacaatagtcacatctaaactttttgggggcattaaatgttgatgtcacttcggaataatctcacttgtaacggaaccgaatcgcgtcaacgtgaacaaaaaatcttcaactgaaccggaacagtgtacgtaactaaacctgctaaactaaaccgtacatttcaacagttgctaagagagaaacgcaagggcagaaacgtcattttgcaggcgaaaagacaaatggtgaaaaccacatttgactttgacaatccatggaaataaaacatggtcaacggatgtggcctgcaatttaccctattttctattcacagtaaaaaatgattataaagttattaaaatctatttaaacaaatatctagttgctctatataaaatatacataattatgtgcgaaaaacaatcaccgcactaagttagttttttttttttctttggcttttaagagaaaaatggaaattctcgtgtttaacaagaattaggagaaacaaaaaggaaattttgtgttgtgccttaaaaaaaaaaggaaactgaagtctgtgttactctacataatctaatctcctctaacaacaatcctaataaccaaacgaaaataaattcaggtggcttctcgcttttctctttcagaaaaacaaacgtttttttctttcgtagtttcgttcgagatgaagcaaattagtagcggtgaagtttggagatggaacaaggaagtagagatgaattcgataagagattgtttgaaacattgtagttccatcgctatcgacacagagtttcccggatgcttaaaggagactccgatggacgcgagtgaggaaattcgttacagagacatgaagttcaatgtggacaacacccatctcatccagttaggtttcacgctattcgacagaagaggattcgctaaaacctgggaaataaacttgtcagatttcgacgaacataagtgcttcaaaaacgataagtccattgcgtttctgaaaagcaatggtctcaatctggacaagatcagagaggaaggtattggaatcgatgaattctttagagacttttctcagattctcacggagaaggacggaaagataacttgggtgaattttcaaggctcttacgacaatgcttatctcgttaaaggcttaacgggagggaaaccgttaccggagactaaggaagagtttcacgagaccgtccagcagcttttgggaaagtttgtttttgacgtaaagaaaatcgctgaatcatgcagcggactaagtagccaattcggactacagagaatagctgatgtgttgcagatgaaacgtgttggaaaagctcatcacgctggctcagacagtgaattgacggctcgtgtcttcactaagttgactttcgatttgcttaatagtagaaagcagagtgtaagacgagttgatcatcagcaatttcaactagagcagcaacagcatcagcagtttatgatgactagatgttacatcccgataccgatgccgataccgagaccgagaccggtgatgtttgctgctcatcaccagaacccgtattttggtggtggttactttaggatgccggtccaaggaatgaactatgttttgtgatccctgaatgtttgtttaacatgacttgctctgctattatgtataatttctagttttatcagatgtttctttaaatactaaagattaactttcatcttttcttgtcgatcaaaacaattctcttaactctcatatgacacaatttctctttactggatacttttaatgaatctaaaaagttagaatacagtacaaataaatttaaatatcttagaatctactcaaagcctctaatcttatgttatgtagctaaagctgcgttcctgtcaacaaaattgaacaactctgtttgtgccgcttccattttcacacggaagtctacgcacatgagctataaaccacgcggtatttattaagttgccaacttggtcatttacaaaaagtcgaataggctgcaactacattctgcaaattttgtaaagggtgaaactacccagtaaaagaactgtgttcaaatagatttttattattttacttttacactttgacgtagttatctttagttacaaatttatggtcttcgccgaataaagagattcgttttggtcttacagtcgatcgttgtttattcggttcgcattgactcggaacgagtttaatcttcattttagtagtatgaactaaattctaattaactgacaaatatttcagttttactttataaacaatcaaaacccgactatagtaatacgagtttgtgaaaactatactcagaacaacgcacatggaaattcacagattgggaaagaagactgcccgaaacttgttttctcagtcgctccaattgtctttatcttcggctacttcatcttgcacctgcaaatagtcaaattttgatcaaaatgacataaacaagaagactcgtgtaacaattgatgtatgagaatttgaagtagtaatagaatatggttctgagttctgaccatttcatcttccactgttccgcctggtgaccacacaagtatttgtctatctgagccacttgtgtatagttcctatgagcaagtatgacaagtaactcggatttagaggtgtgttcaagcaaactttgcagacctacaaagtccaatgactcgtggaaaggttataaggattaagtcatacctgatcattggaattaaagcagcaagtgttcacgctttcgtagtgtccacgaagcatcagtgttgttctacccgaccacatgccaaaagccttatatacagttgcagcacaattcattaaataatccaggtaatggaatgagaagatatgctgatacaatagtaagttggtgactaccttcacagtcttcatgcatggaacaaataccagagctggatcatcgcttgtatctaattggattcctttgttagtctggatgcgtccagtttcaaagttcaccagggtgttgcgtccagattcaatatcccacaatcttattcttgaatccgaccctgaaacataatatgcaaatataatagtaattagactcttaactgctgtatggccacagatgtttaaggtagttatcatttattgcaatcacaaattaatatagttcacttgatgctagaacccctaagacatcacttccacttcgtagtgggtcattaccagccgaagatcatactcttgttatgaagttacagccctattaccctaacagtcagtgcctcatatgccacattaaaaacccaagtgtagtacacaagcaagctataatcaatgaacttcaaattcaggcataaaacatttgccgcaatccacacttgcaggttcattcaaaaagttgttcagacagaggaaaacataccaactaataaataggctgatgggagaaaaaaaattccaagcaaacacttagcacttagtaacttccaaaactcatgtacatgtggctcctgatctcataagttgaaaatactacttcgagggtcccaagggcatctactttgtatgctaatcatgataatgtcactagagaggtatgtaatataacatttaaccagcagatgctgcctataacagtttgtgacaaagttcaaataataacctaaagaacaaagaaattagccatgacaatatgaacttaccagcactaagaagatacatcccatcgttagttgcctttaagccagtaacagcaccataatgagccgtagcacgatctagagtagataacattccagggtgaattctcttctgtcgagacttttccactgaagctt

SEQ ID NO: 16 - DNA, 104163 bp, Arabidopsis thaliana
gaattctttgatgaacaactgatgtatgttggtcaaaaatttgagacaagaatactgataatatcatgtatgttcctcagtcctgaacatttggtcatttggatcatgtgttgtgtgttactgtgtttgacaatctgtattgttgttatggtaaataacggttgtgttgtatcacacactataacaggtttacgtttacctaaacatattaagttataattaatgggccacaggcccatattatataatgtagttgggttttgttgacttgaacggctccagtaaattaccggtctgatgattgattgacgaataaagcgaataaaccatcggttatacaatttaaccgggtttatgacaacttcagagaccttatatcagatttcaaatcttcttcttcttctccgcgacgacgacgagcttcttcgattgatgactgtaataatctttcaagtttaattgcatcgcataaagataaagcccaatcctttattcttctaaaaccctaatttagcgtttcgagaagccgcaaaattgagttttgttatttcaaaaaatcgaaacctaaaacctcaattctctgggaatttcaaattctcttttcagtgtaatcgtcgtctcttctcaattcgacctaccgagtaagtttatcttcttccatttaagttaaattttgactctttccagcatccatggtctcactgtgcttctctttccttcacctcttcattgggagctttgaatagcgttttaatctatgtttaatatagtaatgtcattgacactgtgaatgatgctgatggttgttcttgtatgtgcacatgaattgtatttctgcgtatcacttgcattactgacgttaatctagtttatcaatcaaattctaattcagtgattttattgacttgcaattctttgccaatgtattgttgaccattttctttcttgatccattcatgtgcacgtttaagaacatccttgtaaggtcatgctttgtgatttacctttcttctgttatgccttgtaagtaagtatagttttttttggtacttttgttcacaggctgtagtacgtttgctgctatcagaaagagataatcaagaagcagaaataaaatggagagtgatagtgagaacagcgagggagagagcagggaacataagaccactacttcagtggtaccaagaggtggccccatttatctgccaaacatggttggaaatatttctaccacccctgaattcaagtcttcatttctcaatgtactacaggatttggaaactcatttatctctggactctacttcttcttcttctcagcagtttgatgtctcgtatgtattcttgcatcaattggctctctttttcatcagttaaaatctggttttttcaatacattaagttatttaattgggatgatttttgtttgatgcagaattgattctctcaagatttatacggatgaggaactcacagagatggctatgaaggaagcctttccggtacgttgcctaatcgtttgttgatttacttctcttcttctgctgtctttcaagtgtgagaacttgtgtcttgatgagtttggtttcttatttcattacaggaagattacctttcccaagaggagctcgaaccatctttaaacgtttctcatcagtaagtatcattaccagcctttcgttatttcttgatataatgtttccccttgtgtgaatccttagtaaaaacgaattggcatgtagcttctttctattagtgtgcttcgatggttgttaagttttttgtttacagtctcaattggttctggttcagccgtgcagccgtgctagctcccaatatatttcgaaagtcttgtagacaatatatatgttaatagcttagtcatgattagaaatcttccagagacaaagtatggttgacgtagacaattgtagaacgataacaaacagttaccttctcggtatgctgcagtgaaaatccattagctgggagggcaaaaaggaagaggacagtaaagaataccgaggtaaagaagaggacactaaagaatactgaggtaatgaagatgacagaaaagaagactgaggtgagtttatgtaacatggtcttggcatggctgggaattactatcttttcttttccagaggctatttgtgtttaggatctcttgataccaaatttacatggtcttgccatgatggctttattgcattttgttatgattgatatggtcatttttttgtttttaggaagcttatcttgtgaaagtcgagcagcttgctaaactcaaacaaaagcaggaggaggataaagcagctgtgacactgcactgcttcaggtctgtaattactattgcatagtctggtttgctgtgtaccttgtctgttttatgctgatgtttcttcgatttgaacttgttttcagcaagaccagtgagactggtaaagatgtagttgcacctccagaaggttttgagcagatgcaatctcttaggttcatagataataattacacggcaagtgatttccccttgcaatgtctttttagtgttgattatgctagtccaagttctaaagtgctcatgcatcctgctaagtattatcttcttcctatttaaacagaagttgaagccatctgacatccagggacaagtggatccgctatttcctgaagtcattttgtgtgttgagatttataacagtcgcaaggttaaggtactgtattgttctgtaaatctttgatgcgggatatagaatattgactgaattctcgtacatactaacaatacttgtgtaaatttttgttcagacccaagaatttttggttctaggacgtcaaatgttgactgagttgaaggacaatattcactgtgctacagaccaggtgatgcaaaaggctggaaagtatgatccctctggatacttcctcatagaagtaagaattcatctcgtttctgtatcttttgatgtttaagtaagtttaacttctgcgtcgctggtttaatcagatgctttttgctcgtctaggatgtctttcacaatgatttaaggaatccctcggctaaagattacagctatcctattttagattggctttggaactcgaaagatgaagctcttaaaaaatgggaatgtgttttaaccggcgaattacagaaaaagcagaaactggttctaggtgaagcgaaatctgtggatttacctcgttacagaactgcagacatgcagagtacacacttctgtgatataagattcagagtcggagctagttatgtctattgtcatcaggtaaaatcttctctctttctcttttggttctttaatttctcatcttgtgaaaacatttggcacagactcgagatattcactgattaaaaaccgtggaacagggagattgcaagcacacgattgtgattcgagacatgaggatgagtcatccagaggacgttcagaacagagcagcttacccgatcatgttctggccgaaacgtaggattcagaaatgcggtgtttgtaagataaagagagcttcaaaggttgcagtggatgacaagtgggcaagcgagaacagtagctatttctgtgatgtttgttttgagcttctacactcagaggaaggcccacttaactgtgacttcccagtgtttgattatgtgcatgagtaaagatgatcttctttgttgcataatatatagataggaagaatacgaagaaatagttggcattgcaagaagaagacatgatgagtcttgtcttggtaaatttgttgcataattggatatatataaaagattttcttgaaatgatgacatgacaactatttctgaatttagccattgtcaaaagctctcttcgttttgaagcggtagaaaattagaaatgtttatgtttagccaaattcaaaagtagaggagattccttgaatttctgttttctctcgctgtcttctcaatattcaaaactcaaattggtgtcttctccaatttagaaaacgttaaaaacaagagaaaataaaactaaactttttagaaccaaaaaaaataaaaataaaacgcatttgggatttctcattgtcatcccaagttcttggaacagccaaatactttttcattattagtttataatcgtctcataaaggcaaaaaggtttatttcggaaataagatgggagcatatagagcagaagacgattatgattacctcttcaaggtggtcttaaccggagattccggcgtcgggaaatctaatttgttatctcgtttcaccagaaatgatttcagccacgactcacgtgcaaccatcggtgtcgaattcgccacacgaagcatccaatgcgatgataagatcgtcaaggctcaaatatgggataccgccggccaagaaaggtacttacactctaaaattactctcaaaagttatttaacgtttgcatgatgaccaaataaaattttaaaaaattaggtaccgagccatcacgagcgcttattaccgaggagctgttggtgcattgcttgtttatgacgtgacgcgccacgtgacattcgagaatgttgagagatggctaaaggagcttagggaccacacggacgcaaacattgtgatcatgctcgttggcaacaaagctgatcttcgtcaccttcgagccatctcaaccgaagaagctaaagcttttgcagagagggagaatacctttttcatggagacttctgcacttgaagctgtgaatgttgataatgctttcactgaagttctcactcagatttacagagttgttagcaagaaggctcttgaagctggagatgatccaaccactgctttgcctaaaggacagatgattaatgttggaggccgagatgatatctcagccgttaaaaaacctggttgctgctctgcatagacacacttctcacttttttcttgtacttttattactaaacactaacatttttcaatattttcctgcaaatttgtatacattcttggaattatcagacaaacaaagttcacactcaaaagtttttttagtttcggttccactctttacaatcgcttgcttcgtgctctctctgcttctaccgatcgatgtacttctgaatgttcatgaagatgttccattgttgacgcgctcctttttccccatctgcaaatagaggttaaaacagcctaatcagtttatatcatatgagcgtgaaatcttaaaaattgtacttcaaaatgtttctttcaactgtgagttttgtctagtaatgaaaaagctaaagccaacatggaagcagaagaagaagaattgcagattttgagtgcaacacaaacttaggaattatccaaacatacttggtacttgagaaatggaccttccatattctgatatttcatgctaatgtactgaaaccaattgcgaaaacagaggactatggaactcatttataatatcactttgtatggattctatatatgtgagtagcaaaatgaacctaaccatgaaccgtcttcgcttttttttctgcataaagttggataatattcagctcaaagaaaactagattctgatcttaatcatctataagtaaacaaaacagagtccatacagatttcgatatcttaggatcaagcaaagagtagttcaataagaaccaaggatctacataaagttataacaatcctaaaatgtcaatggcatactagagcaaattcaacaattttcttaatatcagttacactagaacaaagacgaacttcgttccaattccctaatcctaaactctcataatcaagaacaaatatcaaaccataacaattgagttactcagtttgaaaaaaacgaatctcaccagagaaaaaacgcagatacggaatcatttttcttcatcgcgaggcttagaactcgattgaagagaaggaagaggattagagcccttgatgatccaaccgagtccgaagaaaaaacctccagctagaatcgcagttccccaagcgtgtgagtaccatttactgtattgccgaatcgcgaatttccattgctcccttaacgtcgcctgatccggattcaccgactcaggcgggttataataccttttacccgaacccgatccgatctccggcgtcggttttttcgccgacgaagaagtattgttgttgttatcagggatttggctcttctccgccattgtcgtcgtctagattcttttcttcagatgttgaaaatcattttcagaaaatgtgtatttaactctaaagccactgacacgtgcaagataatgccacgtggcagtttctcgtactaaaacgattccgtttcattgtttcgtctacctctaaccccaccttagggttttagtactctctgtgatttttatctgttcgtcaatggcttccatttctactgcttcttcttcttcttcacttctcttcccttctcgaaatttcaaatcgattccattacttccacaacagagaagctctgtgtctttcgttcgctgtttttctaagaattcttcaacagaggaggacattctccgtttcgtggccgaatctgatgggaaggcacttccatgtgtgcggacgtacgagaataattcagctcggctcagtctcgttggtactgttgcttttgatcaggctttaaccgctgctgctgctgacggtggtgaagccgccgatgaccatcttcgtgagaatgttcctgttatggtggtcgagactgttttccccggaggatctgatcctaaggctactgtgtcaaccagattggtcagtttatgtaatccgtgttctaattttgattctacatttcagcaattgagttttgacatttgaaggtaacatttttttgaacagttcttgcctactaagaaagttaaagagcgagctaaaagattgcggcggtctctctctgaggatctttctagtggagacttgtcaaagaacatacttgcgatgacttttaggcaagttgttttgcggcagctgtggaacttccagctagtgttatttgcacctggagctgaaagagaaatgggagatttcgaaaaccctcgagaggttaacttcgctttgatgtgaatgtttctagtgatactggccttgcaagtgggaattgatactgataggttcagttttcttattcatttggtatcagcaggtttctacatccttcactcttagctcatcagatgaacgggttatatctgttattgcagaagttatatgcatctccgctcttcaaagcaccgagaagcatttcctcgatgattatctgggaaaagctaagtttccgtttatgaagtggttatctaaacgcaggaggattgcttcaagagactgctcggttgtcctgcataagttatttgatgatgagcagaataccaaacttttgcttgagtattaccagtcaaggaaggaaaatttcaaacttgcagacacaaagcaaagaagccggtggtgggacttatctgccaattccaagttggaaaaaattggtggccctggatttagtagttgggcaagtgaatatttacccgcatatcgactggaaatggatagtacaatacttgcagacttaaagcttgagggctggagaaagtccagtgagaataagtgggaagttcttctaactcactcccaaatggtatgacgttttctctttatttatgtaacctacccgtctatgcttttgctgtgtgtaagactagaaattgcaatgttgctctcgctctatatatttgtctggctagcagtctaggttgttgctgctatatgataacatggagctatgttatattgttctgtttagtatagataaagacgtcgaatgttgttcaaagtttatggatagaccgtctttagacaatgttgaatccgtcataagagttgtcattcccatttacctatacacttaacgagatgctgatatgttgtgtgggaatgaacctagcaagatgaaagaatattatcaatcatgggaataaaatttcctgtactgctgcattttgtgtgctctgtggtgactaaggtgtctgtttttgtgcatgttatttcttgaggcctctacattcctgagacttgtataaaactcttaggttggattagctgaagcattggatatttactttgaagacacatattcacttcccaggaaacagctaccatgtgatgttcctggaaattatgcaaacttacccaatgaaaaggtaatgactactggactgctaaaatttagccaatctttctgatattatactttggtgtctgttattgtgtatgtaatcagaaccaattgccagtccttgctatattactgtctgtatataatccgtattctccatgataatcacttgctctgtctaattgtgtgcttcattacagctgcctgatgaaatatgttaaatatatttgtagtctgcagaatatattaatgtttactattagagtttttaccattattttggagacatgttatgagttaataagattggcttctttggtagctttttacctgtcaaacttatgttcacttctttggtttgctcattctctattgacagaaaggattgtctttgttgaaattcatatctgtcaccatggccagtggaatttttcttcttgctgtgagtgctgcagcccaattctgtcttcctcagaaaagcgagaggaagtatcccggaaaacgccaagagattttatggtcagagagtgaattgttatctcatcaatcttcagattcctctgaggtatggattaccaaaacacgttgtattcatatagatgtgtacgacaacaattgcacgtagacattaatagcttttcaggacagctctagttcatttgatgatcacataagattaagtactggtgcagcctttttttgtaaatcccttgccatgaataagttaacccatccaaaaagtaaagacaatccaagacctatatatatttcatgtctaatgttatttggttaataatttttgcatgagtatggactctctatactgagaatgagagaatgagatcaaccttttattattttttgtggtgctttttcctgtttttctcggaaactaaattctgaaacctcaaatgagcagttggattcattctgcggattactcgtcaacaagctcaaggatgcctacagctgggtaggggagatcacactagaaagcagcataggtgcctggataggggaagtacctgactacttgaaagaaaccagcagagctaagtctgttgaagatcacattgttacaagctcgtctcttctggaaatactcaatgaagacgcaaaggcatctgcgcaagatatcgctacttaccaggtaattccagtgaattatgatgaattgaattcttttaagtggactactacttcatcttcgtctggttctttaatggaagcaggtagttttatcatccgaaggtaaaatcatagggttccaaccgacaagccgggtggctgtgaatcactgggctgctaatcctttagctagagaactttatggaggaaaaaaactcaagcctggtaacacaccatggttcttctttcaattccttaaattcaatgctattcgtatccttttaagtttatctgattatgtgttgtgtcattctttgctttgcagggctgattgagcctggtcttaagagtcaccctcccaaaaaagtagttgtgttggaattattaatgtctgtgaattcagatcgtccttttgcattggtcagaccattattgccacaataagcatagcgaagttcctgtctctctttagatgaattttagtacaatatatgtagaatatgatttgattgattgcttgtaacacttggcgtctatgatatgcaaatatcttaagaagagtgagaacgtgattacatgattcttgaaacgatgcttaagattttgaagctctgcagagaatttttattaacaaaaccccaaatctgaaacatagactaagtaagagcaatgatctcattgaacaaggtcctgattctataagaacaacactgatactcaaaaccgtatttccccatcggttacataatttgtcatctgcattatatcgcagaagagagtcgaaaatgcatcaaaatatataaaccggaatgtcagtaaatatgtcttcacctccatagactgaatcttaaaaagcagtctccttcgtcacatttactattcctaactccaggacagtcttcagcatccacttcttgttatatatacataatctccatagatagacagagaactattatataagagaaaaaaaagatacgagtcatgaaaatccattactttgccctacgatatgtagaagcttcttctgctgctgcctaattaaatggtaagcaaacagctttttaaacctgagtttttccacattcgtctcaggggatataatagtcgcttagatttccgaccagatagttaaactcttcacctactccatagtcatttgcctgctctactgtgttctgaacattcccggtggcgacttttgtgctcacttttggtcttcctttgatgcagcgtttgttgttgttggtggtgttagtggtattgttttctggagggaactcagctgtgagtcttcccatctgcttctgcagatcagccactgagtcgtttgagactttgccttttgaagtcttcttcccgtcaacaagcttgagctcgagcctgtacaaggcacaagcatcacacttgttgatctcatattcgtaaagatgccattcgaaatggtgcagaggctgtggatccatgtagtaagatctcttcagccctccaaactcgaccatgatctgtttacgtgactcgtgccaaccacgaccattgtagtctggtaaagatctttgctttctgttcccgctctcaaaggccctccttggcttgtcaaagaatagccactcccttagtgtctcactctccagaaccgtgagatcaaagagctctacagtcatcaagatttgagtatgatcagctcaagaatggtgatcaattaacatacttgtgaatgaattccaagagagtaaagcctacctggagcattccatggagatttagcagttgcagctccttcacattcgggaataccaacatctttccctccagcctttgcactaagagcagcaaaaagcagaccgtcttttaggccgatacctccaggacgcaccaccggattcatacctggtggcccttcattgaaagccagtgcagcgtggaagctgctgcagtaatcctggaaccaatcaaatccctgagctggcctagggcaatcccaaagagcacattttggacccaagaatgcagagggtggaggacaaatagtcgggataaaattagagatatgtataggaccctctactacaccataactgggacaattgttgaaaccaccattgaagtttggttcaaactcttgttgcagatcatactgctgatgatactccaaaggagccgttccatcgaaattgttaccagctgctaaggacaaatctttgcaattatcaaccaatggtaatccatgttctgacttcccctgaaccaaattgtatccctgaaaactttcaccacgatctcagtatttaaacaaaataatggactccaaacacaactaaagcaccattaaaaactggttctaaagagcaactcaccctttggaagacagcagctttgccagcttcgagattctgatcagcaggctcgggcttgggggcagctaatttgctggtagcatcatcttcctcatcacagagctgcagcagccgacaaatatctgatgagaaagaccccagagtaccaccctgcttaagcaaaacaaaatgacacagctaacaatgactgaaacaacaaagaaaactaaatcacccatgcaagtcagaagaaacaacaagattgcaaatttgaaacaaacgaaagcatacttgttgcaaggatgaagctggagaaggctcattgagctcagatttccactcacgaagcatctgattcacttgctcctcaagaagagtaacatcagtaggcctactctctttcctcgcaaactgaagatccaaaagcatgccttgcaaatcatcaacacggttcttagccttatccttgaagagcttgtgagaagcagatctgcaattagtctttgatcgcttccccgtcataagaaatctcacctccccaccacaaaaacacaagattctctgtacaaaaccaaaaacacattcaaaatacacacttcacatcagttctgctcctataacaaacatgatcactcatgaatcattggtacatgcttagattacataaacaaaaccaaaacatttacagtaaatcaaaacccaaaatcgatgaagcaacaaaagccctagatgatctcgaacgaagtagctaaacgaagattaaaaggatcataagttttagggatcgtcatttttttacctaattgtcgaactaaacaagcagcaaaaaacaggttacgaacacgaaattgaatcatgcacagagttaaaaagaacaacagatcgaagtaacaagaacaaatcgattctgaagcaaaaagcgacgcgagattttggagtttgaaggaacccagaaaatcaaacttacactgtagctgcagcaaaagcagcaaataacaaaggcaaagagaaaaatctccggaaaataaaaagaagagtaatgaagaaatggagagagtaaaaattatgaataaataaaaagagagagattatgaagaaaaaaaaacacaaaggaaataaagaaacgttgctggattctcttcttctcttcaccctccacttttctttttccttttttatgagctaaattcaatgtactaatttatgagaaaatataaaaatttaaaaattatcaaattgtggggaaatgtttaaggaatttaatgattattttggaaaaaaatgccatttggactgtttattatggattcttttctttttattgttcattttttctctttatagcatttatttatattaagaaatattaaatgagcatttaaaatttactatttgttgtgtaaataatcttttttttttgttttgttttctaaactaaccagagttcaattatgttttttttttttttttgttgcacatatgctttagaaaattaggcattttcttcaatgctattggctccatacactacttgctccttatttgaggaaatttaaatactatttgagttagaaatttaagtttttctttagactatgtaatacattagggaagtcgccaagaatttttccaaaatcagagtttgggtcacacgatttgtaagatataatataaccatgcgaatatgcgatgatagaattcaagataggctaaagctaagcaaattttatacatacgagaaaattaaaacaaataccaaacaaaaaagtgtaaaaaaaggctttgaaattaaaactaccatccattttagggatggaacatttgcaaatattagaaaatgttaagactaatgtagtaacgctaaaatttgtgacattgtatgatcatcgggtttagtccaagttaatgtgtatggaggggagtggtttgcaactttgcgtagctgtacttgtagtcgtaggaaaaaaaaactaaaaaacgattcatgataacatttctttcgagaatgtatattttgttgataaattgacatagactttatgatagcatcgtagtagaaccacgttaaagattttgattcaacggctaattagtgctcaagtctacgactacatgtaacgtaatttgataataaaaaaggaatattggaaatgtaacgtattatattttcaagataagtcaattagattgataaccgtaattttggttgcgcttgacaattggtcatttcttaaaataatttggacccatttgttttcttatatcctttcaatgagttttaacaatgagattgtttgtacctaatgtaaatttgcattacttttggaggaaaaaacaaacaagcataacaaaggaatcttgggtaaagaatttggacaagtgtcgtgaatactaagttattattattttcttttaagatacaagaaggtgtaaaagaaggagatattggcaaggaaggaatataacttagcttttctccactatgttttccatattcctatcttgtgatgctcatcaattttcatcataccatctactttcaatttcttcaatggtcatattctatcgttctttatctattattgcttattattctcatttcaaatacataatgttcgtcgtatgaactctaaaaaaatattcaaattcaacttttaactaggttataagaaataatatctccactaattttaaacaaccaattcttgactgagtacgattatatattaatcacagttaaacagccaattattgacaatattttctttgagtatgcaccttacatcttatatatccctggttggaatatagatcggtccaccactacactttatctttgatccggaccaaattagtgacagtggagaagtttttttccttctttttcttttctttaaggtctccaaggtgaattcaatgtcaccataatagatttctatatcatatgtgacaaaacatccaactcaaattcaaaataagctagggataagagtggctcaactagatgatgcttaacgtcgagcccatactttaatggtagaagaaagcatgtatcccatgttggaaaaaacgaacaaaatgatgtttatcaaattgttacactctcgaggttaaattatctacgaaaattgtatgcttcgaagaacatcaccataacgatttaaccgtctggtaaattcgaaaatttgtcccgaataaatatacttaactacttattactaatgtgtgtaaattttttattcttaaatctctcaaatgggataaatttagactatgatcattccatgattttagatcaatataatttattgttgtgcattggtgtaaatttagaattccaaaactattttatttagattttgttttaactataacgtctggtaaatgtatcacttttttaatattaaatagtaagataaaatcatttaactctttgtatgatttaaattcgagttattataaacgaagtgtactaagctaattcataaattactttagctgaaggagttagcccattttgattaccacaatctcctaagattatatcacacaacataaacttctactagctcatcataagtagcatgcgtttttataaatcgatgtgttgtctttttcctttttgatcgtcgttatgagaaaacatgatatgcttttatggaatttctaagcatttgcccaaatgattgttccccctataatatattccctttctctacctccaacagctattctcacttttttctttactaacttttttctctcattctagtattcagactcttggtggaataaacctaacgacatacccataggttcctttcgtctccaatttaaaatgaaatcgttttgtgataaagacattattcttttgtaagagttgatcgccttttaccacaaaaccaaactagttgtcgctatagttttgaccttattagatcatggataaatatgatgtacattttgtaatctggagaaagaagtaatttggtacatctcaatgtctctttcataatgaattcgtcattatccaacattacctaaaatcgagccattggtctcaaaagaccaaatctaagcaacaaatgttgaaaagacaaaacctcaacatcaaaactttttttatttgtcacctaatttgataatttaaaagcagattgtttttgatgatggatggtacatgtatatagaggagagaatcagaaactcctcaactcttgtgaaaaagaatcattaccgtattgttaactttggtttgaatcttctagattgaataagatgatgatgatgatgattcaactggatttgtctggtttcccactagcggtagtaccaggctgtggttttaactggaaaataccgctcagtcctcgtgccttagcaagttgttcaagctcctctagcttgctcttgagatctgccacttgcttttctagttcttcatcttttattctcaactcctgtaaaaccatgagattcacaaatctcaacctaatcaataatcaaacctcaacatgatatttctgagtagtctatctcgttagaacaagcacacaagtttgctcggttcttaactaatgaaatgctttcttatttagttgttactgcagatttcaagttaatgtgagcatacattgaatatgttgataattgttttccatctatggcgcaagaagtaaccatatttataaagctcctttaaataagacggatatctcacgacttcaaggaatgagaaccaattctacaggctgcaacttttaggaagtcttgagttgggaatctgaaaacactaccaccatttccttaaaaccatttatctaagcgagtttatattaagttcttcctgagcatgatatctgctaatttcatgaatttatatgcaacccactctctattaactaacagtgtcagtatgtaacaatgctaaatcctgaacagcacatgggagtctacacttaatgaggcaacaaattatcttccaagagtattctgtgtacctctagttcttgcttacgtgcttcctcttttcttgcttctgaccgcgaacttctctgcacctcaaaaacaacaacagctccaccgacctgcacatataatctattagttctacagaacaatttagaattgtatacaagaatgacactcagaccagctattttttttaatttatctgactttgacaccatgcaagatatccactaaattgatatgggaaatacggaagaaactagaaatcttaatttattagcataggttgtgctatcagacaaacaagagcaagaaataatcaatcatatggtacatttcccttaaattttagtattttgtatacaaaaactcaacagttatatctccaatcctaggtctaactcatatgagcttagtattttactccaaagcctagtattttggatagtaactcaacaaaatacaccaacaaatagctgaaacaacactagagtctgattggatagcatcagaagctatgattgagtagaaccaaatcattccatgaaaagagctgtttagttttctttctctgcatgttttgcttctcctaaacatcttaaacaggtctttctcaaggccacattaatccatttatcaccaattggtgagaatgcaactaaccattgataagctagaacgagtaaatgaaggtagttccaaattcatctaaaacaatagaattcactgcctaaagaatgttgagtaaagagtgttaccccaaagagaaagatctctccaatgaggtcaacagcagcttgaacagccttttcctcatctaagggacgaatctctacatcagtggcatgaccatatatccttctttgcatttgcgtagtgattcgatgattcctctggtcacataaatccaacaacacatcaaatttcaagatcacaaaactagcaaaaatctcaactattaacctaaccacgcctttttctgtaacaaaacctatattccggaagttccaaaaactcagcagaatcgaaaacgcaagacatattataggcgcaacgaatctcaaaagcgagtttagaatcagagaggatcccaatttacctgagcgaagttgatgatagattgacgaaacttgggatgaaccttagcttggtgcttgagctgactagccaatggtttacttatggttttgacggcgagtgtgcccagtttcatcaacggcaacaccattattcttccaaaaaacttagaagaatctcacttgaatcggactgcgagggatatggagctaaattaggtgagaacagaaacctccattgggaatttgggatcaatcgaggtttatcgaatttttcgtggatccgattggtgaagaggaagaagaaagagagaagttgagtcgttttgtttgggtcgtctttttacaactttattttatttgtggaatagacccctctattttgtttgttcttctttgtcaagttcaatttctttaatctaatttaaaagacccaattttggcggtttctgtgcatatgtgataataatgttctttttgtaagtatttttcttagatatatagaatagattattacatgtaacaaacaaagagcaacaaatattatgagtttaatcaaaaagaaatggaacaagtgaaagagagagcaaaaggatacgagaaaaagataacacctaaacaaaagtcaaagtgaccgagagcatcgagcaccattgaaaatgaagaaacatcccaacaaactagcattgcacaatttgaaaaaaaaagttttatccgccactatgcacttggtatctaccctcctagtgatttagaagagcttcaaaaatgtgcagaaactaagaacatgcatcactgttatggattaacgatcgaaaaggctttactccataccaaaacatatggaattcccagagaattggttagggtgtttgattgcagagatcacaagtctggatgcgctgaggatcctttcatgaagaaaagaattctaaaacatgtccgaagaatcaacacaatagaaaaagttttgcaagagttacatctgatagaagccgacatacttcattactaatgaatgggtgaacaaggaaaatttatttactataatctcgccgaatcacggattcctaaccctattttcgtaggatatcactctgtagtcatagtgagtcttgacataattgatgatgaacttataacaaatgcttatttatatataagatttaaataaagggaccttctagattaatttagcgtgcttctcgaagttttggtacatccacaagcaaatgaacacatttctcgttatgtattcatattgttgaatattttcttccaatcttgtgaaatgagattaagtgaatcagacttattgggggttttatgcatggtgcattgatgtcttaaaaacaacaacaaataagatatatattttcaaaaaatgtacaaaaaaaacaagaatcaagaatttctaattaaaattgatttgagtaaacttttacttctaagaaattcacaaatgagagcaagatttggaggcgcatacgttgacgacaaaaaagacttagcaagaaactatgacaacaaattagggaatatgatatttttgatcttcgatatatacatgaataattagaagaaaaaaatatctgcgaaatagtagataaaaaggttgaccaaattttctgtataatttatttatttttaaaaaacaatttggttgaatagattgaatgagttttctaacttgttcatgttaaatgacaaaaaaaaaaaaaaaaaaagatgaatgatcatttccactctttcaacttcttattttgagacaaccatttgtactccaatgctagaatttattttgacaagttatgttgaactactttttctagtaatttttcaaattaaagttcatttgaatgagaaatgaatgtccaaagttgatttgtttgaaaaaacatacattgaacacatggaaaaaagtctcatattgaaaacatggagaaatgtttgtgtctaggctcaaagacttgagaccaaaatgttgtaaagaaagaaagcatatccatactcaactaggttaggttctgatttgagtttgagtaatgggctggatgcttaatggagtagtttatctttttagctcgtatttgttttgaaacttttaattgatttagtcaaagcaacaaacaaatatccagtgccggctctagggggtgccagaggagctaaagcacagagtcatcaattttattccaattttacttaagattttaggtccaaaaatctatatatacatttttgcagccactttgtgaaataaatcctagagttgagatttatttacagcggctgccattgacatttaataattgtttttgataattagaaagaaaatattctaattaaatatttgacatttaacaatctttccaaaatctctctaccttaactacactattaattactaaaataaaatttctaaaatatttaatatcatttaattactacaaaattatcatttttgatattttttctgcatgattataatcatcaaaccgtatagatatttgatagcatttaattactacaaaattacaaaatatttagacaataatttataaacatatcataaataagatcaacattaataaaataaatgagtcttttttagaggacgggttggcgagacgggtttggcaggacgttacttaataaaaattgtaaactatacaataaaaacattttataaatagatacaatttacaaacttttatatatattaatttaaaaaataaattgtttccgcggtataccgcgggttaaaatctagtctctgtaattaaaaacagtattaactaaagccaatttttataaatcagcacaaggtcttcaaaaagtttgagccggctctgatcttttcggtaatgaccattaatataacacttaattcacgtctccatgaatgctcattttagtgtagatatgttttgcttttgcaaataaaaggttgatgagagagtttgttcctacacacacaatttcattcattcacatacaaaacaaaataaatccattcatgtctctttttttattgcatcaaacagtcacactaaagaattaaagaaagatcttcccacctccgctcaaaccgtcaattgtttatcaactaattcaattgattgttgtaccttactttttggattttatgcaactattcaattctactgcatagtagaaatcatcatggaacgcagatgatatgagcaaacataattagcaagtcaatttaatatattattcttaatgaaaaaatcatttgtcccctcataatgaaatgaaagaattaaaatcgtaccaaatattcaatatgacctatttctttccatgtaaattcatctcaaaatagttgtttactaaatggctttggagaaaataaattaataaatgaactaatcatactaggatctagcaacaagtttataatgtatcaccgatttgacgaactttatgctgttcaaattaacttcactttgtgagtcaaaactcaaaaggttgaaagagtttttatgagtttatcttgttttgagatcacacatgcacagttcaaaattagatgtgggattggatatgagaagaaaaaacagacaaccttatgtaaatattccttttgtattctaacacaaacatgataatgtaagacattaaactcccatctataagatcccgcggctctgttcttgatgtttctgatctctactgatattttactattgttaattcctctaacaaattcgcctaaacagttcaaatagcacaagatagcttaagcttattatctgatcaacatcttcaaatggatcttgtcattacgctgacacagacatggctaaacacctagcataagcgagatcgtttttgagaactctcgactttttcttcactctggcgagtcttagaacgctgctcggtatctttaccactccaaaacttaccaaggagagtcaagtatcctgaatcatcgatgactcttctaatgatagctttgcgttcaacatgctcaccaatctcaacaagacgtggggacttgggcaagcccgtaaaagttatatagacatgtgcccttctggcattgagtctcttatccaggggcttctcattttcttcctcagtttcaatcaccactttcagaatctgaacctgaggcagaccagtctgcgctacctgcaccaacagcagttttggtgttaatagttattaccaaaagtcatggtatgtcattatgcaaaagaaaaaagacaaaaaataaacttacaccaaacattcctctatcagttgctaaaatcaaaagttccaaataaagagaaatccaatcagtggcttgccactctgatttctctagctgcaaaagcaagaaaaacttatcactacttaaatgatgacgagcaaaacaaaacggatgatgtgtcttagtaataataatcttacctcgtaaaatcggtttctatcatgacgcaaagcatcatctgagggccaatcaggcaatggaccttggaagacaccatctgacactgcgctacaacaaaagtgaggtacgaagggctccttggtggtctccgccgctatgaaacattattaatcagcaagtgagatttgattttatactcttgacttgtattaatataaaaatgaacaatgcagcacaagtcaccttcattttgatcttttttaagcctagcaatagcgactgtcaaatccaaagtgtcatattttcgttcatcaactcgaacctgaaaggttttctgcaaaggaatagctcctggctcgtttgcaagcaaagtaatgtagtacgaagacgtaaggttcattgtcttgttgaatttctgtagggcatcgagctcgaaacttgtcccctaacagatgaaaagagaaaattaattggatgtggtacaggacatgtttatgaagcaccaagagagagagagagagagagagagagagagagagagagagagagagagagagagagagagagagagagagagagagaggagactatatatatagttttaaaatataattacctgcaaaatattgaaacgatgaagccccaacaaagcatatcgcttgaccaagagagggtcaggataacgacgaccagattgacagtcgtagtgaaacagtccagtaagcactactggacttcgaatatcctcggaatcaaaaccctaattaagatacatcagcaatgtaaaaaatcagttagcaatctctaaaagcgagagaaaccctaatgcaataaaatattcagttagcaatcccataaacaacactagaacctatcgagtttctacaagctattaagaaataagaactaggatcagggttagggtttaataattatgtcagttcaacatgtatcacaatcatggaaattctctaaacaagaagaagaagataaaagaattacatcggattccgccactccacgccagtactccctcacatgacgggcatattcctcccccgtaaaacacagagcatcctccgtcgacatattctcctgcgcctccttgtgtgtatctgacctgtgcgtttttttcttttttgaaatcgattgaaatcgatccagcccttatatcccagccgacggattcttttatgggcttacgttgggccttatcagcccaaatctcttcttattaatgatacaatgactcattattcattttacaatctaaagcgttgtcattttgcacacaaaaaaaaaaaaaaagcgttgtcataagagtttaacgatagtatcagaaagattcaacaataaatcagttattcaactaattatatccggcaatgattcttccggagatcatgcttatagtgagtgagtcctttggattcgttgatgatcgatcagttgaagcatttgccttcaattatgaactattaagggtggtcttttgagcagtagccgggtttgttgccacaaattgttagatttttgccggttctttatttttggagtcattttgttgtctttagatgtttcttatggagtctgctttcggaatttttttttcgttacagaactgaagaagcaaaggagacattgcggaaacttaaagaaggcataataaaggtgtattctatagggaagtttttgacggcttacttttgatgagactgatttgtattgtttaaggaacttagccatgggatcaagctatgaaagtatttaatttcaggttctctagagatcacacagccaaagttcaaaattatatgtgggattggataggagaagaaaaaacagacaaccttatgtaaatattccatttgtttcaccacaaacatgataatgtaagacattaaactcccatctataagatcccgcggctctgttctttaggtcaagaagacaagaacgaataggatgatgaacaagacgagcaagaaacatatcatcatcatttgaccttttgctccagctttcttcattaccattcccacttttttctgtcacaataccattttcattctttcagtttttactttctgcaatcaaaccagcaacaagacctttaaggggtttacctgaacaaattcaagacggttctttgtgctgtccatctccgtatccaattcatctattattctctcctgaacacacacaataacaaaaacttgatgtttctgatctctactgatacgtcctactgttaaatcatcttcccatattactaacctgtgcaacgagttcgtcgtgtatagtgagccccactcctccaattctctgtacacttttactaagctcatccaattcttcgtcttgttgcctgaagtgaaaaaaatgatgttaagttatggcactactctgtttttgaacaacactatgctacaatcttcagtctaaaatcgttataaactcagaagcaaagaaaagactgcaaaacaatgtagaacacacagagagagctttactttatcaacagcatttgcctatctgattctgactgtacaaaaccatcatcgtctctccctccatactgatcatatctacttgcttcacccgagtttggcattctcattagttctctacgcacttcacttgcatgacctgctccagaactaacctttccagctaaaacaccagacttcacattccgcacctataaaaaaaatcgtaatcgtcttgcacaagtcaactaacaacaaatttatgccactatgtaaagcagtattcataacaaacttagagaacatacctgtgtcctagcattactagtccatctcctccgtttttcaagctcagcttcatcaatgccataccatgaaggatcttttgctgcaacagtaatcgctttttccagctcatctaccttcctatcagtaaaaacagcttcaatagccatgaaaggactcgaatatattcaattggaatttctaatcatgtaaataagggccaatacattcctacaagatccatttacaaacacaaatcctattccacaccagctaaattatatataaagacgagattaatagaaccgtgactaaatacgagtacctgccactcaatgcttccacaagtagcaacaagctccttcgccacatgtgcttgatcacccatgtcgggagagatacgctcccatttgtggaatgtagattgcaacttatcaatctaacaaagcatcatccatcaatcactgtacttcaaaatctaaacaaaaaaacatctctggcaatttctgaacaacttacagaatcctgaatctcttctttaacaatgtagaatggatcttgagctgaagacatcccgaaatcaacaaaattttgctaccctatacaccaaataacacagctgattaagctatagaaacaagttcttatgcaaagttagttacagaaacagaattttgaaatttcatctcattggcagggattgttctggagatgcgcaaattctacgattgcaaaattagagttcctaagtcacaatgatcaaactcgacaaaactattagatccagagaaattccgattaaatcctggctaatctagggttagaattttattcaatagaaccggaacggctttatcaatctatgtgctttaagatcgacacaaacattggagaaaaagcttgcgtttagagacgataacgacaaggatcaatgcgaaaggagaattgatgtaagaggaaaattgaagaagcttccttacctgtgaaggaattaatcgaaaggtgacgcgacggagaacaaacgacggtgaagtaaaagagattccggcgtgagattcgtctctcttacatagcaaaacgcatcacctgcggttggctttgagattcgctgaaagtttatttttgggctactggagaatcttataaagcccaataagagaccacagagcccaataagttattacaaatctacgacagtattaataaagaccattttctacgttacaaaattttgattattaactgttatagaaaatggttatattgaaacgcatatttggcatttgttatagaagaaagaaaccactcttgctgagtttttgttggttaaagcgtgacctaagtctgtctattgagaagattcatagtccatgaaaaatccgatgctactataaatgattgtttactaatcctagaaaccaaaaacaaataattgttttctcaattcaaaaattgtatggtaaaattttagggtttacacatttaagattttaagtgttatagatttccggtgcacagaagaatggtatatattgtgagtttgtgattagttttgttatgcaaacttctcacgttaggcaactgtaaatataatatctccaacaaagcggtcatgcaatttgttttgttgaaaatttgtatattttactagcggtcatgaatttttaaatcccccacactctattttttaaaatatttttaacgttttgggaccatgatggatgttgaactttcatttcaggatttggtggaacgataaaattggaaaggctttggagtttggaacctgaagaacttataaagttaaaggatgacacgtgactttaataaagaaatgcaattcccataatcatataatagtccaaatttaggaagaaatgggtgacatgagttttaaagaagaaagacgtcatgattccattaaaacaaaccaaattagttggtggcttggtgctgacgtctaccgacttttccaccgtccatccttcgacgatggttctttctaaatgaccttctcagttttttcctgtcatgcgtattattattattagttaataaggctccactactactcggaaagtccgagtacaaataatatgacaataatgtcaaacttattcttagtattggtttaaaagaaggattcaacaagagtacttaatcacgtctcataattaccactttcatccaaacatggtcattactatatgacatgatcgtgttacattaatttggaaagtagtatatgtctttttcctaaaagtttatgtttagatttttgatcactaagaatataatgtcatatatattattaacctttacacctaaatgttatattaattacttgaatgataaaacggaaaatatcgaaagtttaggctaggtctctctagcatctctagtgtatttatttagcaatcccaaaacaaaattgtgttttctacaattttagtattagattaccaaaattgttgtatatagtctggtgattccgttttgatggtcgagatcgaaagaagcaagcatccactatgtggtcgtcacatgcgaatatttctaagtatacaaccatctatcgaaagtttcgaaacaacccaaatataatagtaataaattctgagaattctcctattttttattgatatgaaaaaagcagtaaaatattatgtaaagtagagaggaaccaaaattaaaacgtgcagatttattaaaagaataaagtgggatccaaaaagtcagcgtgaaacatgtgatacgatataacgacacggtcctatgactaagtccactccaatccagtgacgtaaacagcaccatcacccatagcttcctgtgacgcacatccttacgtaaccatcgttgacgctagactttcctctctgatctctctttcttcatgtatatataacaaaaccttcctttcctaattggtatctatctttaaaaacatacttgaaaatgcaaggaacgatttcttgtgcaagaaattataacatgacgacaaccgtcggggaatctctgcggccgctatcgcttaaaacgcagggaaacggcgagagagttcggatggtggtggaggagaacgcggtgattgtgattggacggagaggatgttgcatgtgtcatgtggtgaggaggctgcttcttggacttggagtgaatccggcggtccttgagattgatgaggagagggaagatgaagttttgagtgagttggagaatattggagttcaaggcggcggaggtacggtgaagttaccggcggtttatgtaggagggaggttgtttggagggttagatagggttatggctactcatatctccggtgagttagttccaattcttaaggaagttggggctctgtggttgtgattgtaaattaataatttaaaattatttttttttcttttaattaagaatcttgattggtaattgttgtttacggtttataattgaatcgtttcatatatatgtatataaagaaataaataaaagaaaagtctcaagttgaaatttgctagagattgtacccaataattttatagcattcattgtgctctgttttgatagtactcgtttttttttgtcatcagattttatatagattcatttttttttttatggtattcatgttttgatggtactcattgtatcattcgttttaggcatctactcttctaagtgagatagaaattaatggatctgtttgtttaaaagatttatcaaccttttgtgaaacggaaagaatttattactgtgttagactgttaggtgatagtgatttaaatgtgaccttaatgctcttgtttggggtacgtggtagtttatcagatttgaatattcacaaatgccaaaatatgagagatcctttagattgaggtgaaaaatgtgggagggatggaagatatcactccaattggtatgtttccactatgatgcacaaagtggagacggcgcggcaaaaagtggagaccaatgaaacgttaacctttagagctggaagcattttactgctggcccgagccataaacggcaaagagcatagaaccctcaattacagacaccacccaagtcacatgcaagcggttcttcgaacttaaccatgagctttatcagaacggaactacaaaaacccgagtatacgatagtggtagttcactctaacaagcgcatttcccgcggtcagctagcacaaaacaagatatcaacgatacacaataacgctaatcgaccctatggtcttactagctcctccaaaacaccggaagaacgaaacacggttcgaaacaacaattggaaatgactacagaatccttactaagggcctttcatatcttctatacagcacacgattaatctcactgttcacgtgagaattggttttgccacgcccaaattcatcactgctccacatttattgggtcttttgttcttcttggtataagcaaatgctaaagatcaatcgtgaaaataaaatgaaattaaggttaatttccaaattcaagagaaaaaatcaacaaaattttagaactcaacttgaaataaaaatttgactaaggttgtttacactaaacaaacattataataatgtaggacggaaattattattaaggctgtttacacaataaaaatttgaacgtgtaggaatcttaattagctagctaattttttttctaagattttagagaacaaaatttttatacagaaaataagtcactatcgattatctgcatactcagcaaatcggatttaaatccatatacatgcgttactaacaaaaaaagtactaaaccaagagttccggtttccaaagtcctattttatccatttttaatttcattattacttgaaatatttgttacaataattgaaagacgagctattacagtattgttttgacatattttatctagaagaatagaaatataaacaaatatcagtcatgtctcgaggttaaagttacgcccccaatttaataataaaaaaggttaaaacctaaaatctcccaaaagctttgaggtagattactatgatagttacccaacacctacacacaaagaatatgtgctctctcattcttttcctcatctttactccaacaaagcacctccatttatatatattatatatgttatgttctattgattcttcatgaagctttctttacccttacttgcatcacaagtaaaactaagaaacgaacatgacccatcgccttcacgaactaccaactctcgaatcacctgcgtcgtctcttcacttttaccaccatgctcatacccgaaaccggcctgaatattttcataactaaaccggtttaggtttacgagatttttcggtttaggttccatcgaaccgcattgcctaggctgtgtttggtagaagactttagagaggactggttcaccgtctttttcgtcctcgctgctacctaaatgatactgatgcatcacccaattcgtcttctcaggcttcttctggcgaccatagttggtgtagagcactaggatcttcttgaaaccggtttctcctgattgagacaaaacaggtcgagtcttgcctgttttgtgccaccttgtttcatggccttcctcatctgtgctcacttttcttcgttttcgtgttccggtcgtataagcctttgatggccggtggaagaagtgccgtacttgcccgtccttgcttactcctacttgggacaagatgtacttaagttaagcatatgttgatctgatcatcaatcacatcggatttgatgatttcacttttataatcttacaccaaattgtagagacaattttatttcacaaaactttactatatgcatgtgaatatgtgatcatttgtttttgggataaaaccaaccattacacttctgaacaaatcttctgaacacatattatatatcaaatctagcaagattttttattttataactaaccaaaatatctatgcctctacaaaaaaaaatttaaaccgaaaactctaatataaaatggtaaagccaagagtgtttgtgtagactccgtatgcaaaaacatgcgttacttacttttgaccccaagaaaagaagaagatgtaaattttaaatgaaatgaaatcgcgataaccaaaatagtcatttttggataattctccttgttttcatggtgctaattgagaaagaaatatcgtcaatagtattcatttatttttctgtaatttatacttagctctgtattgataatacaaaaaaaaaaaaaaaaaaagagagggttacataccaggaagtttctcaggatgcgtataacaaattccattctctccttcaagcgtaggtataaattcatcaatcaacggatgaagttttcgcttatcggatgataccttcgcctccaaatgcataaggatctctttatccgacggatcgaatttgactcctgccggtaagcttggtaaatctttgatgctaccaaccttatcagatctcattttatgtcaaaatctaaagtaatcatattgataactaaagaacatttaggtgaattaatggttaacatatgtaacctggtcgtcttggtgatgatggagcttgtgtccgcaagaaggacaagtcgtgatgggagtttcagcgctaatcttggaatctggacggctcgttacacatgattgagattggtctttgagttgaaccgatggatgatcagtgttcgatactctttcaagattaagatcgtagttatcatctgaaccatcacaccaactcatccttcttattttactgatctctctatacaagtgacctaccaaaatctaattacaatcagaactatcaaaagataaaacgagagagagggagctaaagatgaggaggtgatatagaaagaggggcaagtgaatgttaagttttggaactaaaatttaattatagtatattaaattaaaatggtgtaataaaataatatttttgggaggttgcgtggacgtcaagtttatgaatggtgtatgtacatacgtttgcaacaaataacttttaaatgcatttttcaacattttgattatgactattttaatttgaaccattttaacctttttctagtattcacagttgaaatattgaatgtgttatagctagagttgtgtgaaaatgtttaactaatggtatccaaccacacttaggaaaaccccttcaagagatcattaaactaaatcaggatatggagtttataaaagaaaaaacgaaaaaaaatagagaaaactaatctcttcaaaatcaagaaaggtgacgagagatggagtgtcgttattcaaactcattttcttttccaaactatttaaagttttgccagttttatttattttctattcaatatatcatatgccataacatgatcttgattgatcctttaacagattatattttatatatataaaaaaaatccaagaaaaagatcgtgtgatgaattatgcaatggaaaacgttaagttatgcccgactatcaatatttcatgtatgtatagtaggattcatttacgaaatatacaatagataaagagatctcatagataaatgttagatcatatatatatgttggaccaacttggtgaagcaataagaccatatcttcacgcacagaacaaactctcgtgttaagcaagtaacctatacccaaaaattctcatattttggctcgttgacaacagattcttcaccaaaagttattaacttatatatattttttctcaatctgtgtcttaaagtagacctaatattgaattttcttagctaaccacaatattaaaagacgaactatatataattagaatggtacaaccaactctccaaatgttttttttgtaaatgctatggtaattcggtttatttgggtaagcactcgggtccgtacacatgatcctcgatggagatgcgaagcttcatgaacaagaaactaataatctcaacccaaaaagtaaatgaaaaagacagatgtaaaggaacgaaacagcttacttagaaagctttttagaaatgattaatttcatatatttcatctgttttaattttcaaagaaatatgtttttttatctagtatataactatatttctgttaaattatattttaattataaatatgtcattaaaattttatatcaaataattatttgactttcttgttttaaatgttttttttttctttttagtcgaacaccattttactaagttatcggacggaatttttcttctaaagaaagacaatcctaagcagatgtgtttacatgggagaaaagagaccctcatgctcttacctttttagctagacaatcagcacaaatattgttacaagagggaagaaacctaatgtaaaataaataaataaaaaatgaaaaaaaattcaaaatttcaaaatccaataatattataaattaataatcatagatcttaagtatatattttaagactaatttttatatgaaatttttattcaagctacaattacaactctttttaaaatacaactggtatgatctttgttatactcatataattaactatttgcgtatttgatccgtcatagttgattttgtaaaatctttttgagaaagcattgctaagatttgagtaaagagaaattggattaagcttcatgtttacgtttacattgacgttaatggcgtagatatatagacacaatatcttgctgaaaaataaattaaagaagtaaaaaaaaaactaaaactaacataattatatatgcaaacaacaaaacatataaaaacttaaattaagaaacattttaaaaagaatataatattgtattttatgtaaatatttctataaattaatatttattaacttatcgtataagttaataaatattaatttataggataaattaatatcattataaattaataaaatttcatgatcccaacattactaatttatagagtttctactgtataaagctattttgagccttctatacataccatagtatccatgggaaaaggtgtccaatttctttaccattcatcattcctttcactttcgagaaagaaaatccaaattggagaataaggactaatcagaaaaggaggaaggcagtgatggaattggtgaaagagcccaagtttgaagcactggtgggcattcaaaaaagaggtgattaactgtctcctcctgagcaccacatctaggacaatgcttttccttaccgatgtgtcggtagaatagtgtatggtttgttgccaagtaccctgataaacattaccacaaaatgcttaagctttcttgtggtttttaacttccatacttgtgccaaaaagggagtgattcctggtccctgaaaagggtagtcacaagtagggcgagaaagttcttgcgcaacccaataccctgacttaacaaaatagttactagattttattctaatcaaactatatccatcactcaaataagtgcgacctggtcggacacctaaaatcaaaggtatgtccgttttattagttggcacgaattcaaattttcttgacttttttttgagaccttgaaggtttccttgtctgcattggtcctctgtttaaaatatgttggagattgtagatgttttcttaatccatgaatatagtacgattagagcgtaaactaatatcctcttaaaagaatgtaattcgaatctcccatgaagtgaatgaacaacgtgaagatgggaaagataagctttcaagactagagctttggtttagacgactactatgagactactatctccacaagaccaaaccaagacataccaatctaatcggctaaagttgatgaacaatctttggaggactttattcctttcctaaacaaaatctgaaaatcagaagacatgctaaaaatttacaaaacaactaaacctatatgggccaaaagcatatgtgcttatttaataacaaagtctccttgttatgttacaaaatctttcataacttctctttgataaaataaaataacattgaagagtattatactactacacaatacttttttctttctgttttgataagatttcgttaacctcaaaggtgatatttattaaaacaaaatatttcggtttctttaacccattactggatgttgtagaaaacaataacaattcataatgtataaaaacaacagaagaaaaaaaacataattcttaacactcataattaactagtgatgatcacaaatgatctactaattaaaatcttgattatgaatcatttgttattattctcatcatgtcctctcttgatccttgaagcagcttgctcacacagtttatcatagagctcttgatacttctccatcatcttcttcgccttttcgtgatccttcacgtcatttggatccactttccaccacacatccttattcacgaccctcgtctccgccaatgcagctgccttcttgactttgacttcgtccacctttaactcctccaccaatctattgtattttttgcaaagctcttgaatcttcgcttgcttgtgagcattcatgaccaatgatgatgaagaagacgacgaggcatcgccgttgagaaaccgctccgccacggcttggaaggatggactgccaaaagtgtatggttttccagagcaagaatacccgataaacgcaacttcaacaccacagagaatagaaagctcactgattttagtgtagataccatttagacgcttagagaatgtgaccgatctgccttcatctttttcaattttcttgatgttaatcttttgttttcctttggttttcttgggattcattttggagaaaaaaacaattatgagtttattggttataaaaaaaaaaagagaaatttaaactaagtatgtgattgttgtttttggctttagccaaggaatatgttttttttgttgggtgcaagataaggtttatatagatggaaaaatggtagtaatttaaatttcattaaaaaagtcaattcttaaattaatgtttggaaggttggtaatatttgtaatccgcatagttatggtcgattaataaaaactcttaattccggatgtagagactttgactagaagagattttatggtaataatgaatgtatgatattagattaatgtttggaaggttgttaatatttgttatccgcatagttatggtcgattgataataactcttaattccggatgtagagactttgactagaagagattttatgttaataatgaatgtatgatattctgaacttatattttttttttttgcgtaaaaggtttatttataccaattttctgtttttttctgtagagaagcgaaacgtattaaaaataaagctactacaaaggaaaactaatacatccaaaataagtaagaagaagagaaggagaggtagaagaagaggcatggaaggagagaagtcgatcccttaaagagcggtccagggaagcttgagtaacagacggtggtgagttgatgttgttgaagatccgggcattacgctctcgctagatgagatagcaggccgcttgcaagatgagcttgacaatagtcgtgatcttggggttagaagaagtccttgcctgcaaaatccaagaagaaatcgagagaagaccagatggaggagaaggccaaatccttgaagcaaacccttcccaaagagtggcagaataagcacagtcaaagaataagtgagcatgagtctctaggccagaagaacagagcacccactcaacagggacattaactccccagcttcttaacttgtaccttttgtataagaagcatcttcaactcccacttctcaaaacatttctaaattagatcctagtacatatatacaaaaaagattcattctactttcttaattagagatgatacaaggaacatatatgaaataattacacatcgatattcagtaaaaactatggcaaaattaaaggagactatatatttacacgtttgtgtatgtaattaattgacaaagaagttgtccaatctaaattggtagtgagtgtgcaaaatatgcataaaggtcatatgctcagttctttctaaataagattttatccataatttttgttttagaatttaaatgaagtggcatcttaaattgtaaacgctgcatcctagtaagcatatgttaacggaaatgtaacactctttgccaatttaacaaagtctccttgtagcagcatttttcacagtttaatatgttacaaaatctttcatgacttctctttggtaaaataaaataaaaattaaagagcatcatactactacacaatactttttttctttctgttttaataagattttgttaaactcaaaggtgatatctattaaaacaaaatatttcagtttttttaacccattactggatgttgtagaaaacaataacaattcataatgtataaaaaagacaaataaaaaacataattcttaacactcataattaactagtgatgatcacaagtgatctactaattaaaatcttgattacagatcatttgttattattctcatcatgtcctctcttgatccttaaagcaacttcctcacgcagtttctctttgagctcttgatacttctccatcatcttcttcgccttttcgtgatccttcacgtcatttggatctgctttccaccacgcatccttattcacggccctcgtctccgccaatgcagctgccttcttgactttgacttcgtccacctttaactcctccaccaatctattgtatcttttgcaaagctcttgaatcttcgcttgcttgtgagcattcttgaccgatcgttgcaacgatgatgaagaagacgacgaggcctcgccgttgagaaaccgctccaccacggcttggaaggacggactgccgaatgtgtatggttttccagagcaagaatacccgataaacgcaacttcaacaccacagagaatggaaagctcaatgatcatagtgtagatagcatttagacgcttagacaatgtgaccgatctgtcttcgtctttttcaattttcttgatgttaatcttttgttttcctttggttttcttgggattcattttggagaaaaacaaaattatgagtttattggttataaaaaaaaaagagagaaatttaagctaagtatgtgattgatgtatttggctttagccaaggaatattttttttttggttgggtgcaagatagggtttatatagatggaaaaatggtggtaaattaaattgcataaaaattagtcaattcttagattaatgtttggaaggttgttaatatttgttatccgcatagttatggtcgattaataacaactcttaattccggatgtagagactttgactagaagagattttatggtaataatgaatgtatgatattctgaacttgtacctttttttttttggtagaaggttaactttataccaattttctgtttttttttacgaaagcgaaacttactagaaaaaaaaattgctagaaagaaaaactaatacaaccaaaataagtaagaagaagagaaggagaggtagaagaagagggagagaaaccgatcccttaaagagcggtccagggaagcttgagtaacagatgtcggtgaggttatgttgttgaagatccggacattacgctcccgctagatgagatagcaggccgcttgcaagatgagcttggcaatagtcatgatcttggggttagaagaagtccttacctgcaaaatccaagaagaaatcgagagaagaccagatggaggagaaggccaaatccttgaagcaaacccttcccaaagagtggcagaataagcacagtcaaagaataagtgagcatgagtctctaggccagaagaacatagcacccactcagcagggacaataaatccctagcttcttaacttgtaccttttgtataagaagcatcttcaactcccacttctcaaaacatttctaaattagatcctagtacatatatacaaaaaagattcattctactttcttaattagagatgatacaaggaacatatatgaaataattacacatcgatattcagtaaaaactatggcaaaattaaaggagactatatatttacacgtttgtgtatgtaattaattgacaaagaagttgtccaatctaaattggtagtgagtgtgcaaaatatccataaaggtcatatgctcagttctttctaaataagattttatccataatttttgttttagaatttaaatgaagtggcatcttaaattgtaaacgctgcatcctagtaagcatatgttaacggaaatgtaacactctttgccaatttaattgttttgtcatatttgaattgttcgtgtatgaaatgtaatttttatttaagttagtgtacttttaagcacacttcataggagaactggctgttttcccgtagatataattaacaaggatcctattatcaaaatttacataatagagtatatgtattatgctattactgtaactcctagaaaagtcaaaatggtttcaccaaagttatgccctagcatgttaaattgcatatatatatttatagttctgatagtttttcaataactaaatggtagtagtctagtagttttcacttacataggagttgttatgcaggtttaggacagaaatcaattttcttcaaatgcaaaatgcactaaattactctattctagtcaaaatgatgccacattttaggtttattaaataattttggcattctaatgtcatttttttttttttggctttagtcacgaaggaattagttttatggtaaaaacttggagcacttcttgattacaaaagaagtatatctaattttctttttttcctagttttttagaagaaaataaaatgaaagcagtttggtttaagtaagtagtaagtttttattgttatttgggggctttaaagaaacttaagaaaacagcgagcaatattcagaatttaccaaacatatattagatgtaacaatagtctgctcccacaggcccactcttaagtccaaacttttgttcctacttccttatcaaatgtgtcatattcgttacaaaggtttttcagaaaggtttttagtaagttttcaaacattttacaagttctttagaagcttggcaagttatttgtttacaacatatattatctttacaaaaaaatataaaaaaacatataccaaaatcgtcttttgtctttcctagtttttttaatgggcctttgacaaatttgagaatagagagagtagagtcgatatgtaagacttattcaaaaatgtggaaaacaatgtgggtccgataggcccatttaaaagccatatgacccctaaggtgtgagtgtgtaccgtgtggtgtgggtcacaataacactcaattactctcatatgtattaatgatgtacatgatcatttcgcaatcctgaccttatctattgaactttggtcccttagtccctactatgctttccattataattctttgtttcttataaataattatgctacccacgaactatcttactcatatcataccaaccactagcaagactactataccaaaattactagaacaaagttgcatcacatataaaagaaacttcacacaactatcaaaatagaataaaaaaagagtgtacttgttctagcaaatacaaacatgttatgtggaatctctatgaaacctcatcatgcaacaagttgaaaaaaataaacaaaaaggaaatgcaaaaacaaagaaaacaaaattgagaaatgatttagagagtgaaagagacagagagacaaggcaaaagatgaaggtgaggtgtctatgtcccttgaattgaatgataacaatgtgggctggcttcaatgcttattggacccacttttaatttcctcacccaacagctcatatttagattctcaccctatttatgtaaccttaatgtaaaattctctagttagatgataaagcttagctaatgttgagatgtcaatgtttttgttttggatttgttttatactcaacaataatagaagttatctctttagtttttaatgtcgttacttaattgcaattaggaagttaaacgtttacctaatcactaccggtcgatttacatgacttaactaattctttttctctttttggaattatatctttcttacaaatagttctcgaactccaagaatatcatgttttaaagaatgactgtcaaaaaaacatacgttgtttattatagatactagacttcacacaagtaactaaaagttagagatcttttcgcaggaaggttgatattagtcatttcatgtgccaagtctgatgttcatgctcgtgtacggagagagtaagtaaaggaaataacacaacctgaaattataaataataatagaaaagttggtttgaaaaagttgagaatttaagagacatgtgaatctacagtgacatcaaactgtacacgagcctccaagagttcactaaaaacgagagagagagagagagcctaatgctttaaaagattcagatagacatgttcctacacgaaccttgaatctgtttacccaaatatggaaactatttaaatgcatgttaacgccagaaagatcgcaactttttcatttgcatttaccaaagataaaaactcttacaaaaccagagtttactaatagctttatacagtggagaaactgaaacgctgaattagaaacttctttatatatattataaaaatttcgacaatctctgattctcacttttagatcaaaaccctaaaaaggggtgagagaatcttgattcaatgccctaaattgacagcttcaagcaccaaaaattgagagagcttttttgggcaaaacacttttctttctccatttgtgtctcaagctatacttccttggtctgaggtgtcttcgttgtaataaggtgttaacttgccatccttgtcatctcttatcttgtgtaggctatcttcgtctccaccaccaatttcttgcaacatcttaaccacacgcctcatggaaggtcggttaatgggcaacggactcgtgcagaggagtccaacgttgaggattttgcttatctcttctttgaaacaagagtcgagtttcgggtctatcacatgctctatgcctttttggtccaatgtagagcaaacccacttcaccaaatccttctccccaagttctggatcaaccgggcgtttcctagttactatctcaaggatcactaccccgaaactgtagatgtcgcttttctcgttcacacgaagcgtatatgcgtattctgcaagaagtttgaaatgaaagttatggagggaaacagacaaacaaacaaaaagtttcaaattccattaatggacaagtgagaagttgtggagccatggtttcagacatgtctcaatagatagtgaatgctcatttaagtctcaactaataaaacttaaatgtggttcatctgaatctccgtgcaacatgtaccaaatgagcattattaccttaagcaaaactgttgattaaacaaagcacatttaacttgaatcataagactaacctggtgcgatataaccgcatgaaccagcgatcactgacatcgatttaggagcttttccggtcaagtcgacagctttagccacaccaaaatcagcaactcttgcaccataatctccatcgatcaaaatattgtttgacttaatatctctatgcacaatcggaggaacagaatcatggtgaagatacgaaagcccctcagccgcatctaagataatcttaaacctcgtttgccatcccaacattcctcctttactgctatgaagcaaatctcccaaactaccattaggcatgtactcataaaccaagagcttgcagtctcttgtagaacagcaacaccatagcttcacaatgttcttatgcctaatcttacccaatgtctcaacttcagcttcaaaagcctcatcttgaactccaggtttgtaacctttctctggatcacaatctccagtttccttaacagaacctgtccataaacgcttaaccgcaacagtttccccattggtgagtacaaccttgtaaactttacctgaagctccagctccaatcacattatcttcatccaagctttcaagaatctcatgctcactgaacccgagtttgtggaacgacattagagtccacttagatctctccatggctcttgctttcttgaaagtcctgtacttgaagtagaaccaagcaacacccgcaagaagcaccatcgcagcaagtacgaaaatcgatctaagaagccatacatagcctctcttcttagcttcattctcagagccacacaatcccttgatatccccacacaatcccgggttcccaatgaagctattcttatacatatctttcgctaaagaaggcggtaagtcacccgataaccggttataagacagattcagctggtttagcttcaaactctgcaatgaaaccgggatcttgccagagaacatgttaccagaaagatcaagatagttcaatactgacaaactcccgatttcatctggaattttaccggtgaattcgttatcggctaagtttaactcgttgagcttcttccaagatttgattccagaagttaactctcctgaaaactgattaccatgaagatcaagagtacctaattctccaagactcatcaagctatcaggcaacgagccactgaacttgttcccacttgccgacaactgattaagattatccaaagaaccaatttcctccggcaaagatccggtgaattcattgttggagagaatcaacagcgagagatttgaagcacctccaatggacttcgaaatttcaccggagaacgagttgttgacgagctcaagcaagttaacatgaggcaatccccagaaacctgtaggaactgaaccggaaaaccggttataagctaaccggatacgtgtcaagctcctgcaatcggcgagactctccggtataacgccggagaaggaattgtgtataatcaacaactcctctagctctcctttcgcacacagatccgccggtaagtcgccggaaaattcgttttccgaaacatccaaccatctcaacggcgagtttagaccgaggtcttttggtaatccaccggttaaccggtttccgaatattctaatctcgtacaagttcggagataacgctatactcgccggaagctcaccttctagattgttctcgtagagattcaaactctccaacggcacacggcaaagctcgtccggtattttcccggttaactgattcatcgacgcgtcgagaagtctcaacgatttcaaattcccgagctccggtggaatctctccggtcaacgagttgttgtacagctcaatctgaacgacgttagtcaaaccaccgagcgaaggaggaatatgacctacaaggtcgttgagcgcaaggtctaaatcaacgagtttactgagttgacccagcgagtcagggatctgtccgactaaatgacactcagtgagccacataacctcgagattcgtcaagttcccgaactccggcgggatccgactcggactaaaggggttatacgaaagattcagcatcttcaacgtgctgatgttgccgagaaacggaggaatcgtaccgtctaagagattgtaaacaagagaaagaacctctaggttttcgaatttgccgaaactcgccggaatgtcaccggaaaagttgttaccggtcaaatctaagtgaaccaaagtcggaatatcggcaagagtttgtggaagctcaccggtgagtagattctgagagagatcgagagtttgaagactcttacaagcagcgatgttgagaggaagagtagagttgatggagttattgtacaaagagagatgagccagattagagagacgacaaatgactgaaggaaaaggtccggcgagattagcgctggagaggtctacggaagtgacggaggagaaatcaccggcgcaggaaacgccggaccaccgacaaggagaagcatcgttggagttccaggaagagagatatgagtctgggtcgtctaacgagagcttgacttgttgaagaatgaaaccgtcttggttaagagagaagacggtggggaaaagtaagaagagaaagagaagatacatgtttcttcgtcttccccggtatctatgacggtggttgaagaaagagagagagataagagagtatgaagaagagagtgtttgtgagagagtgctttgaaggaagagaagaagagagtctataaaaagcgttgaccggagacaggtgaattatcgtgactctgactgtgaatgctataaaaatcatttgtttttctactatcatttattttgtttttgttttctataacgattctctctaattatttgtttgcaattattagtatctatgtcgagtttccaacattgtataattatcctgtgtttatctgattataaaagagaatgttactaataatgatgatctagctaaatagccatatggaaggaaacattctttttttgtactttgttgtttaagagaatgcaactgtttttaaattagttatgtaggagacgataagattgtaaattttcaattaaataattttagctttataatatatatggaatttgcatacaaatttgatttcattatatatgtttttaatgtaaatgaaaagttagttagtagagtaaatgtgcattttaaaaaaattgcaaggtgaaaagaaggtacggtaaacattaattttgaaatgtagatatctgatttttttttttttttttttttggagatggaatgagatatattccgacagttttatttattatcggcgtttgtaaagtagtaaagtacaaatattgttagaacatatcaaaaaaaaaaaaaacagaatgtgttggaagtttacttggaacgtagtctaaagtcgatgtgaattaaattaattatcattcaattttaaaaagtttatgcacgtcttaaagagtattaggaatattgtatcaactattaagagaataaactagcatgcatgtagaaacatgaaaatattttattttgttgaaatgtgaaattcatttttgaagataataatatgtagttatttacaaaaaatgcaaagaaaatatggaagataggataagatatcaaaatattgagatatttatgaaattaaacattctctaatgaaatttgttatactaattagtattgcaaagggaaagagggggacaaacttgtatggttaaacgttaggaaacatattgcctaatggtgtagtcaatatgagaatgcacttctcaagcgagagtcatgagtattgcttatcttagagatgtcatagtcttaaaaaagtattcgagtcgaataagagttctttatggtttttaaattttaggttgatatgcaacaaaattggaagacgtaaaataatgtattgtgaaaaacaaactgtgtgtacactttgttcttattctcacaacttggttttcataagttgttacggctaaacgaaatcgtaaattattttgtaggatgtgaaaaagagttgcactaactgtacttgtgttcaagaattttgtttttgaggacgtgaatacattgttgaatccagttaaaaaaaattgttatctatttttgtttttattttcttacgatttggatttcatgcccgttacattatgagaattgttacgtttactatcataatctcaatcttagtttatcagttggaatttgattttattttagttaatcttaatttaacaaaataataaactcataaaagaacaacacaaattttgcctacatatatgttagttagaaaacgtatgttctaacatatgtatcggttgagaaaagcatcactttaatcaacataccatttgaatgatatttaaagagatagatgagtgaaattttggagatagattgattccaagcagtcttctcttcttcgtgtttctaatagtttctgtgaaacacacaatacaagttgtcaaaaaaaaattagggtacactaaacggagttcgacacttgtatcctataagatagacatttaagaaattacgtacactacaatagctacaaatctctgtcttatgagattgttataagcaaagtctctttcatcctacaaattgttgctagctagttgattgaaagaaaccgtcaaattagttttgtttatatttttaatttcattacttagttaatcaagtttccattacgtgtgattgatgtcctcttatagtttcataacattgtcactttggaattatttaatagaactattaatttgttacgagtattgtgtacaagcaagcaacctttgatctatattttgagagttcaagttcttatataaatggtttgaaggcattacgctcctcaatgcttattagcaacaatgacagtaatggtcagctttgatcttctaaattgtttcatctttaccctcatattcctcatctcaactctctttctctttgttttattctataagaaaccaaacgatggatttgatgtacctccaagccctccttctcttcccatcattggtcatcttcatcttctcctctttgcttcaatccacaagtgttttcaaaaaatctcatccaaatacggaccttttctccatcttcgcattttccatgtccccattgttcttgtatcctctgcctcaacggcttacgatatcttcaagacaaacgacattaatgtctcttatcgtggtgatgttgcaatcgatgaatgcattgtgtttggttcttttggatatttccgagctccatgtgaagattactggaaattcatgagaaagctcatcatggccagggcactcggaccccaagcgctagagcggacacgtggtgttcgtgcagctgagctagagaggtttcatagaaaattactcgataaggctatgaaaaaacaaagccttaagatcggtgaagaagcaaggatactcgttaacaacaccctcggaaaaatgagcctaggaagtagtttttcaatagagaacaatgatgggacaaaagtttcagaatattctatcaagttagctgatttgtctcaaatgttttgtgtggcacaaatatttcataagccgcttgagaagctagggatctctcttttaaagaagcagattatggatgtttcacacaaatttgaggagttgctagaaaatattgttgtgaagtacgaggaaaaaatggacaaccatcaaagtactgaattcatggatgcattattggcagcttatcaagacgaaaacgcagagtataagatcactagaaaccatatcaaggcactactagcggtaaattgttatcctatcattggttataatatttcattgagaatccaaaccattagtaccattatactaaataataatttgcaatttttaggagcttttctttggagccggtgaatcatcttcttcaacaacaaggtgggcaatgggagaaattttcaacaatcctaggatctttgagaaactaagaacagaaatcgattcagtggtggggacaacaaggttgattcaagaaagtgatctaccaaaacttccttacttgcaagcagtcgtgaaagaatctctaagattacacccggtgggagcggtcttgccaagagaatttacgcaagattgtaacattggagggttctatatacatgagggaacatcacttgtcgttaatgcttatgctgtgatgagagatcctgatatttgggaagatcctaatgagtttaagccggaaaggtttctagatgcctcaagattagggcaagaggaggagaaaaaggagaaaacactaaagttcctcccatttggcgctggaaggagaggatgtcctggattatatcttggttataccttagtagaaaccacaattggagtgatggtgcaatgctttgactgggaaatcgaaggagataaagtcaacatgcaagaaggttccggattaagatttttcttggatttggctcatccccttaagtgcactcctattcctcgaatcataaatcatgaaccttctaatacgcagattccaaattcgtgagttcaagacttcacttaatttacaaatatataactgtgaaggttcaaggatcgttattacacccctatggtatatacattatttttgcattcgttgatgttgttgaatgcactttccctaaactgttgtatttcattatgttcatattattgttaagttatttatgtaaatcgcatagatatttgggtgaattggtgtactatcatatatagtaaatttacttaaatagaatacatcatcaaagactacgagtcgacactcgacaccgaacggattgttgttatacttgttttctcatttgatttttgtgaacggttgttacatttaacttactataaattttattagtcaaagactagcttgaacatatccgataatatctagttagtttttttctgaaaataaatgtctaatttataaatttaatttgattgtaatgtctagtttatattctttttatgtttggaaaagaaatgtttaggtataaatcaaacttaaaattaaaaatatagcaaagaaaaacaacatttatgtttgctaaagaactcatataattatgtgatatctataatgaatactctattggtagatcttaacatgaacttgaagatggttgttgatcatataccaaatctgaaatgtaaaaaatgtatgttttaaaatttatcaaaatccgatgtttggaatatgttgtgaaaggaatttttattgaagatacatgtgtttattattgctaataagaattagtattaaaagtagggaatttcagaaaatactaaaataaattattaacgttcacatgttttgtaggtttcatccattagtaaaataaccaaatcattgctaagaatttaatatacctattatttagatcctgcagtgaaatttatgatagacaataaatggttcaattctcccaacaccgagatccacaactaataaatgtggtatatgatatttgttatttgtatgtacgcatacagtaatgaatacgattcatagcttcatgccttcatgattttaatttatgaacaagcaaacatgaaataaattcatccacattaatatataaagaagaaagttgatgagatcaaattgttgatgagccgacagtgaataattatcatataaaatagcatgccaatctcaatacacactcaaatttgtcttatcttttgtcgcatttccaattttgttttgtcctatacgtaactcaaaatgcaatgttatctaatgcaggccctacatgcagaaaataacaatatcattttatcccacgtccaacgaaatttgatgttaaaccaccaccccatataaccccggcacactcatatatgtatgtctttatcacacttttttttttctgtcaattactacatagataacaacattctattatcttgcgtaataaaaaaaaaaaaaacgttctattatcttttatggactatctaaccacctattcatctgacaaaaaaaagtctttacaatgtctaatatcttttatggactatctaaccacctatttgtttcttgtatataattttaatcaagtcaaaccatcgccgttccaaaattgttgaaaatataaattagtgtttgtaatgacgtattttagtaaattaacgacattgttaagtagttttaaacatgttatcagcgtgccaaagtttccattgtagaattctactatatatggattacaacagaaagaaacaatgcaaaactaatatggtctccgagtaatgtaaatcataattaaaaaaaagaaaatcttaattaatattacaggaaacacaagccgaccatagtggattgtgatacttttagcgtgcaattgaagtaatggactaaaagagtagcatcattatcatagaatcaacacttttattagcattaagctccttaatatctgtagcattaatgatcacattcattttagtactcgttattctttcttcttttttaggtactatttattgtatttatcattaattgaaggcagagttatgacacggaaactacatttgaacctacgaacaaagttaggtttgacctaaaatctttaaccactgggtcgaagactccatcagataaagtttttcagatttcaatcagtaactaaagaaaaaagaatcaacatttttcaacaaattgatcattaaaaaacaaaataatatcacatacgtcacgttttcttttttgggtttttgctaaaaggagagaggttgaaaaaatcgagaagagagaaggaaatagaaaagaaaagcaaagtatgtattcccgagacaagccaaagttggaaacatcgcgtcggtcgtcctatcattcttccatccatagggactgctaaaaccaaataaacatgcatgcaaatctcgatgtatctgtttctttttttaccaaagcaagtatcacgagattagacatcaaactaaaacagctgtttggtctttttgcgtttcagttctttcaaataatttatatccgtagagcaaatagtcattacaaattaattgtgtactttctacctttagagccagttaactcagtcgtagcaagattggtgtgagtctaatttggattttgtaggatcacgagcgaagcattgtaaccgttagggaaacggttattaggagtagttggacaacccatcattttatggactccttctgcttccacatgttacaacttgtaatccgaaactgttttctatgtgctgacttgtttttcttaaaaaaatagctataaaatatttagaaaagatttataaaagcaaagatctcttgatcatatctatcttatttgaatcatttataattattaatacggttgaattcttgatagaaaatgttaatgacatgttttgaaaatgtaatgttttgatacagaagagattagtacaaccattatcttttttcgggtcataaaagatgtactaatattaataagccaaacgaaaactttgttcttctatagatatattattctcaaaggcgtttccttttcacttgctttttctttcttttgcttttggtgaaatcttcaaagaagcttttgtggttgtacccaaacttttttccaagtatcccacttgccataagatctgtggggtcttataaatatcagaaagtggaacttttgcaaactttgagggaatatttaatcatatatcttagagactctagtattgtcacctcttcaattcctcccaaaattccaaattgtaaatctgtattttgttaggaattccaagtataatagccaattacaagagatgtattacataagatttttaaagttcgatacatttcgacttgtcccttatgctcaagtatttattctattgtagatatcttaagtgtagatcaatgaaaatccctaacccgacaactcatgttaatcttgttttcatcctcgatcgcaagtatacatgtataaactcacatgaagcaaagtaaagaattcgttaatcttttttttagttaaccaaaaactttgcaccaaaactgatatatgtatgtgagccaaaactgtcatagcatggtaaataagccccttcacaacaaggctcgacctagctagatgttagattcaaccttctttagaaaaaaacctaatggtatatatatatagattattttgaaattcctaatgttaggaattcccgcaaaatattgagatatagagctgatgaatcttatgctttctcgtgatctttattaagtgtttatctgctctgatgggtccaataattcatttaatttatgaaaacaacagtagttgtgggttctacgtggttaaatatgtttttctttataggttaaaatatgaaaaaagcatctagaagatagaagcaaaggagaagaagagtcagcggtccaatttttggtgatcatcttcctaccttgcaatcataattattcccttaagcttaatcatttcactttaattaagctttaagaatattagagtttatttcacatcccaccttctcccactttcctcttctccttttggttggcaaggtaaataaaaaaggaagtcttttaaacaactattttcgatttatttagtttccatttgaagttctatattggttgtattgtccaatcgaaatttccactttctctgcttttgatgcatgttctatgcttgcgttgcgtatattatgtgtaatatagcatgcacattgttatggatataacaacatcaagtttaataatatgctgattgaataaattcatacaaacatgtcgtcttgcaaagatcttttaatgtcattagttcatcatggaagaaatttatatggatgtttcatcttacaaagatatttatatgatttatgaataaagtgtatattagatttaccacgttgattggtggcacggtaaagagtgtttaggctcgtaatgttcggggaacaagcattgcgataagccgagactgcagagaaggagataatagttcaataaggattatatttgtgacatttaagtggtttgattgttaaatcaatcattttaagaaaaaagatttaaatcacatttactatttatcaccatttttggctattttatttctactcaaattcttaccagcttttattcattagaaaatctttattacattcactaacatatttcttatgtacaagacattgactgagtgggttttgtagcagtgtcgcaaaagtttcacagcatatcactagtattacgggatatacaaatgtaatgggtttgaattgaagattcaaaagaactaaaaaacgcctttttcttttcgtattcaacctgtaattgaaagaagaagaaaaaatgaagaatggatcactacgccactaaaaggggtctctctctctctctctctaccttaaaccatctagtgaaagtaccttttaccttaaaataaacacaaaacgcttaaactgtaattgtccaaagaattttcaagacaaaagttgcaagacatagaagccgaagattgcgaataaacatagcaatgatttgagaaaaacacaaacacaactcgttcaagtcctctctccaaaatgcctcttttcttttagttttgagacaaaatctttttttctggcatataccttttgacatttaatggtgagattttgcatgagtccaaggactaagcgattctcctttggaagaaatgtatgaaatcacaaccacaccctcgcatgcgtattgttgagaatcatttcttgttcatcgacaactttaaacaagtactagtaggagagagcccttaagcattggagattaacacatgaatcattaacttatacttaacaaaataatgaaattgttaattatgataacaaaggcatttgctaaatatatgccttggcttggctttaacaactgcaccaaaactaatcagaaatgttcttcttctataggtgaaaacctattctgctactatctctcttttctcctacataaaaatatatatatatatcttcaacaagaatgtaatcttccctcttcacaagctactagatctcaacttcatgaatcgctgctgctgtaaccttctgattctctgtcgtaattgtttgctgcattattagcaggtacatcatcatcttcagagctctcactcatttctgcgtcatcttctccttcgacccgcccaacccccacaacttcttcttcctcgtcttcctctattgccacatttaggttactattccaatctaacccccacttgtttctctgactataatccacaaactgaccaccaccatcttcatcctctgattcaactcctacactgttgtcactttcatcatccacttgcatcggcgtcatcattctgtttggtgtttcattggcccagtcctcctccatctctctaggagtttcacctgctgcccagtcttcattaatgtctctgaatgtttgctcttcttcttcctcatcttcttcaacttcttcgcttttaggcctaacaatattagccattctattgactaggtgggaattatcctcatcgatcctctctggtctttttctaaccgtcctctttccttttccagggacttggtggttcaactcaacggccattaagttactattgactgcaacatttctcctaccaacgacaaatttgttaagaccgctttgcgctttcttcctcttcacctttctgtttgatccagatcccaagcttactcgtgcacgtttcttatttctgttacccgggtttggagcaacctcgtcttgatcttcttgctctctgggtcctttgcctttgaaaggtgaatctctagggaaaaggctctgcaatacgtgggtaacataagattccataaccataaaaaaaaaataacttccaaagtattaacttagaaacaattttcgaaccaatattggtctagaaaacttacaatctgctcgttctcatcttcagggatgacctcaggtttctctggcttcacataaataatggatgcatcaagttctgaaagtctcaaagcaaccgctgatactgtctttggtatccatggaagaacgtccactgatccctgatcatcagcctcagcgttagcagctcccaaaagctcctttgccgacataaaattggatgacaaagattctttcttgattgcactctctaaggaagtcaacacctatcaaaaccaaaaaaaggaagacatcgggtttaaaacaaaacatcattccaatttgcattaatttagagaaagaaaaacaagatgatggaacctgcaaaagttctccaggtgatgatgaagtattcaacctaaacccccatttttttctttggtcctctgtccaaaatgattcaagagcttcatctggaacagatgcctgtcaataaaaagggagttgtcaagtgttggtaccaaaagaaccggcgcttaagtcgacaaaaatcatttatgctttacctcgagaaaaacaagtagtggtttgagcaacctgactccaaaaggaagaggagacacagccaaacctgaatctaatatctctgaactatcaaccacgtccaatctctggtgacaagaagagcagaaggtatactcagacaaataggaagcaacacacgcgtcacatgttgctaacagttcagatctcttcttcccatattttctagcacaagaaggtagtgaactgtacgtctcggtccacatccatctctggaaatcatggaaccgttttgataaattcttgttctcggtgtcatttctacctaaatcaactctaattgaagttgaagtttccattgaatcagagtttgaccctgatatagcactggacgatgggctcacagaatctgtaggagaatgattcacaacactcttttccgtcaagaaagggtttctagctagctttatatctttacaagcattctctttgaatgatccctcgatcttctgcagcattatgcgtaaatgagactctctgatcccacgcatatccaatgatgcaaccagaatatcaaaagcctacacagaacaatttcacagaaggcatggttaaatctctatctaagctggatattagcaaaccaaaaggcaatcaaaaaccttaagctagaatcttttaacaaattgctgaggttgttatattacctcttctgaatcaatgaggagccacttgccatcatgtagctcaacaaataagagcctcgaacaaggatcactcttagacactgatacagcaaaatgccagtaacgattgtggcgccgatcttgtccaagcggcaaagatcggtatggatacacctcttctgctttgtggcctatatatgactttaattgggagcgtgatctctttgaagcataattttcttgacttatattggcatcctgattaataagtgctctctcagcagatgatttatgaagatcgttcgaaagatcttccaggggctttgtttcatctagaagttgagaagggtctctatcaaaactatccctctcacgagtagagctttgaatgattggtaggcctatcgttgattcagttttgctgcttgctaagttttgaagatcaagcttaagtacatctctcatacagctgttatctaactgtgcttcagcccacatttgctttttaagagcatttgctgcttccatacgatcctgtgaataaatttcaatcagataacaaataatagactcaaaaggtcaatttctactctgttcaacaggaaagctgataaaagaaaacccagactttacctcaagacctgttctgatggagtttccttcattggcaatgccgactaaagcaacaagggcattaaggcgctcttcaacacttagatgacagtaatccccttccgtaagaccttgaatccatgattggccctggttgctttcatcaattacggcatccacgccgccaaccactgtatttttatgccgctcactatgttgtggaacaatgctcttcatagtgcttggaggaggagatgaaaactccttctcaagctcactctttacatctgctttaacatcacagaacattgtatctaccccctttcctgacaaaacattcgcttctccaagaacggcactttttgatgcacttgccagtgtagctaaatcatcaacctcgggatcctcatcaatatcaatttcgaagtcttcatccctttcaagatcattcacatcttctggacctgtaaatccattttcaaaagcccgtatcttcttcctggcatctgcgagtattgcctctccatccttaggatccttcacataaggagctcgtacacaataagtcgaaggagctattctttcaaagagtttcacatctcttgtcaatgcaacagaaatagaagcctctggtgtcttgcttgtggtcaagtcccgaagtccagatttctttcaatggaaaacataaagactatgtaaatgaaaaaaattcaaatacgatgaaaacagcatagcaaatatagattatagatttacctgaatcttgtcagcaagttctaatactgtcagtcccttgcttccttcaagagatagaacatgaaaggctgcaaatttgacggttccaggtgtcaaccggtgcctcgacttgcgaggagcgagcaaccctttctcccgcatcgatgcaaaagcactttcagctgctgtaccatttcggatagtagaaatgacatcttcacaacctttagcctgcatacacaaccaaaccaaaacaatgtgtaagaaaaaacgaaaaccatctttatgtcaaaggcctagcttagcttccaggatttcatttttatttctctccatatatagtactaccatcacatcctgagtaaacacttgttaggagttagggggcgcccaaacgtgaatacgtacctcatccttatcaccagtattggtcaatcgggaatgttttttcttcagcttaggtccaaatccagcagagagcgctaattgtcgcagtatttcaggccatgttagtgggttcaaatgctttttccaactacgaatgtcaaaaccccatgcataagcctgaaggagaaagaagcatatgaaagatgaagcccactgaacaaaaccagcaagagaaaagtatattaacatacagagacgaagaaagctaccccttcaactatttgcggatgtccaccctcaggattggctgtagtatattggttatttccaattccactaaagggtgttctagcaacatcttcgacatctcgtattattgatctcagaagagtaacatgtatctcccccagcaaccttgagtcctacaataggatctttatcaaatacagagcacgaacaatgaaatgaaagaaacaactatagaacacgagaaaacaggctataggtactaaagagcgacttacatagtcatgaaaagcctgaataaactcatccagtgtaaaaggccataggtcaagaacatcagaaaatgatatcaggaatctccaaacctgaaaagcaatcacaacataagatatgtgaaatctgcaaaagggtgcataatacacggaaaaacaaatccaactgatttcaaattggtctccaagttattctgatcataatactaattttaaatgagaggtagcagccggagagagggtaaagatcaatacaacataccattagaaggtttccaacagtttcatcagaatctttccatggagaaatggcaaacggcatttttagttgcaaagactttggtggaaatgtgctcagagaatctgaaaaagcagaatagctatgatgaattgcaggaaccataaataaattacaacactgtaataaagctaagccaatcgagtaaggtataagcaaattactttgactgtcttgattttgataagtatatgaagaagatagatttgtaagagaaagcaaatacaaaagctactacccaatctagaaatcaatgtaattacaataaaataatcttcgcagtgttctaacatgctacatcaacattgaatattccagactaggccatagaatataccaaactaagaatataaaaattaatactaagcttaaaatttcagagaggaaaaacactaaaataaattaccaaaaattattgattgtaaagcctaaaaactaagtagaccgttaggccgtgattaccaaatccactactaactaaatctgagagaccatacctctatacacctcaagattctgcaatgtgtcgtgatcaagctgtaatactgagggtaatcctttgctaatagcagccaattccattagttctagctgctcatcttcaataagatccatagactccttggcaattctacgtgcagttgccttctcaatggcaagcttgcgtctaatagcgtctttctctcgacgaatctcgtctttttgcttctttttctcagcctttaacatgtcaacaaaaagataattttcactctctgaactcttgccacaaaagttgctcaatctcagcaggattaacaaaaaaataccaaagaataacaactgggcagagttttccaaacttaccctttcattttctctctgtaagaatttttctcttctttctacttcacgacgctgctcacgctgtaacctttcctcttcttttattctttcacgcatcaacctctcttcttccttacgcctctcacgctcgttcctttccatctcttttctcatgcgttcttcattctgaggacacaagcatcaactcatcaatatatctgttacagtgatactaacaaaagacaataagacacctttccaaataatcagtaaggaggataataaatgtagagcaaatacctttttcctctgaatttctagcttctcaagatcttttggtccatgattctctcgggtttcactccctcttccaagtctaccatcgttaatctgtgagagtaaacatagaaaaatgacattacaacaaagacacatcttgtcaacaaaaacggatgaaataaaagttggtacaatgaagctacctttccctttctatgcacatcactactcttacgcactccatcaggtaacaaatatggatcttctgtaccaaggactgatgagtccttctccagcaggaatctatcaccatgatgcgctgattcaatggggcttggcatgtcttgttgagatgtcgaacagttacgagacgcatgtccaggggtaacataggaccttggtacaggtccattcgcgtgcataaatgatgaaattctagaacgtgcaacttcatagtccataccacgtgcatgattttcagagtatcgttcatacatattaggtgtaaaagaagacggatcatccagagattgttgctcatggaaagaacgggcagcagcatgagactataatcaacaaaagcaaatatgttaagcaaagtagtaaaaagaaaatattataaaactgtgaatacatgaatggacaagaaagagaatagaaacagcagagcggaattcatctttctaacaatgatcagagactaaaaactgccataagactaatgtcagccttcatgtaatgagaactctaaaaattactcctaccatataattcatagaccatcagtttatggtaacctcttcaactagtcaatttgagatatctaggtgcattataaagaaactaaatagagcatatctgtttagtcagaaaactaactcttcgaggtcggggatcatgtcgctcatacagatcgctctcatagggatgaagtaggtgtttctgcatcgctgaaatgccaatgaaaacaaagttagagagttacttatcacaagaagtgtaatactaacactgacattggttacacaagtcataaaacagggcaaacatagaaagtaatgtatacctataggtgttccaaacgcaccaggaggcaaaggatcaaactccatgccaagaataggtccatcatctctcaatggctcacctaactgagcctcaatacagacaatagctctatgcaccattgtcgacaaccgcgactcataactcggctttcccattgtctcatattcatccaattcagctcgagaactactactaccactagcaaaattcctcctagagttggaataaggactgcaaccagactcagaacccgaatcagatctggaatcttgctcaggtaccgatccagcagcagccggtaactcgttaaccgaagccgattgaaccgcagcaaccgatgatttcaccggtttattagactgaccatccttcttgtcctttaaccgtctatgacaaaaccacatctgtaattgtcgatctgacaaatccaatttctcagataactcagccctcgtcgcctccgacggatacttctcctctgaatcaaaaattcaacatcaatacttaaaaaaacaaagagaacgaagattgaatcaaattaattgagatgaataagaacctgaataaactttctccaaggtttcaagctgaaacggagttttcatctgacgtttaggcttgacacgaccatccttagaggaggaattattatcaatcttcttcttcttattattaagattagcatcaccaacgacgctcctgatcttctgatcttcaccgtcagaacccatctccatggaaagagaagaagaagaagaaacccagaaacggccgcaagaagaatcaaagaacacaaaaacaaaaactagggctttctattgaacaaacaaaccctgatccaaaaacgtaaaaaaataaaaataaaaagaagtagaatatataagagtaagaataagaagaagaggaagaacaaacaataataatagtaaaatcgataaaaaccaaaaaggaagaaaaacaacaacagggcttctagtagtagtagtagtagtaccactcatctcaatttcaacctccttcatattcctttctttttttttgcctttcttcttaattaaaatcttgtttttttttgttgtaaatgaaaagaaaaaaaaaatcgaaacttgaggattctacagcgaatcgcgtgcttatgtgtgtttctgccgttgatgtgtttatcaaagctttttttctttttattatataaatcaagttaatttaaaactaaattaatacaacaactcttgaagggctttaacgtgcttttggtctcgtgttcgtgttgttgtctttcagatccgcaggctggttgcatgattatcatatcccccagattttttttttgaggaaccacttgtgttgagagtaaacatcttgccctttattgttttcaagtgtacagtccttgtcgtttttaaaaccggttcaatacttcaattcagattttttaatcccggtttactcgccgtccctatgaatcacagaggaatcgaaagaacctttacgaggaagctttgactcgaaatctctctgaagaagaagaggagagacgaaactgttggcttagtttccgacgccgggaacgtcggaactccggtgaacagagaatggggctgcatttggctgctctgtttttcatcatttcaccactcttcgttttctcctctcaagtccagcagcagatcggttctaatcagaacttgatcaatgatctggactcagctaagctcagaatatctcaattgggtaaagtttgtttctttttgttcgtggtggttttgggttgaaccaccaaggcttctcttttttctttttctttttgctaattgtattgttttgtttgctgggaatcgattggctctgatcgtgtagaagctgttcttgaggcgacaatacagaagttggatggtaagaccctttacttgaaagagcgtgagaagttgatccaagttgctgaaactcagatccttgatttgcagtctgcttcatacattgacaaggttggtttggttctctaaggagaatgtattgaacatttagttatgttaagtagaattagctaaaaggctttaaaaatttcctctgctgatgagggaatgaatgtggtaggacactcattagatcgtatgtgctagtctgaggctctcctatgataccccctttctgaataatgtttacttgagaaaactcaatgccctattgagcttaatcattatagttgtagctgccacttctgtatagttgccacacctttgttgtaggatgtctaagtattggtgatacgaaaacttgcctggttgtatgataagtactcggctcgtaatgttttatccctcttctagttgtatttgaatcagtttataaacccttagaagattgtactgagtttgattatgttgctgctcttgaagtagggtctttgtttcttctgtttggagctagtttcttatctgaaatgtatattgtgccatcactttatcatggtagttgcattgctaacacttgttatttgatctcagagcggcttacctttggttcaaaagaggataagcgagttagaagaagaggtctgttcagtcatgtggctattctattctttagactagttctcaaaatgtttttttctattggtttatttcccaaattgtgttctgccaatgctggagctacttattcttcaactccactaatctaaagaacagggttggcaatggtaggtgaaacttctatgggctgccttgagaacaaccaacttcgagctacacgttttagaggataaagcaagagaagctaagaataaacttaaagctaaggctttggaagttgaacaggtgattattggcttttcttacttcacccattcctttaatcttctatccaaagcagaaattattaactattcttggtagttcagaatcatctctaagttcacttcagtttaatttctacaaaaattttgatagattcctttaaactttgaatatatatgtttggatctcagagaaccaacataaatcggcataaaacttgttgttgttaggtatttaagcatctattaatctatgtaactaaatttgttatgtgtagtaccaaattaccccacttttgtttggttttgtccttgtcttgtttttgtttgtccctttgatgtggtagcaaatgaaatctgtctgtttctgatatgtttgtatgaaaatgagttttagattgttgctgtcaccaaatgcttcaagctcttttggcactgacctacttcctttatcatttttagatgacagaagttgttacggagcagtggattcaggttcaacatcttgagcaggtttttaatttttgcctttaagtttctttcgcttaatgcagttgaatcttgtgagttgtgaccaagtggggtataaattcacgtcactgatgattgttcctattgcatcttgaagatgagagaattcaataaccgaaggcatcacacacctagcagatgcccgttcgtgaaggtaaatttcaaatccagctgtggactcccagtgatatgaaatctgaggaatagacaattaaaccgtcgtttaataatctcatagcctctcatttctcctttgtgtatctgtatttagctcatgagcgatatccaaagaaaacatctgcccaaagttgatgaagcatttgacattcactggaagggaaagaaggttctctctgtgcaaccgtatctcacaaaagccctgtcacagttaaaaagcctctgggcagctgttaccaaatatcaccaccaggttttgtttcagataatcacatttcacaatctccagtatttagatcgaatgaatctgtaaccgcgctttgctttgattctttatagttgcaaggcttcatcgagcatgagatggaaagaaccgagatcacagcggctctcgcaaacagagaagtggtgtttttcatggtatgtcagttcatatttttcagagcttgtagatggtttaaatcaatgtttgatttgtctgatccttaatcacatctgattaaaaatgaaatctccaggcatctgcactaattaccttcccagtgtttggagcatggatgttactctcttcctagtttggtttctggatgacatgttcaaccgatgcatcagcaatgttcagattggttttgcttctcattgctcaagaaattgtctagttttaagctttgagatccgtaggataatcctagtaggatcaattacatccgtgaacaaaccaaaatccggttactctgtggtttaaagtttaaaccagttattatggggcaaggtgcacagttgtatccaagttcaattgttggaaattgaatttgttattgaaaaaagagacaaaaccaaagacatgcagacaaaagtcaagtccttgttcgttgttttaccgttagatgtttgtcgtaagtaggagtagcctttgtatggtttaacgtgagatgattttactacatgtagtgtagtgaaagtttatatatacaagaccacattattggaaaatgaaagttattttactaacaaacaaattccttacacattctcacattctctctgcaagaaattcagaaattccatattgtagtacaatagattgagatcagtcattcatttttagtgtgaagctaatcaaagatcaacctctcttcaggataatgtaggacaataggttgagatcactcattcattattattatcttggtttagtttatacattttcagcataattttcttaactagttgtttggaagtttgatctttttcattatctaataaaatgagatgaccaaaaaacaaaaaaaacaaaaaatcttaatataactagttgttattgtagcatggaaaactacattttagtatgtatcccttaaattacaataagtcgagattgttgatgcaatggtcctacaaagtacaaagctcgactactcccaccacacgacctctcttttgtcggtcccattccgctagtcacgccacaaaatctccccaacactttcgagtttttgtctttgattgattgaattaacctcttttttttttggtcaaaccattattagtaaatcttccactttgtttttttcttttaccctttttattgaatttggtacttttattttcatcatatccttcttttatttgtttttaaaaaatgatacaatacatgctttcttagttatttcaatttcaaagaaggaaacatgcactttattcttctcatttatgttgggaaatccttttagcttttaaaatggttgataagctctttgtatgtctctacgtctgaaaacgtgaaaatacctactctctcatactcatccccgcaaattactcaatgttgcttgacattataacttaataacatttgtctctttttctccttttctgttgacaatttttttgtttgctttttctataaatcctagtatattttgttcatatatgttatctactacatgggaatctaattcaaaaaacaaaattcgatatttttaatactttttttttaagtgcatatcttagattgtagatgtattatgaggaaagaataagatacatgaggacatatagagtcaagaaatttaatcactgacaatagagactagagagattagtggcttagggtcacatgatatgtgtattggtgtctccatagtgatcagtgggattggggcaattcccactaaccctccctcaatcctcgcattattactcgcctctcaattcctccctctttgttttctttttaatatcctattttctttctccttttttggacatagtgaaaccacaccaaagagcaacgacgacaaagttttagtttacaacgatggttcatgttttgatggctcattcgccctggcttcttgtgttaagttatattgagacagtgaaacaaaaattcacatagtaacttcagatatcaatgttgatcggaccaaataccccaaaatctattattcttgtttgctcgtattataaagcaagaatgattacgagtagtacatgatgataaagattactgaatttactggtgcatttcaaatcagctttatataagtgtggttttgtctgaccatccgaaataatcaaatactataagtttgcttgaagatcgggaaagttggagacatatactataaagtgatttttacataagaaagcatctcgaggctattcaatgatcaacatgacactgttatgtcgatttgttaggggtaaaattaggaagaataatgtttataaacaacacacatttttctagcttctccatgttttctcggaatactaacaaaatgttttcttttatttattttaactatgattaattaaggtacttaattaaaataagtaattttggacgagatgtatcttccaactaatgctaccaatatgaaaacttttatgataggacttgaattttggttccaactcctaagctgctaagcaacaatgagtgtgacagtatgatacggatgaatgggaaaactacaaaagccttatctgttcctagtccatatttgttgtgtttccaacaagactactaaaatacgatccatgttctcatctcaaataaactagtcgataattgtaatttggtaaagttaacaaaccaaaaggatggttaataacctttttctgataaactaatcttataggcgagaaagctgagctacctctttgaaaaatcatctcatcctaatggacccaccatcaaccattatcacctatccagtccccatttccacctaacgacttcaaattaaaacacattaaaaaaagtccacaatttctaaagaaaaaaaggtaaaagaagaaagaaaaagaagccacagagcttagaatctttcaatatatataagctcacactagctctcaataaacccacaatatctaattgtctcttctcttctctctatcacactactactactcacatcatggctttctccactagaggctccctcttattcttcttcactacacttgttcttctctccacccaaatccatgcaagagacagttacttctttggaaaattccacagagaatcccccaaagatcaaaaccctaacagtttcatccctcttgagactagcgagaaaaccacagtagaagaatccgtcctcaacaagaaagagcaagaacaagatcctacctttgtccccgagtccggaaacgggtatggcttgtatggtcacgagaccacatacaacaacaacaacgacaacaaagaagagttcaacaacaacaacaagaacgatgaaaaagtcaacagcaagactttctccactccaagcctgagcgagaccgaagagtctttcaacaactacgaggaaaattacccgaagaagacagagaactacggcactaaaggttataacaatgaggagttcaacaacaacaacaacaagtacgatgcaaacttcaaggaagagttcaacaacaacaagtacgatgaaaattacgccaaggaagagttcaacaacaacaacaacaacaacaactacaactacaagtacgatgaaaacgttaaggaagagtctttccccgagaacaatgaagacaacaagaaaaacgtctacaactctaacgcttacgggacagagttagaacgtgaaacaccgtacaaaggttacagccacaacttggagagacaaggcatgagtgacacaaggttcatggagaaaggtagctactactacgacctttacaacgacagaaaccacggccattactaccggaagtcacacagtaaaagccccgccggttactattcttctcccgcgaccgagactaactacgaacagcaatcgtactcgtacggaaacaacaacgaggagaacagttttaaggatccgtacaactccaagtgggagaagaacttgatgaacgaacagcctgaagagtttgttgaggagcaaggcactaatcagttcaagccttgatgaagattgttatttgatttcctctcaagactactacactcttaaaagtactttcttttatttcaaactaagttatattacttatcgttgtttagtcaaactaaatcgttgttatcattgaaaaacttaaaagtgaaaacaaaaacaaaaaagagaaaggagtttttttttttttttagttaatcggtgggtttgcttttctatgggtttttgaactttgatgtttgcgtttgcatatattattcggtgaaagaaagatagtttatatatatggtgctactttatgttattattctcttatgttaatttaatcactttttggttatattgtaaaagataatttagataaagactgtatggatctcccattattaaaatgggaccaaacgtgactgcttacaatgatttataatgggggacatgaagatgcctcttcctccttgcgtaagtgcaaaagagaaagtaataattacttgcacaacaactatttaatcttatggatctagaaacatatattactccacttgattaaatcgaaatgttgtcgaagccacaaaaatcttctcaaacatgtgccttaatgttagctataatctcagccttgagatggatacattaagcctttgttacattcaatcgcgtttcttgctttcttggcatcaataggagggaaaatctgttctctgtacattcgtttattgaaaaatagtaaacaataagaagtttagtgtaattggtggtaatatgggtggaaaagactaacagaaacgccgggacaagtaaaagacaacgacacttccaaagcacttagcaataagaatccattctcgagtcttttacgaggaaaagaagagtccccattccgttaatcacggccaacataaaggacaaactaaaaacctcttttctcctttcctggatttattcaccttttctaaaatatattttaaaatcattacatgaatattaatatattaccaccatgccgagaaactattttaatttatttaccttttctataaataaatattttttttgttaactattttttatcataatgtttactagctatttttctcaatattccggtaaaaccaattaatgtagaagaaaactagaaattacggatttgacacgtgtcacttatccgcagcaagcaacagtttcacagagcttcctgtaggtgcagctgcatcagatccctcccttacgcaaaaccctacgcaaaagccctaaactctctcttctccaaaaattgaacaaaaaaataaaacaaatccaaagatcctacacgtccaatgtccgccgcaaggtccgtgttccgctccgccgcaagccgagcatcgtccaccgcatttagattctccgccggacccaagcctatgccgtcatcggcacggaccgcgtttcggatgcctaaacagagtcctctaacaaatcgcattttcaggtatatcttcttaacactgatttggtctcttagttcgttttattctccgttctgaaattgttttggttttgcgaattttgtttggaatgaaagatctccggtagaactaagctgttgcgtggagacgatgctcccttaccacactgccactgcttccgctttgctcaattcaatgctctcagtttcacgccgtggttggatcgttgatggtacttcactctcttctcattgcttattattctctatattgtttagtttcttgatgatagaataaagtttacatgcttagttgtctggtaaatgaaatgcacaaacaaaaatgcttaaagacaaatgtgtttcattttttcgataggtctcttgattgaattgaattgaattgttaccgagtttgatttgatttgagtgtttagtgtagtctttcgtgtgcatgttttagtggagagcttgctaagaagaaacctctttgttgttgaagatgtcaatcatagtaggattattgattagacaaaatgtctgcattcttaagtttgttgcataatagtggtaaactggtaatgatcatatgcttgtggatctccccacattacggttgttgttgttatgggctaggtttagagttgctctgttttacatagaaagttaaaacaagatcttaactttatttagtgtagtgaatgtggattttttatgtgttcatttattcaattaattctaaacttctctggcatctctcagttttcattatgtgtgcattgttgattgggaggtagctctattaggctttttctttcctgaactcaaatttttttggatcctgagttttgagtttctcgtgcaattgtgttattgaactttccttatgcatggtttgtcccagtattaagttcttaggtatatgcccttaagattttggtttttacgaacagaagtcattttttacagatctttttggcatctagaatactccacctctaaataattggacagtctaggaaaacatactactctaatagaaaaatcctttagcagagtctgtcctgtgtcatctttttgtacatatctttacccagttaaatccaatgtcttgaatccattgagaaaaaatcaattttttttgctttgtagggctagacgagactagatgaagatccatcaacaaaagtgatgtgagtcaatcaatttatcttctggtcttggagttgggtctttttactggatttgccatcatggttatagagtttttctatatggatacataagcgatcgtttcttagaaagatgggtcatttgtagttgattctctgcgatagtgtggtctttgttaatgcggtcaaatatgcttgaaatattgacatactgctatattttctgaatatcttggactagaacacttgtcatcagcataagaaccacactgatacaaaaaattggtattcactcagattgcaatgatgatgtatgatgaattactggggagaggtcagcgatgcatgcagtctaagacaaggtggtgctgaaatgagacttttcttttgggtttcttgaacttgatcttagggcagtttgccattagaagtgataataattgagttacgtctctaggcaattttcttttgtttttgttttagctcgataaatgagtcgaaagtttctaatgtagtgtctgtatcgtttgttttctggtgttgtagatggatgactcttgttctcaccattgcagtaagcaggaagattttcttaagagttctaagaccccttttgttgattcttaaaccatatctgcaaatgttttaactattttactttataaatataaaagtgaatcagttttcatgggttcttacatcgaatcgccttctattgtagctcgtatgcatttggaattggaactattttctgattcttttaaaattgaagggagattatgttccaaaattgaatacagcaagcagctagattttgactttcatactattatgtatttaaatcggaaaccagaattatggtttgaagaacaagaagaagaagaagaaataacaccacaaaggagccagaagtcaaagcctgaacatcacacgtggccagcgtagtagtccacacgactgttgcaactgctgaatttagtaaccaatttgattccttgacttcagtgactcgggaacgaacgagtcttaaatttggaaataaagaatcattttccaaaattggaagcaagatctccgtatatgtcagtttcgatgatccactttttgtgggagtacatgtgtgcacagattttatattggattataacaatacacgaataaaaatctttgaattacctattatcatccttgttcccgcttggtctcatccctaaagaggctctagattctacacataagaccaaatacattttcgtaggagacaaaatgtagattatgtatgctcatctctaactacagtatactaggaatgctcgggccaatgataatattgatatgttaatttgtgcttattattgtacatctaaaagaaatcttgtgtgtttggcttagcttaaaagttaaaatatgtaatattttggttatcttttgtatagtcacacattttgaacatgcccgaaaaccagcatgagagtttagaaaattcgaattagctacgttttttttttttttgtttcaatcatccaccaagatatccggcgatgaatcttcctataaaataccaataattgatacatgcaaaatcttaatttctaaaagtgtatcattataacaaactaacaatacattgaggcggaaataattttagaaaatcatatcaaacttttaaggaaatgaatgattacacacattcactcatgcacagatacacacacgtaaaaacgttaattgcaaattaaataattgagcaactttgaaattaaagcaactttgatttcatgatttgttttcacaccatacctttctcttgctttcttgcaccaaagctgttcaacagtaacctcacccttcttcttcaaaaacttcaatcatgttccattctctttctctctctctaaatctctcccatgggttatctctcttgcaacggcgaatccgccgtcgcaatctgcgatacttataactggaatcctcgtcgacgatctaaagtaccggagaaacgtcatcctcctaagcttcgggttttcaactacgacgaactcgccgtcgctactaacggcttctccgccaataacttcctcggaaaaggaagtcacggcagagtttacaaagcagttctcgacgacggaaagcttctcgccgccgtcaagagaacaacaatcaccactaccgttggtaataacaataacaacgtgagtcaggtagacaatgagatcgagattctttcacgggttcgtcaccgttggatggtcaacttaatcggttactgcgttgaccaccggaggaaaacaaagctgttagtcgtcgagtacatgcctaacggtacgcttcacgatcagttacattctcgtagttcgttagattcacggttaagtagttggaatcggagaattaaacacgcgcttcagatcgcgattgctgtccacgctcttcacaccgcagagactcaagtgatccaccgtgacattaaatcgtgtaacgttttaatagacggtgacggtaacgctaggttagctgatttcggattagcattgatcggaaacgttgacgatgagcgtttgaaatatactccgccggcgggtacgttgggatatttagatccgtcgtacttagcaccggcggacttgacggctaagagcgatgttttcagctttgggatattgttgttggagattattagtggtagagaagccattgatttgaattatagtccgtcgtgtatcgttgattgggcggtgccgcttatcaaacgcggcgattacgacgcgatttgtgatttgaagattaagaaccgtccttattacgccgtgattcggaagttggccgttatggcggctaggtgtgttagatcgacggcgaagaaacgtccagatatgttagaggttgttgagtgtttgaaaacggtgaggcagttatctccggcgtggaataaactgcggcggaggagtgaagagagatcggaaaatgttttggcggttgaggaagagaaggaagagattcatgtgaggattgtgagaggaggaagcaggaagaatcggaaggtatcgaacgtgacgacgagtgtggatgatgtttacgagagattagttccggaggaaacgctgccgtttcgtcgtcggaattttgtgctgagatcgagatcagtaggagcgaaagttggaccggatccatacgacgggtttggtgatgagacggtggttacaatgagattacttattgagaaagaaagaccggtgacgacggcagcgatgaggctgagtaagtcgaggtcggtggggattgtacgtagtcataaaacggcgtcgcggaagagatactgacatgttaactaaaagtcagcattttgacaggctatttgtttgaccgttgcctgttttgttttccacttttttctttctatttttgtttttttctgtctcatgtgtttgtctttttttattgagttgatattttggtttttgttttgttttggttgttgtattgaataaaattttgtgtttgctacgaatttttcaaagtaattactgaaaaagtttttaaaaagtcagaaaggggaatggaatagactacttgaagtcttgaacattgtaaagttgcatagaaaaatgagagctgaatctttcctttaaaaggttttgtcaaagatgatgaagttggtctttaactaaaattttcatgaatctttttggtccagtttgtctcctctctcgcattaaaaaggacagaatgtgtggagtttcgaagccattgttatcgaagaagatttaaagcaacaaggaacgatggtacttttgtgattcattgaacttttttaaggagaacaaaaatgaaactggttcaatttcatccaaatatgttctacacgaatacatatatactatatgtaaaattcaacaatatcatatacaacgaaacatttacatcaacagataaataaatttgttcacaacccaaaaacaactgattaaagctaatcacaaactgaaatctgtcaaaatccaacacgcacactacacttgtgttctctacttagacacccctccctgtcatttggaactgaataaatgaatctctcagaccagtgagtcttccgatatgacagtgagcagagagtatttagctttgattgagatcttgcctgcctcaacacaaagtttagcaccagtcacaacccaatatccaggttgttcctctggacctctcatcacttccttcgtgtctacaagactcagcaactttggtttcacaggcggtgatggccctctaggatacactgcagagtttatatcaatcttagactgtggcttagttgttgccgggtttggacttaatcccgtgcttagtcttgtactgatcatcgagaaaacaccggatttgcgcgagtttgttgaaagattgtcccagcacgatttacgtgtaacagctgaagcatctagtgagaaaccgagcctcaagaagagaactttcctcatccccattcctttcacttctaaccaggctttggttacaatagaggcggtgtcatcagaccgtgctccgttgtactgaactgggtaggtgcaaacgtgtgagaatattccccatttcacaggtacataataccctttttcaactggttcctcgatgggttcataggtgtcatcgtgtgagagatggagacttggaggacatgcagagaggtgctgcaaatgtattgctagatgatttcctttctttccctcaaggaagaagcgtagtccggttactggtcgctcacctgaatcaacctacacaacagttttcaaaaaattggaaagtgtaaacttagcaaagggttatcatttacatggatcaatgtgaaaaacaaatgtacctttgatgtgttgacgtatagttttggacccatcaaagagaactgaagggatggagaactttgtttcgagcggcgtagtccaagagggagatctccatacactggagcccattggcgtggaagttgaaactcaagaaactgatgcaactcttctataggtggcttatctacaacattttaaacaaccttgttacctgaatgaaccgttgagtacctaagatacaaaagccaaaaaagaacaaaatactcacatcggaggtataagttcactgcatgactaagaaatcctgttcctgggagaccgctcaagagtgaagttataggaacaaaacacatcgatataacgttgggtgcttgtgatactgttgagagccatcgttcatgactttgccccagatcaacacctcctcttctgatacaaaccctcataatctcctggagatgcaaatacacaattattttaagcttaaaaagaaaacccatttgactcactgcatcaatagtaagaaatagcgaacctcgttcttggtatgcatgacaacagcagagctaaccgaggtaccaaacggttgaagtccccattgtagaagattctcctcctgcagaaccattaaaaacatgtcaagctacattgtgatttgaacacaacgacactgatagctagaccccgactactagactctttacctttggcttccctgaataaacagaagcaggagatttactttcaacaggatcaacacaaaatctttcatcaccccaatgcttcaacattttctgaatttcctcaggctcatgattcgatttacgcatctgtttcacatgaatgacatctttacctcccatagtcactccaacaacaacatgagtaccatatttctcaataaacctataaaaaaaacaaaaattcaatctcactcattaacataaactccaaatcacacttaaaaactttctaagtgaatcatcaaaaccatacccagcaagtgcagcagagtcccaagaagaaggaacctcacgtttcacttcatcacgtagtgtcaactgcttcctaacaatctctacactatacaaactaataaaccaaccatcataagctaaagtcttaacagagctcgcatcttttggccaacatttactaaacgcaaacatattattaaacatccctgacggaatcttcccggagagacacatatcttgattaaacttctccgacatctacacaaaaacaaaaaaaacacactcaaaaattagggtttctaaaaacgaaaaacacgaatctcagtggattatttagattttaactaaaaaacctgattaaaagagagtatatcggagcgtaatcgagtacgttcgcctttatcgcacttaatcgagctcgagacgttgttaacgacgataccaccggggaagattaagtcacggttccgagtcgggtcgatttcgactaacctggaaccgtcgggtgtggttttacaagcggagaaacgaacatcggagcagagatcgtaacctaatccgattacagagacggctttctcggcggcggagtgagcatcgaggcgggtgaaattgttaaaggccatggatcggagagagacgatgatgaggaggaaaattcaaaagattgtggctgtgtgtggtggtgaagaagaagagaagcgcgaaggtattgaagtggtcaacggtgtatggctcaaagtgaaatactttaagaatagttttggaaagaaaatcgttaaaacattatttagtcaacacgccattactttgactttacggctaaaattatgtttgaatttcggatatggaattatatagtgtgaatgtgaatgattttaatgtgacaaaaggaattataatattttattacctaatttgtcttaatgttgttttagtagcaagtagattactgattttttttttaagtttgttagaggacacttaggcagttaattaggctgatgatatttgactaggactatgtaaaatcagcagatttgttttgtagttttttgtccaatttctaacactaacgaagtttatggttattgtctagtgtgatgtctactgttctaattaattataattttcttagttatgattttatcaattatatcatctagtacaatttctttgaaaaaatcagcttgtgtcactcatattagtgttttatttaacctcatactaatgtgttcaattatctaaatcattatcaaactctatttatttatttttgaatgaactctaaatttagttttatgtcttttatcttttaagaactgagagatctggattaatttcgagttgtcatttaatgtatactcaatgctcaccacaattttttttatataaaaaaactcgaattaaactcattcttattaatccttcaatcactagacagtctagactgagttgttaaaatgaagtcttatttagatttaacctattttcttaggaaatttagatgtgcccaccaccaaaatgatatataatttgaatcaagatctgcaaatatgattttccctaatataaacttctggcggatgtcatgaagacttgataccaaaacatgtaacatgaaactttctttggtagacttttctcataatgtaaggctgtgagacgttacatcatcgactttaatatttatttccatgtaagattttgtcatataacccttcatatgttcgttttgtttgtgtaattgggtgtcaaccacactacagttggtatatatagcaacgagacttcttacacgttgttcgtcgcatgttactgtgtgattgacaaagttgcggcgtcggaccaaatatagtaggattttacatatatttctataaagtttggatctcaaattcgactgaaaaatgtggttgaaaacaatataaaaacacatgaatttctactagttaagtttgttgtgattaagagttatcaatctttggcttcttcaatatttactgtaaacaaatgtaacttgtcatcggatgaatagtggatctgagaaatttggcttcacatcaaaacaatgtatacatacatacccttattcaacaacttatagttagaagatgtatataatcaaacgtttactaaagtaattatttgagtattgataagtatttaaacgatgttaattggatgaatttaaagaaattatatcagttttatagatacatctagagatatcaatgcaatttgaatttttgtatttaatattaacaaggaaaaaatactctacgatgctatgaaacattttgttaagaaaatcacctaaaatatatttcaataaaattcctaacgtgtggttgaacccgaaaagcatgtgtaagacttgaagaaaagtcaccataccaagttgatcttttgaattctatgtctcgtgttcaaattacccaagaatttttggttatgaagcgtttccttttgactcgtgttcaaatttatgtttcggaaaatgctaaggaagataacaaatcctttgttagttttagtcatagctactttatgctccatgttttttcataaaaatatttcatgaactcaatcttttctcataactgaatacatgccaatgttgtaaagattatatatatactacacatacatggtttatctagagagtggaacaagatgtgtatatatataactatttgtatctactacaaaacataaacaatgacattattcatatgcagtaagtacctacacaagctttaatcagcactaccttatttatacaacacccatatgtcaaaagttttacctgtaagtagcaaagttgaagaacatccaatccaacatatcttccggtttcatttcggcttcttatgtctctgtattggacctagactgccatgaggaactggcccgggataaggaaaacctcctccgtaaaccgggcttgggttccaaaacccataatcgccatacaactttggtaaaaagctcttggatttcaccctaaacgaaggatctaaatctagagatggagatttgttcgtagagatagaaggtcttgccattacggtcgagaaaatgacgataacgaaggtagttatgagaaccatagacatgttagaaacatgaagacgcataatctccaaaactcttacgatctgcatgatgctcctacttattttgagctatttaaaaacagattacataaaggattacagctcatatcttgttaaattaatgtttttgtataattatgaaactagcttgttttatatcaaacgtataatgtaattaagataatgcctttgaggattcaatagttgtttgtttatcacacgtcttatgaatgataaagatcatgagggttgcatgtacttggttgtttatacactaggaaacgaaatcagttggctattgattctcaaaaatagatcaaggcccagtagtatggtaaggcccaaatattatgctgacttggggcatggtttgttttcacacaatattgaaactatagtttacaatgataccatcatttgatttcataacaaatcaaatttaacatagtgaaatcaaatttaacagagattccaaattattattatcatttcataacaaatcaaatttaacataagttctatccccaaaaagaacaatcggaccataaaagcattaacaactacaaattattttgaatttataagagcaaaaaatattcttcagacgcattaaagctttaactgtccattttctataagaaacaaaatgagatgtttttgaagtaaatttagtttttaaaaaaaaagagtttcatgattcataatattaatataacatgtgttttaaatgatttattttagttataaccatatgatccgtaccgaataaatgagatttagtcaacgacggacacgctttgatccaaatgtccccatcttgaccacacgaaaagatccgaagtctcctcctttgttatattcccggcaagttcaataatttagttggccttaattgtgatttttaatttgtaaagatactttataacacatgtgagtttcattcatgcatcaaacccactgttttgtgcccaacctgaaccgttaaccttgtattagtattatatgccactgttatgattaataccacaccaagactatccgtattagttatgattaaaaaacattcagcgcgtaagacgtaattacatatctaatttggaatagtaagttgtccaaaagaaatgaatccgatcgaccaatgagaatgatacgattaccgtgtgtaatgtggggcctatgtatggatatttttttatttctatttttagttacaagctctttcacaagaaagaaaaataaaaggattttattagctatatgaactattagaaattttgtttgttaatttcataagataaatatatttgatatttttataagtagttatagtttgcagtctttattctctatgttacttgctatgtgtttactattcaattaaaacattttaactagtgatttttttttttcatcacctagtgatttgttttggtcctagtgatgatctttttggtgaaaactattgcataaattagtttccggtagtccgaccgattttcgatttaaatgcttgatactcattaatacccctggaaaagaaaatatgtttctatgaagaccaagtagttatggtccattcacctcaaagtccaaaatgcaattaaataatgtgaaattgtgaggagaagaatctatcaaactttgaaatcaaggtggagcaaatgcattgcatctgaaatgtgggcaatcctggaaaaaggtaacattatcccatttttatattttaaacattagtatcagtattagtattatagtattttatacttcgattaactatgtaaaatatgattctcatcagtgtttgttctccgacaattttgcagccatctgtctttggtttcaacccgatctttctgttttatggtctatacaatgtgtgcattgtttattttgttgttgtcaaaatgtgtctgttttaagtaacacataagtaagtaatcattctttgttttaaaaaaaaaatacatatatttgtttttaagatatggtttaattgttctaccaattattgagcgtaaaggctgcatgtgtgcttcgtcaagccatccgcagccgcatgtgagaccagtttaagtatttgcagtatttgcaatattggctacgattttctgtttttttggaagaagaagagttttcaaaaaaaatattttcgttttgaatcatcaatataaacacatagttaaatttgggtgaatattttaaaaagataaacaccaacctaaatttatgaatagctacgcaacctcaacttcgtttaccaagctatgaaaaaaatagaattaaacaatttggaggactaattctttaaatagaacttgttagaatatattatgatttgtttgtgtatatctatactttttttaattgtatatttactcaaataagatctttctcaattcagtcataccatctagaatgacaaaagattctttcatcttacatggtattaaaatcctttgatctttaaattctataaattacagcgctgtcttttttctttgctatgccgctgctgcctaaacaaaacaccaccaccatcatatctataataaattaaaatttataataaaaacaacttaaaattaatctgataaaaaaacaaattaacaaatatcatggttggaatatgtttgttttctttcgtatcgtttgctttatcagtaaacaaataattgatttttaccattcgcgttagtagttattaaatatttgataagattattgtgacggcaaattttattggaatatataaataaacatattaaattttaaatttaacataatactatatataacgatattattatattttcagcttattaaaatagttataaatttttaaatggttagatttatatttactgtgttatatatagtgttaacatatcattcataaatatgatgtaaaaatatatgattgtattaaaatttgaaatattttctctcgtgacagcttgccaactatcaataattaggaagataagtaattgtatacagtatttgttttctttactactcaatacatgataaatttttaatacttaaagttatatataatttcatttaataataattatttcaattgataattaaataataacacatgtcatatgtttgttaatttatatatatagagaaacattggtatgcaactctccatatctttacttatatttgtatttgaggataaaatttgtttgaaataattactatgttgataaatttatgatatttataagaacattaggaaagtttctttttgaaaataagcaactgattcaattttgtatcaaatcatacacttaaaattatctcttttaaaaaccagatttaaaaaataataattagatgaaaatatagttttttttgtcagaaatataaattataatttgagaatgtcattaacgaatcatttctagtaataataaatatattttttttaatttttctataaaatcaattgaaagttgttttcatcaccataagtcaattgaaagttgttttcctatttctttatttttaataagaaaataagaataaataataaaaacactctgaagtatatttttccaaaacaaaaaatcaaaatatgacaagcaatatacaataaaaaaagaagcaaaacatatttttatttttatttttttatagcaaaatataaattgtttccatgcaaagcctaaaattaaaaacggtagacccatataaactcaataataactactactttttatcctttcctctaaaaaataaaagatgacaacatacttaatctcggattttagtaacaaataattaaacagatatacatatcaaaattaaactcgcatttaatcaaaaataacagatctaaaatcattatcacacatcgtgtctgtttacagtttgctaaccaatagaagcagacaacacaagtcaacacgtgtcaagcaagcgcgtgggctcctcaccacacgcaatatatagaaaatccaaataaaatcaatcaaaaaattaacaaactataaaaaaaaaacattaatatcaacataataaataaaaacatttaagaaaataaccactaaatagataaaatgtcttttagtaataagaaaaaaaaaaaaaaaaaagcttcttcactctcactttcctctttcgtggagacaaaaaaaagaagccacgtaatatggatttaattaccaaaactgccactcggccgcccctttgttgacttatatttgtcgtctcctccttataaatgatgtcctcacaaacttcttcacataacaaactcatcaaacttcctcagcgtttctttttcttacataaacaatttttcttacataaacaaatcttgttgtttgttgttgtcatggcaccgacagttaaaacggcggccgtcaaaaccaacgaaggtaacggagtccgttacagaggagtgaggaagagaccatggggacgttacgcagccgagatcagagatcctttcaagaagtcacgtgtctggctcggtactttcgacactcctgaagaagccgctcgtgcctacgacaaacgtgctattgagtttcgtggagctaaagccaaaaccaacttcccttgttacaacatcaacgcccactgcttgagtttgacacagagcctgagccagagcagcaccgtggaatcatcgtttcctaatctcaacctcggatctgactctgttagttcgagattcccttttcctaagattcaggttaaggctgggatgatggtgttcgatgaaaggagtgaatcggattcttcgtcggtggtgatggatgtcgttagatatgaaggacgacgtgtggttttggacttggatcttaatttccctcctccacctgagaactgattaagatttaattatgattattagatataattaaatgtttctgaattgagtattatttgatcatcatctaagtagaagctttaagtttaagtggtgccaataatttttttttttttttttggtcatcagcagatagttttaaagaattttttagtgttgagatcgtgtttcgttcagatctgctgatgttcttttaaatatcattaatgataatcctgatcaactaaaatgatactttgttttggtattaatctctctgatgaacatataaggttgttgatcttatgttttttacctatatccaattggatttgaggaaatagtaggattcttaattatttttttaataaacaaatataatggagataatactttattcaggataatgagattattggtcaaatataaaatttgctgttttgaacaaaagcaataataagttatcttgctcgaatcaaggaacacaagctaggacaagaagctctaacttttctttgtaaaattgttaaacataacggcattagttgtaagaacgctaattttttttttttttttaatttatatatatatatatatttttaataaattatagataagcaatctataatttatattatattcaaaaactaaaataataagttatcgttttgttgtattgtttcttgttgttatggaaagtggcattcgtagatatcttatgttaatcgttgttttaagaaaaatatagattgtttatctaaattgtatttgggtgtagtctataccgtgtataacacactatttttttttttcgttaaaactcaatttacctgaatttttttttttttttaattaagatgaaattttgtatatcgataacttatatgatcatttcttatttaattttcatttttgccaatatggaaaatgaattgtacggttttcattcttagattataatatttgttatcttttctatatatgaatgtacgattttttatatgcgaatgtattttaacttatcattgaccaaaagtctattatagaaaaataaaacatagatattgtgtcttttaatatatctaaataaagagaaagtcatttatacatgtatagttacttatttctcctaacccataatttttcttttggacaaactcctaaccgatagtttatacacgttttggtaggaactataaataggtcgagtcgtcgagaggttagccatctttcagatactaatctttggatttcctctttattctatatcagtttggggaatggaaacttgttggggaaagcctgacattagatagaggcggtagtctcattgctaaaaacataacgtctgattatcggctgcaatcctatatggatactggccatttcttatggttaaatgttatgttctgcaatgagagagttttgtcctctatgtgagtatcaatttttttggcttgagagattcatagggagccttattttttgtactggccagagaaagcttgtatggtcgatttgtatgggtgaagttaagagtagtgtagcatctaactgtcttttgtataagtcggatcaataatggcaaaatgttagatgaatacagtagtccatgagtataggtttgctcgatatatatctcatttccatatacatactttacctacaatatctgtatcaacgttaacaaaactgaacttggacctcgattgctaaacagcccatcaattcttttggcccaaatattaatgtttattgctccccccccaaaaaaaaagattactgtcaattgtcaacaatgtccattgcctttcaattatcttatataatataactagatttcaattagcttatataatttttttgacagaaataatcttgattttcttagcctatcagttctatatcaaatctcagaaatccttcattttgaatttgttgattctcggagatgaagaaatcaaatgggatacataaaactaacgattagttcctcttgaatttttttgagctaaaggaataatttttgaagagattagccttattacctaaattcatgggttaaataggcacacaatatactcacatagagcaaaaagttaaaaactcagaaattgtaaaccagaaaccaataatttccaaaaccgcggatagtttgttgggacttattttggacacatatcttcgaaccatttcatacacacaaaaggcattattgattataaacctcaaaaattgatggtcggccactgccgccacactttcaagaaaaatagcactaaattgttataagacttttttgtttgttttgtcaaataattatataaaccttaggtataaggtttatgaaaacgacaagagacacgcaaggaaggactaaaataaacagttaagcccatataaaaaaaaagtaatgtagcaacccaaagttttgaattgatttttcactaacacaagcgatatcatgcggcggcgcgtggggtctctttggccaatttggtaaattcagttgcaccgcagaaacacatgcagaggttcgtcgtcatagcgaacatatgtttaaattcagattatacaactggtttattaggcctaaaacataaattttttgttaggttctaaatatttcttaaattataaaatttgtcgctaaactctttttgtctttctcttgctaaaagctacatgaggtcgattacaaatcgcttatgaaatacgataaaaagaagttgcaacgaaactgttagaatttgatcttttatgaaagcaatatgcataatgcatgatctttgtttagtcaatacatatgtctaagtgtctaacacatgtaacagttctatgactgttttatagtctcataaaactacacgattccggttctacatataaaacataaacataaaatcttcacaatctgcatgaaagttttgatttcgctacgtgagatctcctttagttaattaatttgacttcttatgatatttgattatatcaaacatgtttgtttcatttactactgaaatttgcgttattttaagacttctgtagataaatttgttatgtgaatttgatatttatctatataggaccgtcaaaaattttatttattttatatttttagatgcttctatatatatatgtatacacgcataacatatataagattggtaaacatgagcagaaaaattataggacaattaaacttcctctaattttatcagaaaacttttgttcgaattcatatgaaaattttcaaaataaataaaaaaatacaatttatttacaaactcaagactcataatacacatatcttgtccgtaagtgaataagccagtccaaactcacacgcttgctcagcatttacgtctctcattagtctctatctcttttgtttgtttccttcttttctcagtccgtcttttgtcgtgatttaagagagaggcgcgtgagtcaaacaggacactagcaaagcaaacagctgcacaagtcagtccgtacttcacgacacgccatagaatacgataagatttttaaaaccccctcgaaaccgacataagcgacggtcgtaacacgatccacaaacataattagatccacgttcagacgttgttaagtttttgtgttgctaattaagaagtttcttgttttttccgcaacatatggatctcacaacaacaatcgatctccgactcttacataacgaacaaaagaaggattaaattataaaaacaagtctactaactctaacaaaagatactatttgctaaaaaaagaaactaaagtagttccaccgaaagtggtctcaaacggcgccgtatagaaaagtaggcaaaacggcgccgctatatccatctttatcgtttgttttcaaagccaaagcggcggaggctcgttgaggtcaatggctaagccacgtctcaccgtaacaggggaaggagaagaattcatcatcggaaacccaaccacttgataaccaggcgatgacgtggctgtgttaggcgaggaggtgaagtaaagcggcgcttctgtagaagagtaatctgaagttttgtcgtttagcacaccggttcggagaaaaatgcggtggtgttggtgatgatggtcggagcttggaggaacaggaggaggcgcagcgaaccagagctgttggtgttggtggggttggttatttgcggcggcggttgcggctgagggagcggaagggaggtggttgaggtcgagagagagaggagaagggaagttagttttggctttgataccacggaggaaacgagcagcgccgtcgtaagcaagagcagcttcttcgggagtgtcgaaagtgcctaaccaaaccctagttttcttccaaggatctcgtatctcagcagcgtagcgaccccaaggtctctttctgactcctctgtaatgcacctctcttgcacacgtcgttgacgccattgttagactctcaagaggggaaatatgagagaatctagagagaaagtggagaagagaagaaagaggttttgctttgttggctcgtttgacccaaatgagagagagagtgagtgagtttaaagagcaagaggtgtgtttgtagggccgcttgagaacacccgtaatcctcggcttcttttgacgattatctatctttatttgttgcctatacgtaatatatatggcaagttaatagtaaaaacaaaactgaatagtgtttgatttctaggatcgaggttttctctggggtttgcaagaatcaagcaccgttcgatcttttgctgttgggtgatgtgacggtggtatgctgagagattgttacacgtgggtgttctacaccaaaataatgttgttttaataagttgatgtatttgaaaaaatacaataggatttctcataaagtgaatacttctagtggtgagtggacttattctaggacatgaaagaaaacaatgctaatcattcctttgagtgctaatactgttttcttatctaccatttacaacttctgttatataaaaaagatttgttaggtaatggttagaaataaaatattttagttctactctccaaacaacctcattaccgttgtaacttatggtaaattaactcattacttgctagtgacgataatgccatactatgaaatttatgctattataaaaagaagatagaaagatcatttttgcataggctctccaaacattttttcataattcaagtactttgttttcgatcgtaacaatctcgatgctttttctcacagcaaccattgatacaaaatgatcaaagaaaaaagaactaaaaataaataatcttgtacatttacgaagaggaaagaaaaatgggccgcctctttgactgaacctgtggcatagggatgctgacgtaatccctagtactgataatagccatctctctctatcttttgtatctttcactctattatttgacaagtatttaaatgctctcttttggggttttattggcacccatatatatttatgatgcacgaggacaaggctacaaggagatcattaaataaagttacttgacacaactactctatctttagctctgactgattttgtttttctttttgtccaaaattcattagcccatcttatgcaaacttactatactctctagtctatactaatagagtagattacataggctctttcttttccctctaaaaagtgacgtagtttaagtctttatattgtgtaaaatatatagtaatcataggagtcaaaaatttatagcaattgaagtggcttataattttcagtaatagacaatgaattaaaacaaattagttagaggttttttgtttttgttttatcaactgaagttttattagattaatttgtcttttaacttctctatttcttgacattttgtaagatgtttttgtttggttttagggttatttaaaaataaataaaaaaatctgtgtttcctttcacgtgacaaggcttagggtctgtcgttttgattgaacaaatgcattggtccatatctaacaaaatttatacacgtgcgaactctgatgtctgacttctctctctctgacatatctaattatttaaattaaccctacctataagcacagtaaaaaaaagagagataccccaaagctatataagctactacagtactaataatcattttcaagaaatattttggagaaaaatgtgaatgtggctttcgtgttcacgtgagcctgtgatacataagagctttatgacgtgtctttgtagtagcagctaggacaaaaggagcatcgtcatcaagtggtactgactggctgcctcctacaaaaacagaacacaactcaacactcacacgaaatcatgactttgatgtctctctgcttacgtgtcttcttctcattccatgaaccccctcctcctctctccccacacctgatctgactgcactttcgcgcctcttttttgactattttgttgctttcttatctttctttttttccaggaattacttacaggtagtaacttttacgttttaccatcagctagctctttttactagtcagtgtgattcacaatttcgattagaggtaaaaaataatactggaaaattttagtttaatgctcttgtagctgtggaggtttatttttagttgacaataaatcacaaaatttgtccaactggattctaatcttcgaggctcatatctatcaaaaaacaaaaatgaactttaagagatttgttagctttcttagtaaccaccaaaatccttaggaaagctctttaactgatgtccacaaatactctctttgcttctgcaacttcacctggtgactctaaaagccttgcaaaaagaaagaaaaaaacgataagccaaaatagttagaggaatatataagcaatgggctttgatcaaaccaacggggaatagtttcttattaccttgacctgttccagtagatttttggcacgctcgttggttttaaagtgatcgcgaacaggctgagacaaaacagtaacaataagaagcatatcattcatatacataaaattaatgactcggacatcaagtaaagattgaaaagagacgagtttcatgttccatgatgattgtactgatgccagaaacttagagaagaagacgctttttaataaggattgcttgctcattgtttgttgcagagtatcgtcatttatagatggaaatgtccttacttgcagagttatattcaatgctttcatcagagctttcttcagatcctcgggatgtagctcgccggtctcgtagtcggcgacaatatcttcaaagctgttgaaggtcctgacagttaaaaagaatttcaaagatcagtctcagaagtggttatgcagataccaaatgtgatgcagaaatccaaaagttgcaagacttcattcgaactactcacttattgccgccattcttttcactttcaaccttgaactcattgaatcgtggtagaacaatgtatttgacatactcgagacatggattgccttccacagttttcggagggcaataggctttgctgatcttctcattaacatcagcctggaagacaaaagatcattacacaagtttgatatctacaaaagctctactctgttctgcaactttatagctactagtttacctcctcatcttccataaatattgcagatgatggatcacttttggacatcttttcttgtccttgttggagaccaggaagcatatctgcaaagccaataagctattaaaaacagctcaagatgatgacagcactggaaagaacagaaaatgcaaagagacatacggtgggacaagatgatgggtttatttttcctcttaatgtcagcacagtattctcttgctagcatgtttacttttcgctgatccatcccgagctggcaaatatcagcctacacaggtcaaagaacaagtatcaaatatcaataacaatcatagaagtgtatatgtattatataatccaaaactgcatttaagagtacctcaagtaagaaaatatccgcacactgcatacaggggtaaagaatttgagctgcactcagcacctcagtctcactacgtcccataatctgcccacacctgtaaggaaaggtgacatatttcattcagatccgttgtcattgcaattatacataaaccaagcattgggaattaattacctcaagattcgacgtaggttgtttctacgagcaatgtccatcacaagaggccaatacttactccccttgccatttatttcgtctgatgcccaaagaaactctactttgtcattgttcatcccacctgcttgccaaatttccttgaagtattctcctaccactctaattctctccaagtcacctcccaacttgttgttcaattgagcaaaccaatctgctatccaaattttcacttggcaaccagctgaagtcaatttgttcacattggtgaccttcataactccctgttatggaaataccaaaacgagacaagttataagaaagttctcatgcaaagaaatatatataatcaaaacagcaaaaaggctttcagttttcgcaagtaatcttctatttcaataaaagttttatctatataagtacactcatctatcctaatgaacaatcttatccttcggattataaaatccttcaaaataatcacatagaacggaacaaactattaaagctcgacaactctcaagctgcgtcttcaaccttgactaaacatttccaaagaggcttaaattatgagagaaatctcgcatcaattatgattggccactcagaatctttaagcaatataaatcaaacaaaactgaatgataaccgacctgggcgatgtgcatccttcctgatggttcaaaaccatcgtagcagataggagcaggcttcttggctagaagattcttcagctcatcctcttgtatgcattcctcaccaatactcctcacaatcttgtatttcatctcggcctcctcgctcatcctgaagtaataacgtcctaatcagctaaaccacaagtgcataacacgataggaaaacgcacaaacatattgataaaacatagtagaacttgaactagagtctgtgccttgttttcctgattaatctatctaaaatcacaggaggacactattaagcaactaaagcaagaaaatctatctccaagtttcagatacgagtcacaaagaaaccaaattaaatgagaaaacaaacattgaatactcctaagtcatttatcttctcggacactaagcaacggaacatgaaagaaattgaataggagatacagaagaaagtcaagaaaccactagaagattacttactgtaatccggcggccgaagaagatgctgatgtgttgatggaaagatcctcctcctttgtagatgaagctgttggtatgactctgacagaccaataagtacatgaatacattaggttttggttataaaaagtttcattaatgagagaagttgctaaaatattgccatctgagtatgcttcttgctccgtaatttatttacctggtgactttgtaaccctacaataacacatgataaaccaaaaaggagagaaaaattagaggttgcgtatgaatgtccaagcagtagatctataagtaactgatggtacctgaaacatgagtggaaagagatttttattaccttgacctgtttgagcagattcttggcgcggctgttggttttgaaatgatcacgaacaggctgcaatatgggtaaaaacagattaaaactatccaaaacctaaaattaatgacctaatctcctctaggaggtaatattataactgtattgttgcaacagaaggaaatacttacttgcagtatcttattcaacgcttttgacagagcgtccttcaaatcctttgggtgcaactggccgctttcatagtcagtggtgatgtcttcaaagcttttgaaggtcctgaaaaatgccattccaaaagttagtacttcgcattgctagataaactgacaaagagacatgtatactgagaaaatctgaccaaagaaatatttcatggcagccattagttagagattaaacccaggaacagaacgaaaacacagaaggtccataaaaactagaaaaactcacctgttaccaccgtacttttcatctcgctcaactgtgaattcactgaaccagggtaaaattatgtgcttgacgtattcaaggcatgggttaccttccactatatccggagggcaataagctttcttaatcttcacattaacttcagcctggaagtcaaaataacacgattaaataactatcaaaccctctctgtttttaagcttagagccgaacaagctactttacctcttcatcttccatgaagatggctgatgaaggatcactcttagacatctttttctgtccttgttgaagaccgggaagcatatctgcaatccgttagaactagagattaaaagagcccttggaaagatgcacagcagaacagatatcaaacagaaaatgtagaacatacggtgggacaagatgacaggtttgttttctctctttacgacatcacaataatctcttgctagcagattaactgtttgctgatccatcccaagctggcaaatatcagcctgcagaggttaaggaaaagtttcaacaccaatcatagaaaagttaaaaggtcgatggacttgatatagacagattggagcgccactacaaaatttcaaggatccaaagatgattaacgagagcaggggaacacttatacacgggagaaattatgacaaaatacatattaaagtacctcgaggaagaaagtatcggcacattgcatacacacatacagaatgtgagctgcactcagctcctcattttcactcaagcccataataggcatacacctgataagaccagaaacatactcatgaatgtttatcatcaccattcacatgactgcaaataaatgaaacttgggcataccgttttatttgggcgagactatttctgcaggcaatgtccatcacaagaggccagtattcatctcccttagcatttatttcatcggatgaccatagaaactctacattctcactattcatcccggctgcctgaaatatctccttaaaatattctccaaccaccctgattttcttcaaatcacctcccaacttattgttcatatatgcaaaccaatctgcaatccatattttcactcggcaaccagcagaagtcaacttgttcacattcatgatcttcatcagtccctgccaaggtaatagcagagttaaacgcgccagcagaagcttctcacttaaagaagaaagaacataaaagaattccaaagcaagctatgtgaaacaagcatatgacaagtgtaacacacctgagcgatatgcatcctccctgatggttcaaaaccgtcgtagcaaaccggagcagccttcttagccagaagatccttcagctcatcatcatgtatgcattgctcaccaacacttctaactacattgtatcttttttcgacctccttacttattctgaatcaataaaagatctaatccggtaagctgacaagtgcaaatataaactggaagattcacaaataaagtatctatctttatttttctaaggtttctacctgacaagtgatgcaaaaagagggaaatcacaaaccaaatttcgatggtgaattggagaatacaaacttaaggacgtgcctttatcactgaaatcttatctaaaacatgcggaagaaactagacaagagatcaactaataatataacaccaatattggttacattcacttcttaaatcctaggcaataaaattgcaggggagatagagagaagaaacttactgtaatccggagggcaaagtagaagcctgagttggtgcgttgatggaaagagcctccatctctgacgatgaagctgtttctgaaaatcaaaacacacacaaaaaaaatgacttaattttgaaactttatgcagaaagaagtcagagtgaagtaacaccttatcctatattctatcatctcctctctctgtatctctctctatctatattgtttggtttccaagctcttggcttttttcttttacttacaaactcacacttgttctcattgtcaccaacacataatcggttatgcaaagttggtagctttagcatataattcgatctaagctttgagtattgagatcgatttcaatctagaaactgacattggctcctaaaattgagaactcctattgaaaaacctccaaatacaacctaacaaagacagaaatcgagctgacctctgagattggtttatcgtaggcgtttgtgttcactccgtgaaaagtctgaaccctgaagatagaagaaacagagaagaagaaaccctttagaggctttgactcagatttggaagaaaatgaaatcagaaccggtttaattcggttcactacaaaaatgggagaaagaaatgagagtagaaaacgtgcagaaacatgggacaaagttattgtataagacacatgacttggagctctcttatatgattttctgctacatttttgtcatccccaaacatctttattctggttccctttgttcatttccatatattcaaggctttctcgaagatcttgaagaaagttctatgtagttatttttaatatacttggtgtagagttagagttttatggaagttgaagctgaagctgaaggcgagcttgttagcgagattcaagaaccacatcagaagcatgcttcttgaggacaaagtcctgttttgtgatcaattgatttggttctagcttctaggagatgtatccattgagtataacaactccacattcggttgttttcaactaacatgtgtaatatattgaaacgtaatttttatgttctagttatcctctaaactcccaccagacaaaagtaccaaaggactaatcccataaaaactgaacaagaaaaatcgaatcctattctatgaactggataattaaaagaacccaagaccatttacaaatgtatttcctcttggtcttcttcctgtggcgagcaatgtggtagacatgatatgaacattttgaccttgtgggggtttgggattcgtgttgctgaaaaaacccaaagaagattgaaagaagtgactcaagacaacaagctcggtccattttccacagcggtacgagcttggccatggttattgtgcccgtgccgtgacatttggatgtcatgagatacgtgtgttctctttttcgcataaggagctcctcttgctgcaatattttcacagtgcaggctcataaaggtttgttttaaaagactaaatacaacttcctagtgacggaaatgaatgtttacctgcaatctgctgtgcccgaagaatattctgtcgtcgtttccaccatatcattgcacatgcaacgatcaataagaatgctagactaacaccgaatgcaatgccaatcttggctccagaagaaaggtgaggcccgcaagctggtagccccgggattccgcaaagacctgcattatctgtgaagctgcagagatagagaaaacagttacagggtagtgagtgctatttgccaaacatcattcttcacatgccaagtccaaatatttctttaaaaactttgtctctgattcaatcatcttacttgaagcttgctctgtgcaacagccttccacctacagccgctggtacttttccagacaaagagtttccgttgagattcctgtaatacaataaaaggtttcatgttgccgaccatgtgaactccactggccactgaaattgacatggagacaaacagaaagttgataatcttacagaatccgcagggatgttaactctcctaaggtttcagggatagatccattgaaggaattgtaggagaggtccctgcaaagatgcataaaaattcagtttcagggttcagaattgaaaagttaacacataaagtactcaattaataaacaaactgattacttacaatacttccaagctcgtaacgcttccaagcgatgcaggtattcctccacgaatgttgttttcactcaagtttctgaaatatggacaagatatggatcaagaagctttcactgtaagggggattacacaaatgagggaagaaaaactaatgacacacaagaaaaatggacacaatttcttcattagacaagtcattttcttggagaagataacaaaattgttcgtttacatacaatattcgtagacacttggataaacatttgcaggatgtgcataatgtattgacttacatgctctgaagatgttttagctttgatatatcgtttggtaggaaacctttcagaccttggttatcaagatcactgcaacgaaaaacaaagtttgtttattagaaaacctgataaaagaccagaaactcaaagagagatcctttgactctaagactctaactaatgagatgcctaagcaaaagaaagggttaatgaatctgttatttatgagtatacacaaaaagaagagaaacgagctatacagtccatcaatgaaccatctgctggtgttcttgtccaactgacaattagccccgctccatggatgttgtgggggaacacatggatcaccattccatccaaacctagaaggaagtcctaaagcttttttcattttctgtaacgcactgactgaaacagaaaacaacaagcaacattatgtacaattataataatctagtgatacagaaagcaatcaaccagcttagctattagaagaataaaccatgagtgacaagttttctccaacatcagaactgtattcctacttagattagcacaaatacgaataagatttacttgaatcacacattacatataaaccaaataccattctacaacagtagaaagacagctgacgacaagaggcacacatgtctcgttttcaagtaaccaaactttatatgaatctatgcaggaaaacgaagagcggtgaaaatacaacattaaaaagtgtccatgaaagaatgtgtaccttcatcccgtaatgttttaaactccgcggttatgatttcaaagacctcaatggcattgataatagcatgaccacctgccttgggttgtagaacgacagttaaggttcttccactcacagtcactgttgcattaagaacaagtgctgcataacgaccaccactcatctttatgatatccacatcttcaaagaaagtatctccatttatcacaacatcaaacaccctttttccttcagcagtgatagtattatcaatctctgcaaagtgcaaccatacagagtaatttctgttgggttccacatccaagctatacgttaaatcaggttggtcgtcagtactaaccaacgcagactgataaagtccttctggataaaaatttggtgaaactgaagccttcttaatagtttcctcagttgatctaggagaatcagcactcttaccaaaagatctcatacgattccaaaacctatcaccaccccaatgatcccctctataatcctcatcaaacctagacttcccagtaccacaagtcaacctagtggcagttcttaaaatcactccttgaccccaaccttcaccaaagctgtaagctttatcatcaacctgaagaatctcaatactcaaaatcgcaggatcgccatgaccagtactatgaaaacagatagtagcagtcccacccaaaagaaaaatgagagcttcagcgaaaacttgatcatcttgactactccaaccagatttaagagaagaaatctgagtgccttcaatagaaatgtcaaagagaggttctttatcaaaactaggttgatcaacaagtccaaagaagatcctgacagagtaatgacccttaggaactctgacaatgttgtagcaattgttaggtccttcagagattgggaaatatctaagagtcttcaaaggaggagttatgtaagtaggcgttgttgcattggcaggtacgcctcctgtatatgctatatccttgaaccaaagtgcgtaagttggtggtgttcgaacattcttcctagctccacaactaatcctcaaggcatatggagctaagcaaatcaagcgaatcaaagtcaaatgcaagtcaaaagatttcgaatcagaagaaactaaatctagaaaacgaacctggtcgagctagagaagagtagagactaaaagaggaaaggagaagagaagctaggataaatcgaagcatcattgattgatttttctagaaagaatctcaaattatgaagcttttttctgtatcttctctcacgaatctctcatatcgccattagagagcactaaaataactttatttggttcgtttttgtttgttttcctttcgtgtaagagtgaaagaagaagagagaggacgtgagtgcaggtaaataaatatcttattaaatgctcccaccgttctttttttttttaatttggatgaggaataatcaaatgttttgatgcgcacttaagttatcgtagtcaagctcaatgtcatttatctttaaccattggattgatgatcttataggctttggaaatgtcgaccacaaaatccatgtatgcgtatatcgaataagaaagctcaaatgagagaggtctcgttaaacttctagtaagggtataaaataaacttctagtcacgaaagtggttacaaatttgatgtagaacaagattaggaaaaaaggtcaaaacaatatctaatccttttagggtcttgttagtttgcttatttaggatatgcatccaaatagtttattcaaatgatccatctcattaatttatctgaatgatgttcgtttttatttttttggtatttatagtatttagttttttttttgtatttataacatttagtattttaaactgaatcacttccagttaactgttctgatcagaatcagccagatttcgatcatttttggatgagtttattaaaattcatttaactgatttatctcattgctctattaagttggttaaaacgaacatcaatattcaaatccattcagataaatgatcttaatggagaaacgaacatcaactaggtaaacaaatatttgtatttgtatatgattgtgataggttttaccgtaagtcatagttgaaaaacttagatttaacttttgtttcaattgacaaaaataatttaatgtatgtataatgactgaaaaatgtactgatttacggattgtggatttgatacaaaaaaaaaaactacaaaactgattttgcggaattgtggagtcggtggagtagtttttgtagtttttgcaatcaattagttgttagaacaataaatcagtgctttagtgattaattaaatattactagttgctaaaaacggttttgtttgtaaattaataacgataaatgttggtgggaacgaacgacaatgaaaacgtcccgtgacgaacattcccggtctcgtggtcaccagaaatgctagttgtcattcaaaaagacagaataccctttatttatcggacggctgagaatggtcgtaatctatatagctttgactttgttgacttttgtaaccattgattgatgcgcaatctttggtaaacacatcaaaagcatttccccactcgagtcgttgaaccaaaataagaagtcgttggctataaatctctctattacatataaaattctctactacaaagtctacaattgaaaccatttgtaaaagttttttttttgttttttttttcataaatatgaaattatagtttatcatcagacactacaaattgctctatcgtctccatcctccacaacatctatcattgatttaaattgctagtattattaggagatatctaacaagatttccactaatagtaacaaagagcgaaattgtagactaaagatacacaagtgccataacgcaacttatgaagagtttgcgagatcgtcttttcttcctgctgcaaaggtgtgatatgtttttcttattggttttactgttctatgtctaaccttgttgttgtcattgtattcaatagtatttactcaaaactcaaaacttcctaatctttacataaacatgtaaataactaaaactcgaatagaagattagttaaactatttaggtattattcaatcaacaaaataatgtaacaacaaatgggctattgtgaatataataatacttgggcttggtgatgcgcatggatagtttggccttcatcatttaaagcattagctttctaagtcaacgggtagcttcaagagtgtaagcctaactatctttgatcacacgatgtggaagactccatccttcttttatcttttcttgatgctccaacgatatcttatattagttttgacttttgtaaagaggggaatgtgtatctatgggtaaaagtaaaactgtaaaagagtcatgtaacggctagatctagcggcccatgtgttgctgatatcgctagcttttcccatggttttgcacatttgtgaatgatgatgatatagctttttctggtgtaaggaagaatcttcatcttttctttcttctcacgttaactctttgaatatgtggaaacgagatgttgatataaggtccgtttagttgtttatgcattatacctcatatccaaactttaattagatgaaagattaaaaaaaattacgatatataaacgcaaattaccaaaatttattctttactagaatttggtaagaattc

SEQ ID NO: 17 - DNA, 154716 bp, Arabidopsis thaliana
gaattcactttccaatagatcactcatttataaattgcttcaaatcaaacacatttaattataaaattgtttaaaaagtttgacctaaaaaaaaagtgtattttagtgacatgatcaaatcaattattttaaacttttcttatccaccaccacatttctagattttggaatgattaaaaaatgcatacatgatgtttttataagatttttacggtgttggttctattttgtttttcttattgccattttttcgattattagtgttttgtatgttaaacttgccgattgttccaattactataatataacaaaaacaagttttagctatcgatttttccaaagttttacaacgaagtttttataagttaacatgaagtaataatagtatatgttttaaaattatacgtttttttgtatgaaattaaatgttacattacactattaaagattccaataattaaaacacatgttacaatgagtaaattttattatcagacaataaacatctctttgctctaagaagaaacctatgctagtgaagcgttgactctggaaagatgcaagtgcaacgtgtcgctgaaacattgaaggcgcgtgtagaaaaatgttaagctaaagggaagttcactttctttaaccaagttttgcgttttgcaaattacaactaaagaatccactaaagctaacccaactaaattcaaacatttttctatgtgatcagtttaccatcaaactatttcatatttttgcaatgtgtagtaaaaactttctttgttacattatatgcttcttttataagcaaaaataccatattacattacatgttcatttcatttttgtttggtatttgcgcttacaatttacaaaatgattttgtttgatactatttacatttacatgtgaaattattgtgttcatcgtaaaacgttcaaaatttctaaaaattgtaagaaattattgtaaatgtaaacaaagtcggtttcctataaaaccacacgtctgaaccaccttaatcatcatcacaacatgaaattacaaaagcagcgactttgtcgattgccgtagtttcattgtagcatagataatcccgtcacgtgatgttatctatttttaactgtttcaatgtagtcagaaaagctatttgtttgatttcagaactgtttgattagtggccattgaaaaattctataatctatagtcaatagtctatacacaattgaaaatggtatagttgattttttaaaatacgccattaaataaaattatatatagaacttctctataatcgataaagtcgaacactccaggcaacaagcggaccgaccacggagtctaacgtaagagtattattagtgatactgtaggttttctttgactaacgataaagaaaaaacaaacatgtttaatttctcgtgtcctctatattcatgagtcatgacgttcatacaatttattcttgttttaaatgacgttcatacatcattttcatggttgtctattagttcactagaaaaacgaagtcttgaacgttgaagcgaagcattgaatatcattttataattttatggactaaactatacatttcaatcatctttgcaaaaaagaaaaaaaaaaatgagttagatcataaggagtcaggacaacagctagcacaaaaatctcaaaatcctatactgtttaacccaaaacaaccgtagaacaaatattattatacacccaaaaaaaaaaacatatttgcaatcacattagtttgtaaacacttctatttcgttccataaccaaaaaaaaaaaaaaaaaaaaaatcaacattcaattttttattttaaaacatgtttgcatatgttcatggtatgacattgggtattaatctatcacagagagctaaagcccatataaataataacagaaggcccatatctattaataaccaactcttaaccggtccattctaactgtttttctcaaatacaaaacacgtggataacacgaggaattaaaattgaagttaaacaccacaccatgtcgcgtacgaagctgccacatcactgttctattaacacgtggcttaatatgatgcaatatagacccaccgatagctggcgctttctagtttaccaaggtgcgacgtaccagataacaccacctctccacttttgaaaattaaaacgctctcttttggtaattatttagggaaacttcgataattaatcgaataatgaaggactaatttgcagttttaaggaaataagtaagcacacacgttagagaagaaagaccgttccagattgccacgtcatcgtctcctctcaacgagtttctgcaaaacctgaaacgtgctgcaccttgcctctctttctctctcttccttcgtttctctctcgatttgaagagagaaaattcgttcgatttcgttttctcttcttcttttggattttcccggaaaattttggaatcggtgagtctctatcgattactggtcaaccatgaatatctttagatttgctggcgatatgagtcacttgatcagtgtcttaatccttcttctcaaaatctacgcgacgaaatcttgcgctggtgagttctctctctctctctctctttcatgaaatgtgttgtgtatattttgaagacgagctcgtagacgaaacaatcgcattttgctttgaccttttgttttcctttccatagctttcaaatgcaatcttatttgaatcctgttgaggtctatttatcgatttcgaggcgaatccgagttggtagattgaaattgcaagtcaaaatagttgtgaaatctcaatcttcgaaaccactatggaatttctaaacgagtgagatctctcacccctaaattgcattaggtttaacggaaaattgctacacggaatggaaaatgcttgtagatgctcatgattttctcatagattgtgcagctcctaacattgttgctgttgacttttggattttgttggctaggaatctctctcaagactcaagagctctatgcgcttgtgttcttgactcggtacttggatctgtttacggattatgtatctctgtacaacagcatcatgaagattgtcttcattgccagctctttggctatcgtttggtgtatgcgtaggcatccacttgtgaggaggtcatacgataaggacctggacacatttcgtcatcagtatgttgtgttagcgtgttttgtactgggacttatcctgaatgaaaaattcacagttcaagaggtattttcatatgaatttcacattgcttttgtgtttttaggttgtagagactaggaaagcgaatacttgttgttagaagacatgcatatgttgtgtaatcttgtttttggtttatttattcatttgattcattcggttccttcttcttatatcatttggatttggtaactatcttggctagtgtagaatagaatatcgtctatgtaaatgaaactgaacataactccttccagaaccaattaggagtccggcgtttatagttttatttttgcttgtttaaacgttgtactacctatgtagcctctcactcgctgattgttttgagaaactctttgaatatcaaactgttgcatcgtgaaaggtttgtttgcttccattcatggaatcttctgtgtcctacctacctatgttccataaggtgccccatggattagtgtcatctgtatctcgctgttacttttctggccattgtgttctttgattatcttgtcataagaaactgtagtgactccttatatgcacttcactaagatcgttttcccttactaccttcatatgtatttttccagtatatgctcttggtaaagatctgatctttgcaaactgccttcactctttaagtatttttgcagcattgtggcctctctgtgttgatagccagaatcattgtgcaatatgttaattctgtgcattccaaaccatttcaggtgttctgggcgttttctatctacttagaggcagttgctatccttccccagttggttctgctacaaagaagtgggaatgtcgacaatttgactgggcaatatgttgtctttctcgggtacgtaattctaaccagacatatgcgtttgctcacttgatctccactggcttctctgttgggtttgtttttagaattggtttatcttatatatatactgtgtctttcactgctcatgcacttgttaacttgatcaatgagaatcgctctccagtgtcattgtggtgtttaaaaatcagtgcatatttctaaagtccagacattgttttccgtttaatgttaatgcgtctggaagctgagctgaactatatttttttctataaaggaaatcagactgctttacatcttgctatgcatttggttctgatgcatacctttgtgtccagtgcacaatatttcaatgtgcaaaattgagtaagtattctgtatgcactcacatgggcaatgattaacatgcagggcgtatcggggactctatattatcaactggatctatcgctatttcacagaagatcatttcactagatggattggtaatgtttcaacaaagaagcactaaatgcattttaaccatttgtttttcctcaatgctaatgttttacgtaaatccattttccagcttgtgtgtctggtcttgtccaaacagctctctatgcggatttcttctactactactacataaggtaaagtaacctcaccagtctgaataatattctctttatagttactgatcatgttactgactttggatcctttttgattttgttgtagctggaaaaccaacaccaaacttaagcttccggcttgaaaagaacccgaatttttttgcaatagtatcaaaatccaggaagttacagcaatggtgacattagaaaagaaagacatggttaacatttgggtcctccctctttctaacaatgagttgaaaattgaatgatgcaggattgttgtttaaaatgtgttttttttttagtctttaatgcacattgtaactttcccgacgattttagacattgagaagaggcatcgttttatcaaaactagtctttatagataacacacaaactctgtttcttttgtgcgagtgtttagttcaaaactgtagctcagatcagagccaagttaacaatgtgtcttcaaaacttaaacctagtcttcttgattgtgtttcactatcttggtcttcttcttgtgctctcgtgtcttcttgcttcttagctcgtctttctcttcaccttcagagactttttctctactgcgtttctctttctttgacttttttgttttgaccggagccttctcaatctcgtcttcattctcctcatcgtcttcaccctcaaagactatttctctactgcgtttctctttctttgacttctttcttttcacaggagccttctctgtttcatcatcttcctggtccatgatcgtcatcttctcctctgtggcagcctcagccactgtgtttgctacagctgtctctgcttcaaccatgaatccaatcattttacaaacatactaacagaggaatacaaacatagatgcgatttgtgaacggcattagaaaacaaacaaaccttctccagaaaagcccgagtcgaatacaagacctgtaagatgctgcttcaagaaaacctgcaataaaacaatgatatataagtaagactcaacttcaccaaaaaaatactagtccaaaggttgaagagcataccgcagaaatgagctggcgtgtcttaacgtcataaacacgtaaatatcggtccagccctagacaattcaattaaaagaaaaacagatgaaattgttgaacaattaaataaaacaacacaaatgagattgttgttacgggttacggcatatggacgttgaagttgtgataatgaatcttaccgcaagaagctatcacttgatgctgtggatgtctaaccacagatcttatgcttccagagcattttcctaaaaagcttcccaacagctttcctgcaatagagatgctcgattaattgtttgattcagcaagcaacatagtttatgatacatttttagagagaatcaatgaacctgttcgtatatcaaaggaagctaggtcagcagaagcattcccgacatagatagtatgaccgtctgggtcttccgcaattgatgtaatagcggtctcacggaaatcaaaggacaggaccggtctacgttgagtagaaatgtcataaagacggacctgtctccagcacaggcaagttgtgagtgatcaggacaaacttcaaactgacaaaagaaactagagatattaacctggtgagacttggttcctgtgacaaatttacggtgatcatccttgctcaagaacgtagcactagtgaaccaggtaggcgtgaagattccaagattgttcttaggaggctgcacaaaacagagattgattggagaagacagtaaaggcttagtgattcatcaaagaaactgagaggctttgaaagggataaagatgagaaagcaactcacgcatttcgcgctccagatctttgtacattgttcaagatcccatatattggcctcaacccgtttcctgtatcagacattcatttcagtatggtaacaaccaaaaccgagatataacgaaatgatctacaaatataagcaaatcgattcagttctaactactaaccctccaaataagctgaagttttcgctcccatccactttaccaaccaatatttcaccagaaccacatgctttccatgttttaggagaagcatcatccgtggaattaccatgtgcatctggaaatttaactgatctgagactcacatctccctttttcgtacatgtaagcaatgtgcaagatctaagaataccaaattttgtttagaaacgtcaatggcaacacaacataaaaacataattcaatgggaatttcaaagaattagtgtaaagttatatacctttctgtctgatcatctatctttttcctgaataagtgcagggcagaaatttcgttatcctcaggggaacaaccatcatcaccaaatacagagtatgagaagtgaagatcaccattacaagggttaataacctcaacctatggaaaggatagaaatgaacaaaatgattgtataaatgttggccaggctatggagataaatatattactcaaatacacatagcttaaagtaaggaaaacttacattgccatcttttcttgcaacagccaaaagctgcaattggaagaaaagaaaaagagagaaaaagttatgagttaccattttgacgcaaatacggaaacaagaagaaatcaaagttaagaactcaaaatttgctaatacatttccaaagcatagatgttatcatgtatgcttaagaaaggaggaaaaaatctgaagagctatcttgtagtaacagtggagtcagagattatgaaactgtagcatagttgcaaacgaaatgataacatattaccgataagttctcaattgcaaccaaaacaaagccaaaactcgtggttcaaaatgccaaagcaaaacaataaactaaaactaccaacagtctgattagagcgaggaatctaacgaaaacctcaaatttggctcaagattaatacaatgatcttcaagtccaagaatcacaaattcaaatcttataagctaaattcaaaaaatgagctcatttcagcagtagatatcaatctgaacctgataactaagccacgcctagattcaatcctcatagcttaacataaacatgaaaagaatgaaactttttaccggattccttaaccggtcatcaatggaagcagcaagaacacttctagatgcattcatctctccccatgtgttcactacagtcggaatccctctctcttgaccacgagcttcagtcactgcacatcaaaattgaaataatctattagaaaaaacgaaacttctatattaaaaacagagagagcgaagtgggcaccttttattaagccgagagagtcaaaagttaaagcacggaatggtgggcaaccgagattctccggagggatgactcgaggcattttttatcgccgccgtataatttgcagatgctcgacgacggagaagagaagagaaaccctttttaaaaccctacgttttgattttggtcaccgcttttgttgtcgtatccctccttctaaaccgggtacaaaatcaaaatcaattcgggttacctgaaccgggacagttaataaatactacttggttgtctctgtttatagtttgcattcaattttcgtttcttgtaaacaaaatgctaaagtgtttgtgttaaaacaaaaaagtcagtttaattgatgatttttttttatgttcataaattgattagtaaatttttttttgatgaattctgctaatcatgaaatttttaattactgttgatcttaatctagtgtatatatatgtaaatttctactaaagggttttgattgaaccttcaaccaccttgtttctaaacaaaccgtctttggatggatggtgcttcagttgccaaatctcgggttctatttggagattagcacaattactactattctacgatttgctgaatttcaattcctcaatccaaagataacatgagctcttaaagtccaaattagcaaaataaaacacagactagtaaccaatggagaaatttggtgtaatttttgaagaaaaaaattctaacacaaagtaacaactaatagagaaaaatctgttggttaatcaaaaagtgtctaccaaaatgctcttttaatcgtctattgaacctttgaatgaacacataagaggaaagctacttcttaattaggctttcaaatttctcactagtcttagcaaaatttacccctttatatgactagaaacaatcagaatccaaagaaaccaagctcgctggctttttccttctcaaaggtttcaaaatactgatatatgattgtgactgcaagtaagattccagtccccgacccaatggctcccatgaaatcagccaaaacagtgagcgcaccgatgcacactcctccaaatgcagccgctgttgggatgtaccggttcagctccttttgtaagttggactctctgtgtcccggcatcaccatttgttgttcctaatcatattttacaaataaattcactttccatgtcgaaatgtttaaattatttagcaatggagaaaaggtttagggattattacctttagctgcttagctacatctctagcagaagacccggagacttcaatccatgtttttgagaatagggcacaagcagtgagcatgaagacgatatagaacagagcatggaatggatgagctgccatatcggcaaaactgtaaccgtggaaaacaaatattcagagaactggaaatcaagtattgttatattgatggggacacacgttacttgtgaattaccttgccggagctgtgatcaaatatgcaagaccactaactggtatagattgtccactgtactctgattctttccactgtcccaataggttcacaaagaaatttccactgaatttcctgtagagaagctgttgaagaggaaatgcaaattgtcaactttatgttctcagctgtgttgtcccttaatgaggaaacaaaagaaagcacaagtacctgagagatgaagtagaggtttgagacgagagcagactggagaatgattggcatgttggaggtgtagaacagcttgatcgggtatgaaccctgttggccacgagcactctttgacctcacgggcaacacaacacggaagccttggaagtatataacaatcaagaagatcaacactgttgcaagcaagttggtaacatttggaaggttctgccggtaaaaagcttgtctgagcgcagcaaccttattggacttagttatcagcatatggaacaacgcaatcacagcgccttcaaactcagctccacgaccagtgttgattgtcgtggggctaaatgctttccagataatgctttcactgcatcaccacaatcaactcaaaacgtttaagaatctctgtatctaaaactctcttcccttacaaagacaagcactttgatgtaaaagatgagctctttttaacataccagatattggttgctatgaaaagagagattccagagccaagaccatatcccttctgaagaagctcgtcaagacagataacgatgattccagcaaagaaaagctggaggatgatcagaatagcatttccaacaccaagttgaccaacaggaccatacattcccgaaagaacatatgcaacagcctcaccaatagcactcagaatccaaagaagcttctgagcaccattcctacaacacaaacaacacatgagacaacgattctcgacttgatcaagaaaattaccaaaagggaacactttacaagagagcacgatcctcacgaacattgttgtcaacctcaataatctttgaccctgctaagagttgcatcactaatccagatgtgacaataggagtaataccaagctccatcaccgttccacgattcgatgcgagaatgacacgcatccaatagaacggatcagcaccggtggtagaatggatcccatagagaggaagctgactacaaacaaggaaaatgaagagggagatgacagtgtagatcactttctctctaaatggaatcttcctgtcagcactttgcacttctggaagaaaagccaagaatggcctcaccaaatgcaaaactctaaatcctcctcccattatcgaatctgttactgcaaaatttagagcctattgagaaattcttgaaacaaaatgcgaatctatacatactagctacatgtatcttgatattcaaccaaaagcaattcacgatatatctccggaaactagatctacctagaattatccacgaaatctcagatccgcattgtgaatttgataatcatgaaattacagatctactagaaacgaaatcacagaaggaatgcgaaatcaaaactggggctaagaggaggatcagaagaagctttacctctgcgagtttgagagagaacgttgcgaagaagcaacaaacggattcaaagttttttttttgttttttttcgtttttgattgatcttgaagctgatgttgaagctttttttgtaagaagttttacacgaattacatgtcatcgaaccaataatacggatacacgtggcaaaatacattcgtttctgattaagtgatgaaaacatgactaaatagtaaatacactcttattaaattttatgaaaagattgactaatgagttttgattcaacttaataaatatccaaacctcttttaaaaatacgttattgtttatttcaagtgagaattttcaattttatccaatatattatttttatgatttctatataataattctaacaaaatatgttatcaacaagtaaaagattatacaaatcttatatattctcgcttgtaaacccactgtccatcactcacactcttacatttagtcttgccaaaccttagatattaaaagcttttctaccataagtaacttaattatataaacaaaatatttaatttttctattaataattttattttaaatctagtatttaatattatccaagctcaatcaattgggggttttgactattctattttgtgtacacttgcttaatcaacacaatgaactttttgtgattctttcttcttcttgttttaatatgtcagtagttactacttacaggactggttacttaatcttattctagaacccggatttcaaaatcaataactcaaatgaaagatgtataaaaatagatggcaaaaaagatcttaggagggtttagttctcaactgcctgaatattaactattaaggtgtccatttcacaccaaaagaaaagattttgacagagcagaatccacacattctctataatcctcaaagagaactcaaccaagactattcaaagagaccaaattaattcagcccactttgtctagctaaaaaaagttaaggcccaacactttttcagtatatggtgattgtcaattatatgatgatgttaattgtaatactaaaaaaagttataaatgacgacaacaacaacaacaacaacaaaacaacaaagagtaaaaaaaggacgctttaaatccgcaggtgactttgaaaaagaaagtaacaatgatgaggtcttcttcgaagcgcaaccttaaacttttcttgtaatggcattgtgaacacaaattcatttttattgaacttaaaagacagatatcatgatgatttagattacttggcttcacgagttttaaacaattttggacccacccactatatcgttcaatggactatggcttagcctaaactattatacctaaaacagcgtactaattcttttacactttaaattttaatccaaaaagtgtttataagtaatgtgcaatttcaaactattagagccatccttagattgcggtgctttacttaaatcctagtactatttaatctgaatttgtgttaatcttcggaatagaatccagttaaccaatttgtctctaaaaatgtataagtattaaacatcctattttgtcaagcgacatcgattgtttcttaaagctcaagatgtagtaattatcatacggtatggtaagtaatcataacacacatacacacacattcaaacatctatatatttaatagattaataaaatattcaaacaaactaagacctaatttagaaacatatttataaatgcgaatggtattgatttttttaattaaatctactttttctatatcattttgttttcgtttacagagacatcatttggactttggagacttggagtttacattgaaacagataaaaacacgcacaaaaataaagtatggataaaatcatacacacgtgaagagcaaaagaaagaccaattcagagcaagcatgcaatatgagatatccgattagctaaaggaggatcgatccaaacttgttgtgaatcgttttatggatatgttggatcaatatggcttaaaaatcatttgatgcattttgagttctttctttccacatctcataatcaagttgcaaaatcaaattgctaaaagtattgagtctattaggtaagcggaaaggaagaccttacccaattgattacgtcttgataatgaagactatgttattgaaccattagttattcacttattgcttggtaactttagtattttacatctaaactcttaatcaagaaacccattttctaacattgtttctcttttttatctaactgaatgttacagtatgttcactcacttcaaaaaaggtaccttatcttcgaaatatttatttcttcaattatttttacatatatatgagaatatatatatatatatatatatagaataaaaacaaattatgatcattgatcaccttagtataataaaaagtaaaataaatctagacataattacgtataagtgcttataattaaccccattaatctccgacaaactctacccgaccacaaattttctcaatttaaaatccttgtgaaagaagcttactcacactgctacacatgaatgttattcaattaagtgtcttactattcaaccacattatgctaaataaattaatatacaaacgtatattaaaaaaacaaacaatatagttatatataaagtattcaaaagaaaaagagaacaaaatacgatcgaccttctctttttcttctatctatcatctttcccacgctttcacgctttgcctcattttattaatatttgttatttgaaatcattccttcactcctttcttcttttttgctgtttcagactcaccaaaaaaacttctccttgtcagaaaaaaaaaaaaaaactactgaatctctctgtttttttttcctttcacaacatctcaatggagacattgaagaagaatccatcagtgagaagaaaaagcaagttagcgagaacattccagaaagtatgtaacctaagaacaacgtcgacgaaggtctcctccaacaacggaatcggaatctgtatgttaaagtcccaaaatccaaatttcgacgacgaagacgacgacggagactctgttttcgatttaaagagtacttccagtagcagaagcggagagatcaaagtgcgagagcgtaatagagctgttttacaagctgtggttgcgaagatcttcgctagtacgacttccattaaagctgcttacgcagagcttcagatggcgcaacgtccgtacgataacgacgctatacaagcggcggatacggcggtggtcgaagagcttagagctttatcggagcttaaacggagttttctcaggaaggaattgaatctgtctccgcaagttgcgattatgttagctgagatccaggagcaacagagtttgatgaggacttatgaaatcacgattaagaaactcgagtttgaagttacggagaagcaattgaagatcgatgaattgaagatgagttttgaagagagtttggttgtgaataaatcgttggagaagaaactctcagcgagtggatcggtctctgtgtttgataatattgaaattcgaaatttgaatttgagtagttttgttcaggttttaggttttacgttgagatctgtgagaagcttcgtgaaattgattgtgaaggagatggaatcagcgagctgggatctagacgccgccgcttccgccgctgtttcggtgaacgttaaaaacgcttccaccgttttcgcgaggccgagtcaccgttgtttcgcgtttgaatcgtttgtttgtgggaaaatgtttgagaattttggagctcctgatttctcgagacgtgaggaattcgaaaagttgagatccgttgacccgattcagtacttgacccggaacccgggttcgtcttttgccaggttcgtggttcataagtacttgagcgttgtacatgcgaagatggagtgttctttcttcgggaacttgaaccagaggaagctggttaactcgggtgggtttccggactcgggtttcttcgcgacgttttgtgaaatggcaaaacggatctggcttttacactgcttagcgttttcattaagcggaaacgtcacggtgtttcagctcaaacgaggttgtagattctctcaagtatatatggagagtgtgaaatccggcgatgagtcattattctccggtgataattcagatattcgggtcgggttcacggttgttcccgggtttaaaatcggcgagaatgtgatacaaagccaggtttacttgactccggttaacggttttacttcatgaataggccaatccaaagagaacgcggtgggttgtgttcacgcgccggggaagaaaaaagagaggcggcgcgtgaaaaggaaatggtggggacatgattccttgggggcagcaagactggcaagtgggacatgttttaagaatgtgacggagacagaaaatggcgcgagggacaatcattatgaaaaaacagtttagattagtgatcattttttgtttttaaaatttttagattatacagcttaaagtatgaagggcatagaagaaaaataatattctgtgtttttctataacgtattacgtaaaagtttttgttatatacctgatattttataatgtttgtagttggtcggataatgatggtaaatatttttctaattaattttattaaaataggttatgtgtcgtcgtagctagatgttttttaaagatatcttctgattatgacaaaatacgtaattgtggagtgtgacttgaaaaataagattagaatcggcttttatagtcaaatatttgggctatagaggctttattgacttgattagttttttaaaatatcagtttagctaacgtgagtgttgttagcattatggaaaaatatgtttttgttgaatagtatgcgtgagattagaaattagaaaacgtgtagataaacgaatggagaggagagagttaaaaaatacgattttgggtaagagagtgagacagatatgtatgacgtaaagagaatcaatctagtgaaagagatagaccaatgagagatttccacatacgtccgatttttaaatctactagttaggcaacttattcaataccgttgaataattaattccttttatttaatattgtatgcgagttggtctggcataaattattagtgataaagaaaataaatgaaaaggagacaattgagtacttagagattaatttcattcaatacatttttagttattgtttacttaattagttggcgatttgatcttatgagaaataagaacaatctctatccaaagcaaaccaaagatgaaagaatgatgttgtgtgtgtagaggaagacgaaaatatgttgttgtgtcatcgtttagacgaagaagaagtgtcgcagatttgtggaagtcggagacagaaaacaacttgcgatgcactaattgtctaatttaaaatgagcaagagctcaccaatattttaaacccacatggaaaatattagttgatcaaaagaagtagataggcccattagtaaatggcccactgataaaccaacttgtaaccgtttttcttataagaagtattgttgagcccaaacaaaagacgtataccgtgttttaaatgattttagatcaaattacaactaggaaaaataattatatgtaagacaaagctctagcctctaaaactcgtctaggaaacatcaagaatatgtttctcgtacatttagaatcaaagtgatcggctacacaccaactaggtaattggtcgatgatcatccaagttaaaaactaaaaagcatgcatagtttcttcaatccgaccatgttcagttttttataagtatttaagcattcctaaacacagtttttaaccacagttttaatttctctaagtagttgttgtcttgttgaaacctttaattatggttatgttttctctaagctttgttttgctttgtttagttatatgtgtaagtagttttcttgttgggtcttgactcttgaggattatactagcttaggttaatcacaaatgatgattaaacgattatctttttacaaactgtaaattaaattacttaatttttagttcataaaatagctagtcaatcatgttatatacagtatcaccaatcatatactctgtttattaggtgtgtatacttatgaagaacagtattactctaacatttttccatatttccacagtcgaaatatcttaggatgacatatctaactgattcgagtttgaataatcctcaagaaaactatacgaatctctaatcaatgagcggtggcctagaggcagccaattcaacgctatcgtacacctccacaagtaactaacaactttttgccgtcgagtgattattaatattagaatctcatatattctactattattctattagatattaaccttggattgaaaggaaaggatgattagataaggatgatcgaaagtttgacaaaaaagagtgttgtttctatatgattttcaacttttaactatgtaaaattttctattcgaatcttcaacatcgacttaagtaaatattaaacacaaatgatctccaacttgtttattaaatatactgttaacaactatgtgacaatgtttataatactctcagtctatgatctcgcaatgtattgttttgtaaccgaatcccctgaacgcattaatttcaagaccatgactgcaaatagataaatttaacgcatacaaaataaaataaaaatattatactactaattaagtactaaaataaagaatatatagccagtaagattcaacttgttatgaaatgagaagtaacattaactaattacaagataggatattaaacctcgtgtgatatggaagaaaataaacttttgactaatttacatatgcaaaagttgtagtaacctgaaaaaaaaaaagaattctaaaaacaaaggtataccttgtaggaaatttcgtattatatagttagaataaagaatgtactaaatggaagaaaaaaatatatatatgaatctagccgagactatcaatggccaacaccgggactaggaacggatcggagataccgatcaacggtggagagatgtcgtgatcggagctttccggcgaagacggccgcgtgaccctttttgctcggtgtcgagttgggaattttcccctttggtagagcacttaacgtactagttttggtcacatgaggcatgtgactcttctcttcctctctcaccgtcaagttttcttgtttcttcacctccaacagttttcttgaagataccagcgaaggcaaggctgacacgatgacggcaaagactatgaagagccagatggtcggaattagacgaacggccatgaagagctttgatctttgggttgagaaataaagagagagagagcgagagagataaattcaatgaaattcttaagactcaagattgctataaaacaatgaagtgttgttattgtatatatagtcaatagatagagagagaaagttcctaatttagaatgttgataaagtgactaattaataaattggtggaatcactatttgtcttttgagtttttttcatttttctttaaaatagaagtctaaagtgacactctaacacatgcatgcatagcaaattagtacaacctggttagaattttcaaacacagttgtctatgaaatttcatttttatggtaagttgggggaaaatgaattgagaaagaaaattcaacgttccaaaagtcatgcacaaacttatgaatgaagattcgtggcagtttcatctatactaaagtaaaatgaaatattaagtactcaaaagtcaaagaaaaagtttagataacagcctaaagaggaaaaggtgaaaatagatttcacataaagataaatattagcaccaaacaattgttattccgaaatatgaaatgtatttaatttgcaattgggccaaagtcaatgatcaaataaaaactaaaagaaaagaaagagaatttagacttggagagaaagggattagtaatataaagattggtttatgatctttagtgaatcaagttgagtcttatgtacgaagtgaatcaaattaattcattaaatacaatcagattactttaattagcaaatgagttcggtaggctaattaaatctcttgggatacggtattagatacgatgtaacacgtggagatagtttggtgagtgatgaaattgatgtttttcaaaaaattagtagccgccggccaccatttcaacggcggtcgtcacgccaccgtcaaatgttaggcctccaagttccaagtttcacactttccggttcatgttgttatcccaacttttttggagtttgtttcaatcattatttttttgtctgtggtatatttaagacacttatggatgatgtaacattactaattacttttacttaatatcaatttaaaattttgtttcaacaactcactaagtaatcaatatacttagatggctgaagactaataaccaattagctagtgcttaacaacttcttcaactctgattgaaaaaaatacaattatatccaacttttcagaaatttttaccttttccaaaagctcacaatttttccgacactatcacaaattataagacgttcgcggaactcgtcaacaaatagtatagtatatttgtatggtcaattctgattatattttcatatctaaaccataagactaaattacttttttcatactatctgatttcgtcactgttctatctgtagaaactatgcaaagcgtgttcacgacattaatgagcttaacataaaactcgtggaggcagagaaaagtcaaaagcatggccggtagtaagactccaaaacgggcctccacgtaatccttattacgctataacatgacaataatttctaaccaagaatggaacaccagcaactatataatatttcttgtataataaatactaaaatcgtataagcatgtttactgctaactagtatggtctcccactaatgttaaagtagtaagcagatattttgataagaacctttttataaattcactaaaattcaaatataatattgctataaaagtaaaatatgatatgagatataaattctcgaataaaatggtaggattctcatacctaaaacaagttagcaatatataagatagccttttcaatgatacaaatcaataatgtttttttttttcggtggatgtaacaatctatgacgtccgacaccgttaaggggtagattcttaggcaaaaaagaaatctatgaagaaatgacaaaaagaagaaagaaagagtgggtaggtcacatggccatgttcttgtgttgccgtcaacagagaaacattggcgttccgcgttttcatgaacacgtccggtcccatcctctctagtctctctactacaatctcctttatgtacacatctgatctttgtacatcattaatgcgtacatataatttgtttagctcatacaagagatgtatactataaatatgcatacaccaattcggtgatgaatagtagaatatggggattcaaaaatacctaatcatcttttacatgatagtcatggaatattcaaaagctagctagttttactaaatgatgttaaatatgtgagaagtgatattattattatctgttgtcaaaacagaagtgatattatggccaaaaagaaaattgccttctggctgataaccgagcctttttgtattgaaatctatactaaattcagaagttataatgacctactaaaatcgaaattgcagtgagaaagtacgaatcattatcgattaactcgtgagattaactcgtcaaccactaattaaactgccattcatcaccttaattttctggtgaaaagtgtacatatattacaaattattcaaatcagtttgtgcatcaacaatatcactagtgtctttgcctttttagccaaggaatcaactaaactatcgtctgttcttttaaccctaatgatatttattcctacaactctacattcaaagctcactacctcagaatattctctaaattgtatattcttttgttcgtcctttgatcaagccgaatagttgagaacatctcttcaaacacaatgcaacatagttattccactcggccctgaaagcctaaatcaaaagccattcgttcagcttagaccgaagtttgtgaccacaaaatcttagcgacaaaaaaatctctcttttgtttagatggtgccaatctttattatcagttgtttttttcttgtttctcctactgtctatatcatttctaaattataaccccactctccgaaccttttttggtacgtataaattgtctttattgataattagacggaacaatatttttcaggctttgacaataaactgtcaaattggcttgtacggcagttgtatatttatactacattaattagtgttaaatcggagacttagcttgaatacaagtctcaatgtttccgtaaagtcataattgatatggaaacgatttctctttgtcaggatttgtactttgacttgcaatttttaaaatttgagaaacgacgtgtttggtcacgttgtgcacaacctatcccacactctgtatgaaggtagatacttaaatttctttttgttatctataagagataaataataacaaagcgaattaagcaaacaagttatgggctgccgacaataattgcttggctagatattgtaatttataaggtataattattattgtattcaaattcagtatgtagcttataaactatcaaatatagtgtcatataaaagatatatcatggaaatgaacacatattctcaaataaggtagccaaactcggtcgcaactcgcaagcaataatactagaattttagaaacacacgaatatgtggaacacaagagttggtgacattattttttccaacgaccaagaagaacacggaatggtctctctcattgtcacaattgctgactttactcgatcgtaatataagcttcttctttgttcttttgctttaactgagtctataacaaagaattaattatatataacctaaaaatttactatttttgctttaactgagtctataacaaataattaattatatataacctaaaaatttactataaccaatgcgtcatatcgaattcgaattttgtcgaccacacataactaacatgaagataattaaaaagagaaatgtttatcagagcaataaattcgtatcatgaagataattaaaaaaaatagagcgagaaaaaaacatgagtggggcttttggtgagcaaaatggggtctgacttgttgatcgatgtcagtggctaaggtatctgacttcagacacactatatgtttgtgccccaaagtattcgttttgtctcaataaactttgcattgttaaaaagaaaaaaatacgagtgttggtcgatggaaaaatttaagagaacaaaagaacacaagttccttgaacgcagccaccggtttcgttaatttttcggtttttctcttctctaaaacataaatgatgatgtttcatttttgctatcatgatttactcgattggattgatatacttctggtacgtgcattttcattgaagagtaaccaaaattcaatctctggttgggccgaaagatctacatttaatgacgatggtgacattgttggacggattttgcaatttaattaaatttatgatgactttactaaagttttatttggtgaccacttgtgaggaaaaagcaatgagtaatatcaaaattctcttcttttttttttttttgtctcaaaatttgtagtgtttaaaattaatgatttgtcaaaattaaaacatgtgacacatatcaaaagaggaagtgtagaccaaaaatgttttcagccaaaattgaagaggaaataagacaaacatcaaccaaaattcatggaaggatcttcagtgtttattagatactcgtgttaaataatatttttgatttaattttaaattaataaataaactaaataaattaagaattatttctaagtgaaatccatattcaaaaattttaaaataacattttaattattactacagtgttatttcatgaataatttttaaactgaaaatattaaataaatttagaaaatggaaatttaaactaaaacttaaattaaactttatcttgctttctttcatttcattttcaatattaattttttcatcaattataaaactgaactagattttaacccgctgtacaccgcggaaacaaattattttttaaagttagtatatataaaattttgcaaattgcatttatctataacatatttttattttatagtttacagttgttattaaataacgtcatgccaaacccgtcctgtaaaaaaaaccatttatgatatgtttattaatcattgtctaaatattttagttgatgcgggacgttgaactaacacattttttgccaattggttaatatatgtttatttttaaaattttgaatcacaaaatatgacggaaatattttttgaaatttttaaaaactctatatattatatattgatgttaaaaattttgatatattaaactttttataagtttaaatattaataatgttttataaagtttaaatatataaataataatatttcaaaattaatattttttgccttttaggtaatgacataataactctaaaagtaaagatttagaagatttaaatctttaattaaatattttaattcctaaataattaatgccagtagcatgacattgtaaataagttcaaatacatgatttatttattttaataaaaaatgtttagtaagaataatatctatttagatgacaaaagaataatatttattttaaaaaaaaactttgttttaaaatatggttagcaaatacgtttatgctaattttaagggattgatgtgaagtttgtttggattaaatttgattgataatgttattgacaatttaaattaagaatttaaagtaaaattaattattttggaaaaaagatttaatgctaatggcattgaattgtaaataaattcaagtataagatttatttgctaaaatagctgcaaaaatgtatatgtagatagtacaattgaccccatgtataaatcttataagaaaatgtgaaagggctacacatagtcaatagccacaagaccaacacatagtagggacaagcccaatatcttaaagccgttagaacttatgacttggtttgcaagaaaaataaatgatctcaattctatagaacgtaagaaaatgcaaaacctagtcaactgttagggaattctgttttaagaaattgaaatatttgtatgctatgaacgttgatccgttaactctttgttaaaaactaaagaacaccaattaaacccatcattgcgtttcagattgttaaagtttcccaactcaataccaattgatgagagtgaccaaattgttcttatttagacaattcctaatgttcatatggaatttctaacatgtttcattcaaaatgatgattatgttcctaccaacaaaaaaataaaataattgatgattagcttagccattcattttctgaaaacccaattacagaatcaatttcaggttggtttgaacaaatctttttgaggtcggattaagattgctcagactgagcatgtttgggtgttcacgttttaaccctccagttcaaaatcagttaacaatgaactatttgatgtcttttatataattctgatctcatcttacttctacatctaaaaaaacactcctctagacttctatacacattcaataaaattatgtagaggttggactgctcaattttaaaaaattaaaaactctaaaagtcagaactacagtttgaacataatataaaaaatatgaacgcaaactttaataatagtaattacagagagtttggcagacctagtaacgtgaatcatagcacaactaattaattaccttatttatttctgctataattcttcacgtaatttttttattttttaaattcacgtacgtaagcatgtacatgtaccaccaattaattcttaactcactgttttgaagatggagttctgaaaatatgattgtttatcaagatattatattcattagcattttttgtcgttagtaatattaggaactaattaaaaccaacaacaattttttacaacaaactttgatgctagctaatcagataacactccagcgaaccaacaagtgagtatagagtatcaaacttttgtttcaatagaaaaaacatcaaaaaacctttagtccaagtttacttaaaaatgtaaattctaccgatccaacaatggataaatgattttttttcctcatatgtttttatcaattaccagctatagtcaccgtctctctattttactttgtgaacactaatgtaagtagtatataactaatctctaaattttgcttttgattgttttctctaaaaaatctattgtttattcatacatttgacagtaatctttttagaaaattataagaaaagtacaatcaaactatcaaagtccctactattggtgaactctcacttctcaacgttctactcttcaccaatcaatgtgaaaatacaaataaaatcgacatcgattacatatacataaaaacgacagctatttttattcagctaactacattgcaattcaacctataattaaataaaagaagaagaaaaatccaaaataaaaaattaaatcgagaaaaataaaagatgaattctcaaagagtagagggtagtaaacttttgtttttaaaaggaattacaaaatcgaatcataccttttttttatcaataacaagtataaagagtcttatatgatgatttattgattaccgttgagaaactaaaacaaaaacgccgtgcgtacaacgcttcccatgtgagcgacaataatatccaataaaatatcaccacgtgtcaaaagatctcaacttgtgaccccactacgctactccggtgacgaaacaccacagaacactccggcaactcgccgagatcggcgaacaaagactcatcctcttctcccatcggaaagaacaccgccacgtcatcagcccccgagacagccgtctttttctccgacgagaaaatcgggctctcaagaatcgtcgaagatgttgtctccatctccgtaaaccatgcgaactcgtcgacacatgatggcgtcgtttcaatcccccttccaagaaccataaacttattatcctcctcctccgcctctggctctacctcaggctcaggttcgggtttgggctcgggtttaggtttaggcccgtttcttgtggaagaagtgagaggccaaggatggttatgctcagaagtgtaagtgatgagaatcatcgttggatcatctctgcttctctcgacttgcttcctcgccggacaaccttttgtgctactacaacggtaataacctctagggtatggagatcccttaatgggcttttggccgtacttacgccaagcccatgaatctgagggcggagttgtgtcccctttgtgccgagatccttccatttctttcatcggtacgttcactactctcttctctacggatctcctgctgtaaagtaacaagtacatcaatatatgaatatactttagtcaaatgagaatttttcttgaaattgttatataattcgaatcacatatatctacctaccttcttttaggcgaatgagaagagataagagctttcatgccgttaaaggttgaagaatttggtgattcgggtccggtttcttgactactttcatgatcattgtagcttctcgccatatctagacctcgcttcatgtttatatatatgctctatagagtatagactatagttatatatatttacaagaagttaagctaagaaagaaaggtcggatcaagattcggatattttgttgatcttgatcactttttggaaatatatgagttgcagatggagaaagaggagtagaagtagacagagagatatgagagaaagagaaaatggagagaaggtggagaagaagaggggttgtgtatgaatgaggacgtgcgagcatatgtcaatttaatctctacttgttttaaaataatgctttatatccttatcatttaagagagggacctcgattgattactattttaatagataattatttgtccataaggcgatggttacatatgatcacaccctttgtttacaatttataataattttattgcgttttgtttgaatagatggggttaggtattattagtatacactagttagtttttttttgtctttgtccacccattgttcaaacaatcaaacacccttcttcttttttctcttacaatgtaattaaatgattggaaaatgattaggtaagtttattggctggtgtagtgcgtgtgaacaaggaaatgtagtgcatggtaactaacatatgtgatcaaactttattatcatccgcttaaaggtacatctaaagtttatttgtatctggtgcacacacacaaaaaagagagtttatttgtatctttttcaagaacttttccatgcacaaaaagtttattggtgtctctctcatctatgaaacttggattaggtctttcactaaactcagattaacatatgtattataatatgtaatgactaatgatgcatgtcatcttaatcttattcaccatatatatatatatatatctatttacccatttgaatgggctataccgtgatttctgagctattaaattccagacataaagttaacgattatcttaatatcttgttttgagtataagctattactttacgttgcatgtacaacagtaacatgtatgatgtataatgaaaactgaaaagggtatattgctataaaagagctaccacttatctcatgcatagatgcatatcatgcattcccactttatggaaatttggccatcatgtattacagtattagcctatatatatatatatatatatgtatgtataaatttgtgtacaaataatcccaaacactctgaataagttgcactccaaaagtacgagctaaaactataaatacaatattaaatcaatttttcttatgaccttttccttcaccaaaagcaacatcataatttgtcagctgatgacagtacccatatattatatagttatcatgttggatttaataagaaatcgtgttgctaatcaaagagataatcttctttattaatgatgcttatcgtttactgatcacagtttaccctttcttcaacctatagtttttctctgatctcaatttagagacaataaaaatggaacataaggaaactgtaacatccatacagtcaatcgtacgtatttaatatgattatcagggttgttttatttgtcttttctttagagattactttgtacaacataccgagatattattgtctatttcaataaaaaaagttcatatcgatcctaggattttctatttttaatcaaaagagactagaaaggtagatttagattttcttctttagctatagatttttcagtacaacatattgtcaaaaagtgaattaagtgaatattattagtagaagaactacaaattatacttcctataattcaatacaagttgttttagctaaaaaaccacatattaatatatactcttaaaagttcagccaatcataaaagataatgcataatataaatatgggagattgacaaaaatagcactaaaataagtttttcttttaaaaatattaaaataatatataatttacataaaaaaattgaaaacaacttatattgtaaaacaaaaaagtttataaaatagtttatattatgaaatggaaggaatatatattaatgaagttaaaagatatttacaatattttaaaaaattatattttcatcaaaattttatactcgagaaaaatgcggcgacggtggttatgacgttggtaaaaatgtgacaataatgatattgatctcggcgaaatgaaagcatgtgcatatttgtggataattaactatttcgtttcatcgatatcaataaacatagataaaacatgttaaagttttttcctgtatcgtcttaaataaattagtgtatgatatatcatattattcatatgaatatgtagcaagaagttattagaaatacagtttaatacgatatattatgtatattaacatgttagtactaacacaagttatagaggaagcaaaacgacttttccactttcgtcactagcgtgtatccatcctaatccaaggaagaaactttgtttaaaatgatccaataaaccacaattcacacctttgctcaaaaagaaaaaaaaaaaacaaaaaaaaccccacaattcacacatttaggaaagcagaattatacctgaaaagtagacatctaacaaaatatagttacatagaacaattttcctacgatttatgtgtcgttttttataaacactaacatttatgttttttctgtaaagaataaactcatgttcttaatggagttgcaagaatcttatggttacaaaacctcattactatggaaccgagagatcaaaaagtgggttatccctaatttacatgaattttctttctattactagataaatgccccaaacccatataccaaaatatttatcaatttatatcaatatgaaaggtatgaataaatatataaaaactgtttgcgtgttgacttggcattttatatattgccaccatctgatcatgtctcagttcagtttgaaaatatcaaagataactcagccttattggcaatttgccatataactacaatttttctagaatatataaaagaacaacatctatcacatatataagccatatatagtgtctaattggtgattacaactttattctagaactgtatatatatataattttatttttggtagtaagacacttactgtctttaaattttaaaagatcagtttttagaaaacaatatggattaaaagaacaaggaaataatggttgtgagagtttgtgaaaatagttggatccattccaagatcttaaaaacccgatggttttagaactgttgtaaaatttatacgaaattttattttatagaatacaccaactagactaactatttaatacagtaagttttgacaaataaaagtctaattttggattgatttatctaatcgtttggattaaactgaaatgtattgatgcgtgaagcggtgtggctgtaatgtgaaccaattcaactatattatagcgacgatttggcaaactatatttatagtgtattattggctgattgcatttaagtatcttattggcggctaatatcatggaattttttgccattgaaaatgggaccaataatttggcatctctgacttttcctaaaacctcggcgtggttcttgtacaacatgccatgatttaattatatgatttcaatatatcaagatatttattttttgtcactttttttagtacattatattaattttccaaccagcaattctggattaataaattcttttttctttgttcctattccatttccttatattatttgagaaatatttgaaataaacgtgctgatgtgttgcaaccatatattgattctcagagttttcttaacaaaatagaattatttatatgacaatacgaaaattgtcactgtatataaatgttgaggctaaaattatatttaaaattgtttgatcaaattcatgcttcccttagttaaaaccctggatccagtgtcctctcgcaatgcttatccgttttacagctttattgtgtttaaattagtagtctgattgctttcttataatcactggtctattgcataatatgtataggctttcattttgttctatgttataaatgattttaaaaacaaatccaccaatttattatgctctatatattagttcaaatcccacatcttcaatgcatccaaatttttccttgtaccacttttctccttgtggattgatatacttgttttaccgaacacttgcggattttaaaactagagaatcacgaaaaggagtgttaaatgaaaacaaaacgataagtggatataaaattttgaattttaaacgcaaatccaaacacaattactaacgctaagtgcaaaaatcaaaagcttacgtaagtttcaatgcaaaaccaaacccggattatgcaagtacaaatgtaaccgctaaagactaaccttaagactgtaaacacaaatacgaaaactatccaatataaacataaatgtcaaaagcaacaaaaagtgtgaacgatgtataaaaatacaaacaaaattatgcatgttataattaaaatatatacatatataaaagagaatggaaaatgctaaaatgattcgataaatgattttttttttcttcttaaagtgatgtgagcacttaatggaaacataatcgcaagcataatatgcaaagattaatgtaaatttaaacgctagcaaaaatgtaaagacaaatgtgaatttgatgcaaatataagtatttagcatttataaagattaatgtaattttacattcatgctaaaatttacattatctttgcatattgtaaaagattaatgtaaatttacatttcactaaattttaatttacatttgtatttgtgtaagcattttgcatttataaagattaatgtaaatttagcatttaaattttaaacgctagcaaaaatgtaaacacttgtccgatgtttaagtttattggtgaattcagttaattactttaaatttaattaaataagaaaaataatgataaaaataatattttttttgttaatcaaatacccatttttaagagcctcacatttgaggatgttctaagttgttacatggaaacatagaagacctagtgttcttgctcctaattgcgagtcagtcagcaatatactattaaccataaaaaatatagttagaaacgtgatcacgaaagaaaagagaattcaattagctctgtggtgaacgttggccactctttatgattgtcaatcatttttacaaggtctgagaaatcggattagaaaaccattgagactattcctttcgcaagagtacatttcatggccttaactaatgcatctaactccgcgtcaaagaggtgataagcatcgtcgattcaaggtttgttttgagtttaaaatcaaaatttatttttcctaatcaatgttggtagtttaagaaattaaaaatcctaacaataacaattattgaaatagatttgaagtagctaccttaaaaatatatttaaaagtctatttttcaaactcgacttacaactttagaagcatggacatacttcatctcaccagtgaatatgaaacacattcttgagctttttcccccttttaagtccttttatttttttattttctaaatgttacagtgggacacttggcttgacaagagctttgacaagagtttgagtcaaatcatccacactacaaagcttgtctttggattgaggtgcaacaatggcttccatggcaaatgaatctaggcatgatgcccttgcttgagccacattcaaccccatttcttcaaatgcttcaagaatattcacaagattgttttctccccgtggactttttatttttacttgaaacatttccccaatcttctctaccttcacctcctgccaaagttcaaaaaagaagaagaataatattgaacttagagtgccatgtgaacaactcaattagagtgccatatgaacatctcatttatcttgagcttatatttgagcttagaagtttatagattaagctaatcagttccaaaaaaatatgatccactttttctatgatcaaagttatatgtggtgttgttatataaaaatattcgattacattttggtaaaaaaactcctcaatttttcataggatagacaaaagtttctcaatatgactatgtaatatacatagaagagcttcaccaatgataaagaaatagatgaaaggagaaacctgaaattggtgcaaagattcttttttggtaatcttgagatcttcatattctctctgcaaagcttctatctcgagtttgagcatggctatgtatagaagagcttccctaataaccatgctctgttcatgtatactctgcataataactcattggctttaaacattttaaaatagtagaatcatcaagtgatatgaacatatatttatgttgtacatacaaatttaaagtgggtgagatttttaagaaaatgaggtttcccttggcttgccctcttcttttgttcactagccaccatcactttctcaattttttgaactctttgagacaacgattaatattgtttgaactttaaaggatatatctcgggatctctctatatatatacacacatttcttgtcgtgtaccaaacatacatgttggtgataaactggtagcttattgaaacatcataaacaaaatcagattttaaataataaagtataattagaatatgtatggtggttgaagatatatatatttttcttcatattgtagattgggcctgtgaaaagttacaaatgcaatggtttcaaaatgcaccgaccaggccattatcttgaagttgaaaggtgaagtctgagattatatatatctctttacatggtacctccctcacttataagttgaatcataatttaaaacttgcccactttaaaagcacgggtacttaagaaacatttgcttgtaaacaaatcacaaattaaaactcgaaaatcaatagacttacataatttgaacataaaataaatgaaaaatacataaagagagtggaagcatacatcgacgaacgcgaaaggaggataaaacaatggcaaaattccagttgtcagagacagatagatacctatgaattagccaaaagaatcctaccgacacatatatagcataagcaacgaatacaaaatgtgtgtgttagctaaatattaataaatgtatattataagagaagatctgtcgagggaagagagataagaggagtcacgggttgttttcttacgtttgtctcgcttcgaaaggtacgtaagaaagcagactaagttgtaagcatgaggctgctttgtttcacatgcttcgttagtaccatttcctctattttattctctatccttttctttcctattattagcaaacgcaatatcgtaagtcgtaacgtataaatgatcacactactacgtatatgttttttttatatatatatatatatagaaatgtatgaaatttatccttttggataatgtagtgctacattggctttttgtatgaaatttttgtttccaaatttcttgatataattgtttgacaaattttggttgagggcgtatcacaatacatatacaactggccggcgaataaaattattcgttagaatcatttgtaaaatactaatttaaaaaaatacacataaacattgctcacggatggacctagacaaaagagaaaaaaaggaaaagacaaatgatcaaccccaaaaatggatagtacacgacgaagatctatcacgagacatttggtaagaaatgtagacaaatagatagagatatgataagcgttgggtgtaatgtgaaagctgaagaggtgaccaatagactaaagcacttttttggatacaaaacaacaaaaaaacatggagatgttaacattaagatgacagtcttgtctcaacccatcactcgacatttgtttctttttaggtcatcacagtttatctagtacgatctgctatttgttttgtactcctttaaccttcataatatcagataaatattttatttttgatggaatttggttggagaatatgagtatcacatatattcaagataaatggagtctaattactttttttttaaattagtaatggtctgtttacgttttcattttcatttgtgatgattaaaaattaaaaattataatatgaactcgtacatcaaataaacaatcgatgctaatttaacttgacttacttagtactcgtgtttataaatccataaactcagaatatttgtcatcatgatatgaaatatatatatcctaatatcccgaaaaccgaatcaatcgaaaatacacgtatgttttgtacaaagtgtcgaaaaaacaaattaaatgaaaattaaaaatatatattggtaatacaccacatgtaaatatccaagtatatacatttaagtttctcgatatccacatttatgtatatccgtgaacttttagatctggtacaaaatggattacttgagatcggataatagatacatagagaatttaccatatttatatccacgtatctttctcagttaaaaggacagtctaaaaagtaaaataaacaactaaataaccactatcagatgaaagaatagagggttaatagtttcttcaccaaattttattgtaaaaactatacactaaatatagtgttatttcaataccaaaatggtgttatggttggagatgccctaataggttaagactaatatttcaaatcagaatgttaaatctttgggaaatggagaaaaaaataattaatcactattaatttttcagtatatttatcaaatgtttttgattaattatacaatatgactaattaaggaaaacactatgttaaactgaataatgcatcttaaataaagagattatattgaaaacagtatatatacacaaaaatacaaacccttaaatttttttaatttttttttgctgcatggttccttacctcctgatcttttccagtgataagtgtttcgttggtgtgatttttccttgtctgtttctatatctcctccattttaaccgttcttgttgtatatggtatttcaaaatttgataatcagcttcatgttaaccatggacttacaagtatatgtgtatgttaaacccaaaaagaaaaaaaaagaaaaaggtgtatatgtggaagcaacaccaatgttaagttgtagttttttttgttaaaatcactaattgaatttggttatcattttggtccggattgaactaaaccaaactatatatgaaccaatctaaatcctcaacatctaaacaaaatttaattaaaccaaactcagaaaaaaaaaaaaagtgttttcagctttcacataccttaattaggacttgaacatcgtcatcaagagccaaagaatcctttgttattcctcagattctgtttagttttattcttttgtgattaatcatattaatatgttggtgcagaagaattacagggcaaatctcctttggcagataactcactaattaaaagcaatgcataaagagatgcaaagatctaagtaatggtttcctgccaatagagatcttaccctgtaatgcatttccacctttgatccatctcacatgttcacaattgtaacttgcaaatttgatgttatataaacttggaaagaagcatattccacggtacaatgctactgcattgtaaataagaccgatgttttattccgacaatgatctcttcttcgtataatttcttaggaataatcttccatgccacaagttttatggtcagaaatattcctaaatgaagagcagtctaccaccttcttctcttttaacaatttctaatccttcgcaacatcttccgcgtgcatcacaacaaaagtaaaagatcgtacatgtgtcatttaaattcacaaaatttaatctctagttttaacataaaaagtcaatactaatgtgtgtctattacatatagtatgttcttgacctcgtggataaagcaatattatagttcactttaatactatatgatataatgtcaagccctttcatatgtttaacccaattatttgtctgatttgaatttagtccaaaagttgagacggttgtgagtcttgtgacttgacaaaatgtgttttgagatcttttgtttgggatcggagtactatattaaaaaaaaaatcataagaaaataaaagaatctttaatactatggaataagataaaaaagagagtggtataatagtaaagtaataagtagaaagtgattcttgaaatggaagatccgtaagaatgttcttgtgattttaataagcttctacctgaagacgcataaaatgcaaaagctcgaaactgcaatatgctctagaaagttataaatatgtacatttatgccactcaataaagtcaatcaactatgaaaaagaacaaaattcgaattctacagtatactataaaaggtacattaccctaaagtaattgactttatatatattatgtcattactttggacattatagaagattaacatatatcttagtcctaatatatatgttaatcaggtctcattgtaacaggttaacatatacactagaacataagcaatctatctactattaccatcaatcacaattcgaaagataaccttgttcatatgtgaaactctcagtaacttacatttcttcttaagcaagatcccaactttattccaactacattcctttaacaaaaaccaaaccaattccacaacaaataaagatgaaactgttttgcaatcacaaacttacttatgaatcaactggctctaggatccatcccttgctgccaaacataaacaagctcatcccaaccagtactcgccattaaaccttcaacaagaacactcatatcgatcccaacagcaaactctgtatgatgatcatacctaccaaccaaagcatcttccaccatatagtcccaaagacaaacactcatatcataagagcaagaagctatcaaactcctcctatgcggcgagaatttcaccttcctcaccgcatatccatgaccattaagcacagccaaaggaactctataactcctaacatcccaaaccttaactgtcttatccactgaagaagtagctaaaatacaatcatcatacttattccaatcacaagacaaaatctcaaaatcatgagcagggatgatcatagttgatccaggttctctaacatcccaaatccttaaagtacaatctccagaagcagaagcaaacacatcaccatgtttaggattccaaactgcttgataaacgcaataagcatgttccttaaaagtccttacactcgccggacgatccatagcccaaagcttaaccgtatcatcccacgaagaagtgagaaacgaatcgcgccgcgtgggattgtaatccacagattgaacctcacgcgcgtgctcttggaatgatctaatcggattagaaggaggaggaagagctgtgtcgtaaatcttcactgagccgtcaccaattgcggcgatgagcacagagtcatgagattctgaccaacatacgtcgtatacagcgtcggctgtatcgtacgagacggattcagttacgcctggagctccaggagcgagctcgaggacatggattcggccgtttccgagaattccgaagttctgagctgtagcgacggcgaggcgtgactcgtagaatggactgaatttcacagagtagccattgaacggagctttgaacaccggcatagcttcttcttcttctccggtgagtgattgaatcaaaagaagagtcttctcgaagattcaattcaacgatctgatcggataacgccgattttgctcatcgcagaattaattttccccccaattgggcctattgggctggagcctagcccatttgtgtaggttgtgttaaaacgatgtcgtttggcatttcaagttagggttttttgggggtttggttcaagcttcatcgtcgtctctctgtctcttcaatttcattcgttttctgagataaaagtgagagagaaatctaaattcgagaggagaagttttaatttttctgagttagattcaatggaagagatcacggaaggagttaacaacatgaacttggctgttgatacccagaagaagaatcggattcaagtttccaacactaagaaaccattgttcttctacgtcaatctcgccaaggtaacgaaacccttttaatcgaatcttaataaattcgtatttagattgaaatctatggattcgaagtgttcttatttgagtaccaagtctggaaatgtctgtgattgttcatgagtgttaatttatctgttattgactttgatgagttattactggtggttctgtgttgtttatgtgactctttatcaatgtttgttccttagatttgtgaactttgttttgctctttagatttgattaaacctgtttatgttattgaccatgtttggtgttttgttaacagaggtacatgcagcagtacactgatgtcgaattgtctgcactaggaatgggtaatgtttattctttatgatcttgtttatatatcaaatctaatatgtatggtttttaaactatgtaactgagttcattaaattcaaagttattatcagaaaagctgtttccttttattgttatgacatagaatcttttatcttctgtgattttgtaatatcttatccgagctttctttattggaagagtttattctggtttctcataaaacattgatttgtgcgttgtgcagctattgccactgttgttacggtcgctgagatattgaagaacaatggctttgctgttgaaaagagtaagatcttcttaatcttgaatgagttaatgttagcacaagagatttgaaagattcagtgactaagttttgcttatttggatattgttttttcctgcagagatcatgacatcgactgtggatatcaaggatgattcaaggggtcgtcctgtgcagaaagctaaggtatatattttcgaatcatttgataaattgcttatgctgtggaattctagcttccgtctaatgatttttgttctctgggaaattgctatgttggttgctaaattggtgacactgtgacttgtagattgagatcacgcttgccaagtctgagaagtttgatgaactaatggctgcagctaatgaagagaaggaggctgcagaagcccaagagcaaaactagattgtttcaagttttttctgttcaacgatcttatttcttcgttccctatctctatctgcttaattttaagacacttctatttcgttaatttttggttcacttttttatttcaccttggattgtgtcctctgtacctctgagcatttttatttaaagatcgtaggaagtataaaaaagatggcttcgttgcataaatcagcttccaaccttattatgtagagtaatacatgtagttgaaattttattttgaagacttggaatctgtccataaaaaaggttagtgatatggcttatggataacaaatcactatctctgggataattgaacaaatgtaagccacatgatacatatgtgacatcatgagctataagttataactaatggctatatctaatttttttctttttgtcagttcttttagtttaacactaaaacgtaaccatactagaagaaatataagaaagtattatagtgtgcaataaggttattacttgctaactaatcactttggttcacattcttagcaccaataaactataataatagtatattatagttcaataggatttgaccaaataaaaagttgtcaattagaaaaacaaaaagaagttgtcaaattctgttaaactctcaattgccatttgttaattgcagtctgggatgggattccattgcttgatgataatagcttttgacttttactgatttaattattatgtctgtacaattagtcaaggctaattgattgatgagtgattggattgaatgataatggacaaagttgaaattaagagaatgaagaaaaagaagaagatgaagttatctaaacaaattaaatgaatggaaaatcattctcttaatttcatttttgtccatgatcacttatcagttactccataattatttttttcaagatcaaaatatcactctcaccctttatcttcatgtcctctacatatttatcaatctcttttctcctctaacacaactattttgtgctggaatttgttgaccaacacaccaacacaatctatcaaccatagtgaaaccttcattaaacgtaaatgagatacatgattaagcttaaactaggatttaacccgtggtacaccacaggaaaaatgtttaattcatatatataataatattaaattttatggtttaaatttagtattaaagttatataattttatataatattgtaaataaaaaatttggtgatgataaaataataaataaagatttaactcgtgttatatcaatccaaatccgtcccgttatataactcgttttatgatattttaatatttttttataaggataaatattattaatgttttataaagttcatatatatcaataataatataccgttaatgctaattgatcctcttaaataggaatattagtgagtagtatattttagtttagatttggaaagatttaaataattgttgtgatatatttattttagtttcctaaattttagtaacaaaattagtttatatttagatttgaaaataaaattgttaaatattaaatgccaatggcattgggttgtaaataaatcccaacttgaagatttatttcataaaagtgttgcaaaaatatatatatagatacaaaataaactaaaccataattactaaccaaactaaaccataactaaacgaagtatatacactctaatacaatctttttattaccatcaccgttcaacaccacctttccgtccgggtaatgcgaacgtgttaacattattacaacaccatgtaaaaatatagtttcatgttcggtaaattgatttataaacaactaaccacaaatgtagtccatccatataatttttgtcgatgtaagcgtgacttatctaatattcatcattatcccgaaaaaataacaatcacccaacattttgttctttattttcgcaagaatcaagagtcaagacttacctcctggtcctcctctcatgaagatgttataagttaaaacatgtcgtacataattttatcgacgatattctataagatatagcgtgtaaaacaaattaccaacatacatgattaattgattatgttagagggttaagtgaggaaaaaagagagaagaaaaaattgttactaaatttctagaaactaaatttcatcaacctaatttcatcttgtctagtgttatttttttccgtctaaagatttcattcattagctgcggtagagatatacaaaacagacaagaacaagatcttttcggagacaacattgatgggtacatagaaacctccaaagactaagacccaaattaaagggcaaacaaacataaggaggaaaagctcctaaaagataagctaatgagagaacatgtaaaaggactccataatagcaacacaactcttcctcacaagccaccgacaagcatttccaaagaatttgtaagtctagtgttgcctaactaattttattttgatttttaacaattagtaataaataaatgaaatcaatagttggtcaaaaattaaaaaacaataattggcatttggcactgttagcatgcaaatacgtttatgagggcaaccccgcaacggtgttggaaagcagcctgctgacaagagtgttcgttagccaaccgtttaatcccttttaattagtaaacacacaaaaacaaattgaatttactaatctctcttttgtataatggaatattcactggttaggtgagttttttgtaaagatgataattatggttctgtttatatgaattaaatatttttatatatcataaaagaaaaattatatacatattttgcattatgtatgtaagcatactttagtatgtcatacttataacataacttcagtgtaaacaaaatccaaactttcagaagatatgaagacaaagaaaactcctggtataataacagcataattattgattgaaataatatgtgagctaagttggtatttgtgtgtatttatttatccattctggagttattataaaataaaaggtttgaaaatgatagattgagttggttgcgccaattttttttgctttcccctatcaaaatgttgtcattctctaatcggcccacacctaaaatgatgatattccacaaaaatgcaagtgaaaagtgaaaaggtatctcataattgtttagttatttaacaatcacgctaccatactcagtcgtggtcagcttatataaactttataagtaacgcatagatctatggattctagatatgccaccaaaaaatcaactgtgtatattcttttgtaattgtaaacgatcaatcggtgacgaacgaacaaaactgtagttaaaagcagtacaaaataaataaataacgaatagagagcgcaacaccaaaacaaataataagaatattgctctttgcatcgtttttgctatcaattttgtgagtggtacaagattatactaatcagtaatcacgtccaatatttgtttgattttacaaccgaatttggtttggttcggtacttcggttaaatgttgtcaaatacactattcatgttgatcattgaccaatagaagagaaaataaatgagagaaagcgtaaatacaagtaaagaggaagaagagtccaaatgtaccaatcagctcgtgactactttcagcttacctttttcttctccaagtcccatcttcgtctccgtcatcttcacggcacatcctccaaaaacgcttagcttctctctctgttacgtttactcaagtcttttttagtctcctccttaactctcaagccttttccaagtttcaagcggctccaacggttcaatttcgcactttccgatttgtggcttcactttccggtaacgtactgatctcaatccttgtagctctaaaacgactctcctagtttcgcttattttttttcttgaaatttctactgtagaatgaattaagcatgtcgacgaggttattttagttgactatcgattagaatttttcgtgagcgttactttctccgtacattatcctcagttctgcatctaaatcttgcacttagttcttcatttcttgagatttgttatcattattctctactctacttagttataacgattatgacatcgtcacagtcttctatatgtggggtttctggtactcaattgcgcaaatccttgtaatgattgatgtcacgggtctgaaaattttgacaccgtcactagatttcataacttttaagcggtgttggtgttgcgttaaatattattattaaaattgaagtttctagtagtaaaaaagttcacagagagatcttttctttttgtctgtatctacctacttacttcagaattcagataataatcctttatacatagagaaagagatcatctactatatgattattatatggtttttatatggataatattcaagattactgaaaaatctgttgttttgttttgtttcagatctgttctagagaacttcaatatatatccatatatggtttcattggtctgtgagccatatcctaagaactaaactagctagctctcttactatggaggagaggaaactgaacttcagcgtacctcttctttcaacaagacggatgcagaagacagcaggagtctctgtgcgtagaaacaagagtaataacttcactgattatgactctaagacaagtgaatgtccttctgttccagttcttgttccatatatgatgggtttagatgatgaggttactgaacctgcctctgttcctttcacttgggaacaagctcctggaagattaaagggcaatgatttcaaaccccaagtttgtgttttgatgaaagaagaagaacaagtttttacaccatgtcttccaccgggtaaagccgttgatgcaaacatgacaagattgcagagttcaaagggtaaacaagttgaagaatcagatgatgatgaagatgatgtgttttctgatgctcttgacactctctctccaaaggactcgttttcttttaacaatagcattagtggtgtgagtgaatatggtggcgttgagaccaagaaaccactggatgctcaatctcgggatttcatgatgagtcgttttttaccagctgccaaagctatgactgtggagcagtctcattatgcttcgaatcgaaaaccatccacttttatggctgaaccaacgatacagataagagagttagtaccgggggagaagcagcaaactcctaatagatatgatgtgtctatagtcccatcttactattaccaccaagacattgatgatgaagaaagcaaggtgggtgaggaagatgatgaagtttctgagtacgcctatctttcaaagagaggttgtggaatgttgccacaattgtgctttaaagactctctcggcatgctgaacacagtgcctggttttaaagctaaacacaactctccaataacatcaccaagtcatgatcaagtgaagtcaagcaaggttgctcaactcaaatatcgattccaatctgttaaaaaggttccacctttagactcctattagtcccttataaatatgattagacactcactgactagtagctcttgtacattttccagctagctcttgattcagtttctaagcacaagttgagtggtaaagttcattcaccagttcatccaagcaatgggaagaagttcaactctgaatcaaacttgatttctgctgcgaagaggtcttcatctccttacagacactctcgctgtatgtcaccatttcgcagtacaggtaacggttctcctttacaccatgcgggtttccctgagactcgtagggaaaccgagaacctgagagctaacaggttgagcaatcatactagaaacataagcaggacgtctcaggagttactctacccaaaaagcaatggttcaatcttggagaagacagtttatgtcgacaccgagaatgatcacatgaccaatgatcagcataactcaaatctcatgatctttccagaggaagcagatatgacaggaaggaaaccagatgccaatcctgaacttgaagcttttgaaaatataagtattagaagtagtgaaatggtgaagggaaatgagttagtagagatcagtagtggttttgatcggtctcctcttgcaccaccttctcccaaaaggccttctgaatcttggctttgtcataatctgccttcagtaacttctcagatcacttcacgtagatatcatccattcaacccccaaaagcaggatcttacagaaaactacagaaatggtaccaagtgggaaactattgttaagacttcctacatgcacagagatcatatccgatattccgaagtaagcatctctcattttcacatatacagtgctttaagcaagaatcagctagccatctttggtatttacttacttcaattttgtgcaggaactggttgctcatacatctcatcaatccaaaacttgagaccttgatgcttctcgagttctgacctccccgagatcatcaggtttatacctacgtttcagctcaatcattagttatttggtagtcatttcatccactggtgaaaagaaaatatgtgcttgttttatgaacctcatttacatgtgcagcttcaatattaactctaattaatgaggcaaatactagtaagacttaggatgaagaaaacagtgaactaaaggaaggcagagtaagaatttccattaagctcgtctcttgttttacatatatatacaaactatatatgagcaatccaccaaaaaactggctctgtgaccagaaaaaatcgactaaattgcctgatctctcaccctcttttgcttattttcttccctcatcttcctatcactcacattacaataccacttatatacataaacacacactgggagatttcggagatcacaacaaatcgtgaagatctccgaaatctctcagttttacaccaacatcaacattaacatagaacaagaataacgaataaataatcaatagtaacaaaagaatgtaacacaatcttgtttcttgtatattcttgttatcagccttccttgttttatactattcagtatcagatggcaaatacaatgcttcttctactacaacttcttcatggattagtttctccagctctggtctgagttccttgttgcaaaactcttcatactcttctctgtctcctcctttcttcttcacctccaccaccactagagatggagtcagctcaaatatctcagccgcaattgtcaacggtccttttgctccttctctacaaccttctaatctcaaactccattctttcttcctcacagtaaagctcacgattttcgcaatctcttccagcttcgatatgatctttgaaacaggagcacctgacacaaacctcgtcccttctcctccttcttcctcaaacaaaccagacagatcaaaccctgaagagaaagatataatgtcaaacgcgtttaagctcgagggtcttggcattgaacctattcccatccgttttacatcgaactctgcatcgctctctgaaactgtcgaagagcggcctgatgatgatgcctcttcctcctcatcttcatcttccctacacagtttatcatcttcgatgtagaatttaacatgtttgaatcctttcttgaaccatctgttcttcatgatctcgggtattgtaatccgagtatccggattcgtatcaagaagccgagtcaataaccgaacaagatccgatgaaaaccaacgaggacacctaaattcccctttgtaaatcttcttgtacataaccattatgttcttgtcgtagaacggaatgtgaccagccatcaacacgaataagatcactccacatgaccaaacatcggctttcgctgcatcgtacccttttctagtcaaaacctcgggtgcaatatacgctggagtcccgcaaaacgtgtggcagagcccgtcttgacgaagctgctctgccaccgcgctgagaccaaagtcagatactttaaggttccctttgttgtctaaaagcagattctctggtttaaggtcacggtggtaaacaccgcggccatggcagaacgaaacagaggagatcagctgctggaaatatctccgagcagtttcctcgggcaatcgacctttagcaaccgtgttgaacaactcgccgcctccaacgtactccatcacaaagtaaatcttggacttcgtcgccataacctcgaatagatgaacgatgtaagggtgacggacacggcggaggatagagatttcccgtttgatgtgagcaaccaaaccactcttcataatcttctccttgtcgatgactttaatggcgactttatctccagatttgatgttttgagctaaataaacctttgcaaaggttccgtggccgagaagcttcccaagctcgtacttccccatgagaatgttgtttcttgggctcctaggactcctcggactctgtgggctgatgttaccatctttgtctgtatccattataccaatccggccaagaagatccgccatgtatcgtagagcatacggctttgggtgcggtggtggtggcggcggcggcgggtctgggacgacggtggtgaccaccagtggtggttgagccaaggcttgagccatccgtgtccaaagaaagagcttctgattggtttgggttttgtattcggggggttttggttggtttgtttgtttcttccgtttgagtctccttgtttggttggttgggcaaacgtgaaaacgaccaaaaagccaaaagaaaacagaacgaaaataaaatagggtttggttgttttggccggttgttgatgtttggccttacctaattttgtcttgttttataacggttttggtttaaattattacattgaaatggtctaatagtctttattggaaaatttaatatatcatttgacttcgaaattatcataaatccgttttttgttttgccagcatatttacacgtgttctaattaatttttatcattatagagaaatataaatgttacctaaacacgctatatgcctattacctatacagtatacaccaagacaacaactttaaaataaaaatggttttattttgaatataattttagtagtatatttattcagtgagaaaattaaatttatttctaatgtttgaatatttaaaactgtagaaaataaaataaagatattgaaacttatgatggtgtcgtcttcgttatcacagtacaatttgcaatgaacaatgggttttgtgattttcgctatgatatttctacctccagcagtttattcagtgccagataatagacagaacttatcagtagcaaaaggaacctgatcgatcagcagatcatagataggtattcataagaagttgccatcgtatgacacggtcacgctttactgagttaaattttatttcttttgtcatcacttttaaataatatttataactcttttcttgtgacgacaacctatatgaatcagaaatgtaacgaatggtattgtgggaaccaggtgttgctgcgttggtgcttacgtgagttcgtggacttcacatcgccgaccaaatccgagttcatttttccttacaataattccagttctttctataatattatttccaaagttatatccaaatttggttttctaccttctatatataattctttttatcatgttttctaaatggaatattcttttctacactaaaatccaaatcactaataacatcatatatatattcacattagtttagttttaatgaaatgtacactatttgaaaatcatctagtaaacactaccctagtaactgatataaataactatcgacaatttgccaccaaattaaaactacctttttcttataaccaacatattaattggtgcatgtagatgttgatgttatataaaaatgactaagaaaaaagatgtaatatcaacaaaagaatatacatgtttgaaatcgacttgtgatttggactaacaaaacaaatagttatcgagtaaaagtaaaactaagtcttgttgaatagcttattatatgggttgctatcatttgattatctcaaggaagtgctatttatttaaccctatccataagcacaaggaagaaacacataagcgaaagtcactactaacttcaaacgactctttacaatctataagaaaagaagaaatagttttctaggtatgactacgtaattactgagtatatattatactttgaaattaaatttattcaaaataaggcttttaattaatttaacttgtaacttttcatagaagctactgttcatattttctttgctagtcttaggtctattatattattgactcacaacttaaaaactagaaaaaaattgtataaataataattacaattcagggcaattttgcttaagaactagacaaatgcaaggtagtatgaattaagttgcaaccaattgcaatgaaacaaacaaaatttaacatatttcttcaaattactattatatttttttaaaaactttagaatgtaaagacattaaattgtaaacaaataacaatttttttcctgttttatcatctagttttaggagtttgtcttacatttgaagattaaaaaaaatatccaaaaattaaaagcaatatcatatagcaatctcgcattgttttggactcattgcacaataattttagttattgggcctttagtaatagataaacgatccaatttataactacgtcgttttaaaaatataacatcccaactgggttctgattcggtggatccaagttcgggttgcaattcgattcagaatcaaaccatttttgaagaaccctaaaagttctcttcttcccccaaatttgaatttgttcttgcaatcggattcgaaatccgaaagtcttagtctcgaatttgagctcaacagtttcttatggctccgaagaagtctgaaggaatcgctttgctttccgtttacagtgatgaagatgacgaagagatggaagacgccgaggaagaggaagaagaggatgagaagcagagaaatcaggaagagagtgaaaaaataattgaagaagatcaggtagaagaagcgaattatatggatgaagaagagaaaggaagaggaggagaagattctagaacgccgaggctattagatggtgttggagcttcttctagtgctcatgggactcctcgttcacttgataacgatgaatcatcgagacctgattggagtaatcgaatgattggtgagtctggagttgcggatggtgagagaggtgatgatgcttcaggggaaagtagtgatacgttattggatcagtttcttccgccaagaccgagagagaggtgctctgaggagctgcaagtaagtttcctgatgatgcttcaatgttctaattttaaaagtttaggtaggcaagaactcattggtgtgttgtttggaaatagcagtcttctaaactgattagtttgtgattctaagctgattactcattgctctgaggagctgcaagtaagtttcctgatgatgcttcaatgttattttgaaacattaggtaggcaagaactcattggtgtgttgtgtggggtctcttggtacgtatggttggaaatagcagtcttctaagctgattagtttgtgattcagttacaagttggtctgatatgtatttttttttgttgtgtttgtagaggaaaatagataagtttctgagcttgaaaaagatggggaagagtttcaattcagaagtgaggaataggaaggaatacaggaatcctgacttcctattgcatgctgtatcttaccaagacattgaccagattggttcgtgtttcagtaaagatgtatttgatcccagtggatatgacccaagtgacttctgtgatgcaataggtaactccacctttttgtagcttcttcgtttttttcttctcttttcttgtttactcttgtctcagtaagaagcatctttgatatcttttgcttataattttgatactctgttcagtatcatgcactcattattactttagtaaattattgatgctggtcactattattactatattctgcgttctccatatttcatgatttgtaatgatccttgtttatgtgttaattacagaaatcgacatgaagaatgagagggaaaggaaggaacaagaaagcaagaagaaccagaagcttgactttgtttctgctggtactcaacctggggcggttttcgctgctcaaaagcctaacatccccattccaggtgtgtgaaaatgactaggtgtctgattggttagttatttatctcagctacatctctgcaaaatatgatgaattttttttcaggtattccagctttagctactagtggattgccttccataccaaccgaaattgctgctcgtgatggtagaccgaacaagaaatccaaatgggataaggtttgttatcagatttaaatatctagaatgtgactatatgatgattttggcatacttagttcttcgcttatttcattttatgtgtttatggttaaatcaggttgatggggacgtaaagaatcctcctctagcagctggaactcaggattctatatcctcaatccggtctaatgcagctcttgtatctgctacaagtgctggttctggatactcagcttttgcgtaagttatattgtctgttgtttgatttgtaaactaatacaatcttgagctattcctcagttagataaatcggataatcatttcattaaccatacaggcaacaacggagacgagaggtggaaggaagaagatcttccgagaggaaattggagagaagaagttgagagacataaccagaacgaagcttttctatgttgtgattcatgtagcaagagtttctaaagaggttctagttcaatgtttcataacgagtacaaacttaaaatcaatgatatacagtaccttcattctttttttgtactaacgggtaatcaaaaatttcagaccagacactattgttttactttcaaggatcaaaatttacacatacactcaggacatctcggttgtctataaatgctgcgtccataaggcctagtacgaagcttttggccttcctctaccatttttctcacacgatcttcaaaaatcttccactttattgtttcactgtctgataagattgctgcaagcctcttcttgttaggtctcaatgttggtgcctgaccgtttccgtagtagtttctaaatccagacactaaggatgatagttgactcccagaatcagtcattgcaaagacatctgatgctatacaagctatgaaatctagtgcagctagctgcaaaacagcgtccgaaaacatcgaaatgaagtttgagcaagaacagagtaactcgggaaaaagtaagtttaagattgtttatatctttttacctgagaagagaagttcttgaatggcgcaagttcttgaggtgtaaggagagtttctttggtcgcgatattcgggtacagtcttgttaaaggaagcatacgagaagagcctccatagatttgagatccagctaagtaaatatatgtttttctcttgaatccaagaccagcaagaaccagagttgcttcctctggtgttagtggacacttgcccgtttttcttaactcttctggggacactggcctgaaaaataagaaacaagatctgattagctttaaagaacattgaagagggcaaaagtagagttgtttcatctatcgttgtactttgatttcttcaaacgtttgagtagaagagggaaatgatcttcacggtaagcttgaagctctttgcgctcggcttctcctcctccaaaatcgcatagagaataagcaaccatgtcttcttcaaaccttagatgcaaagcaagatacttcaacggttcttcttctcctttaacagtacttttcaccatggattcaccaagtaatgcttcttccaatctgctacgcgatgttttgaatcttcttatccgtttcaccaacagagatcccgcttcttgaatcttgggcgcgaatttcagcgcgtgaaagttgcatttacatcgtaatctctttaaatgaagcaaaagaaaaaaccatattatttctaagaaaccaagtgagtactctaattatgcattctcattttacctgaacgtcaaaaggcaatggatcaaacccgaggcgattcccgtatccgaaaagatgaaccattccatacttctttaacaaaggaagaacatgttcgatgtaatcgactggtgttgcctcttttacaagctccgtatcagtaacctatgtagaaaaacaaacattatgaattttgcatctccaataaattagaccggacaaggaaaaaagggagttcaaaaacacaccaagctgagattcttgttatcagtagattttagatgttgaggaagattcttcactatattcacctcatctttcagatactcgataaaatgatcctcttggtatatatcaccaaattggctgccatttacgcactttcgcaaaatcaacaaacaaattttttttataataaattttgaaagtcttgaggagtttaaaatacctaggatctttccatacattgctgtaaagaaaccgaggaagaactagagtcgcgttgagcagagcagcaaccgcaacagcgttacagatctgcaagaaactaacattcactatatatactttcttgatgaatcaaatatataatgattactttggtatatacttacagccacgcgctgttgattaaggcctccatttgcactaaccatgatgtaaccattgcttaattctctagacctctctaatgccacagctgctttgttattatctgcacaaggcttccactgtgatgactttgaagatctttcctcccggaagtttggtgtatcgggtttgaattcattcttgtaatacaaatggagaagaagattattaatgattcaagcaaataacaaatataatttcttacattttcactaacctttgcaagagaatccgaagctaagtttagaagacggctatacatttgaactggtgaagcatctactgctccattcttaattgacataaacaaaaattaagaagcaataacaatggaggatgtataaagaagatatatttattctcaaaccttatgcaaagtcatattgctcaaccttgaaatgtcttgcaccacggctctactatcggaatgaaagatcgaaaccataatggaatccatacagaaaatgaaaccggtgactgagatcatcaaaactatcgacttaaagttcctacgaagccatgaatgttgcttcttccaaaatttgttgctactaccactgctttgatcatgcttagatccttgagccttggaaacttcacttgcatatattcttctaccgagtaagagatcattaccagataaagaatccaaacttctcctcccaaatttctcttctttatctatggtttcaggtcgaggacttctcggtgatccctgtttccccattaatgatctgtctcttctctcagctcataaactatttaggaaatgcaaaatgaatcaagaactctctcgatgtatggcaagcaattaagagattgatggaaccaaaatattcaacaataaaatatgacaattggtgaaaaaagtgtggaggaatcccgacagaacaaattaattctaagtgaagctaacatagttgttgaggaatctctgaattcttttttaatgggaagagtaaaacgcaaggcaaaaaaaaaaagtttttataaataagaagagccacgacataaaccttaatgaagaagattgggtatggagatagctacatgtgaacaaatcacaccagaacagatagcttctgttcttctgctttctcgttcgtcgatcgttaccgatctccatgacggaaccgaatcttctatcctttatttaacaatgcgtgtgtttgaaactgtgttataatacctagatcatagaaatctgtcaggaatctcaagaaatttatccctgtattatattttacccatttttgttttttttagcatagacccgagaatgacttgtgacgcaaacttgctctttcattgttttgttatataatattagatgtaacggtgtgtcaactatccgttgtagtctagctggtcaggatactcggctctcacccgagagacccgggttcgagtcccggcaacggagtttttttatttttattttttcgttgggggtaaattcttttttcgttgcttagttttgaaaagtgttattgcgtagatggaaatgaaggttcgttaaaaacaaggattaacggaaaacacttcaatacttcatatttggaattgatgtttttcacttgagacttgagagtattttggcatccaaaaggacttaaacacaataaccatgacaactagagtgtgtggaaactcttgtagagaaacctcagtgaaggacttatgtgatttttagaaatagaattcaatggtggacggatggtagagttttccgccataaatgttaatccgcatttttccgccaaaacatgtattccttccaaaatgtaaattcgtagttttgccataaaaaacgcaaaactataattttccaatcaaaaattgtgatttcataaatttctcaattttgatgataatcttgatgaaaattattgattattattttatattaattattaattaaattattatttaaatgagttgggaaacccataaactcatttgaaagaatgagttgagttgagttgggttactcattttgacactcctacatataacattacataatcgagacaaagagtcttaaataaaaacacacatacataatcgaatctaatcttataaatcttcctgccgctgcttcttcttcttcttcttcattcttcaaggttgattgttgtcacaatcatgcacattctagtgaattgggtctgtgaaatgattcacctccaccttttcattctttccacccttcttcttctgtatgtacttgctattgaatgagattgtcgtcacagatttcctaatggctccatatttcttcttcaaataatgaaacaccgttgcaaccttcttgtcatatccttcgtcagcttcgagctccacttctcttctttaagattctccaacgtaacattcaccttcctcgccgcagatgcaacagcatggctcgtgaatgggatcttcctcttggttgggaaagatccgcacttaacaacagccttaacagctttgatcatttcttgaacaagatttttcattttgcgctttgattaaaaaaaggattaatgtatgagttatgagttatggaatgctcatacatatagaagaagaataagaaaaagaagaagaaaatattaaattttgaaatcatcattttgatgagaaaaattggatcgtgtactctttggggttttagaggtcacatagagcacaaaaggagaaaaaaatggagcgtaaagggagaagagaacgaagagagagtgaatctttagttgcaaatggatgtcacgtagatgaataatattttgtataggattgagttgaataatattcagcgttttttgttcaacacaatttttccaatcattcatctacgtgacatctatttgtagcctacatttcactaaatataaaaatatgatagtttcctctactactataaagttcaatagtatttgttttaaagatgtcaaaactataaaattaatttgaaatatatacctatatatctttcttaaaaataagctaacttttttggttttttgtttaaactaatttataaacctgcaaaatattacacttacatgtgattttacacaataatgcatgttaaacaaaatcttaatatacatgaataatacataattttaaattaagtttataaaggggttaatcagatgaataaaaaatctcatcgacaccaagtaattattttaacatatctattttaattaaataataaatagcatgtaagactttgttaacgtatttacataacatcatatataattaatactcttttaattgataaaatttactaaaaaaatttaactaatttttgcataaagtttttttttttttgagcaaccatcaatgtttacaagtgatccaattctaacatcaattaaaaacgaatgatacatttattgagcataattgttagaaccgttacaaatactaacatcatttgtattaattgatgcaaaatttacagacagaacaaatcaatcaaaatattgcatgtcacttttaatttgtttatatctccatcaattattaaagttagttcttcaaaaagatttgtttagtttaattgaactcaaatagttcaagtcttgtctaaatggtgttggaaaacttgctaattctaacttaatccaatgtttgttttttttttcaaatcaccttttacatgctctattagctcaaaattaaggaagtgaaaagaagttcaccaaacaccaaaatgtgaaagagaggggtccatgagtcaatcactttcaaaaggaaagcaaaacccacatgatcttgcttccggatatattgaaaacacacttctcttcttcttcttcgttataaatcatacaattatatatatgttctctcatttaaatcaatgaagttttatggaaataagcaaaaatttgttaaggtttgtaggtaattttctttgtaaatttaagttcgaaattagatataaagacgatcatacgaccagtaaatgtattgttttgtgatatacaaattttcgaaaagtattaatgaataagaaaaagatttaacatttactgaaatccaacaagatgcgtgcatatcatgattcagtgaaaaggatccaaactaaagttcgactatttcttattggattgacttttgatgtcacttaacgacaacaaaacgaataataaaagttaacatcaaaaaagacaataggaaaaaacacaaattgcaagtatgataagttggttctaatagttgttatgtgggtttggaagaaccgtactagtatttactttcttttctaatttatgaaattcttttacgataaaaaaataattttagctctcgattgtttattacaaaatttacatttataatattgcaatcaaagtattttatcaagtttcttttaaactactaaaaatatttggactggatgatttttttaatctctaggcttaactaagtgaattatggaaagtgatgtgtaatgtgtggtgatgacatgatggagacccaatgatgctacaacatgtgtctacccataagcacccagcctagatgaacaacaatgtccattataagataatgaagaaataaagaacaagatcgaagaagaagaagaagaagaaaataattgaaagctttatagcgaagaagaggggtcccctcaaaatgctaatagacgatggatccaaaaggtaaagtacattttgcattacatcgttgggtgcaattattcattccatctatctcaacccctcttttgttccctctccccaccttatgtatacaaaaaaaattcgaaatatttatatttgttacttgacatctttgtttcccttactactccatttgtttgtttatattaaggtattgttcaaatgattctacatttttcgtgtggtttatgttcaaaggaaagttttctaaggaatatataccaaacttttgaattttatttttggtaatattgttctagactttaagacatatatacggatcacaatttgtagttccctatactgttgttggtgcagtgtatgtatgcatatataaatgaacaaggcaggtcatgaaatttaaaagaatctttcataagctttaggtaaaatgttatcgagcaataccaaaataatattaaaaaaatgtaatcctaaattcagccgctgaaaaagagcagaaaaagagcaactaacagaaaccataaaactatatataatacacactcacacaaaaatatacactatacaataatcaaagtttacaagacgacatcaaaatcgaaaataataaacgcaccaaaagacatgactataaataaataataaacacacatggtctaaattcctcaaaaaaagaaaagaattacaatttaaatttagttcttcttcaagcttctctcttcaagatcactaccttacgtctctctcatattcatcttcaatcttctctgatgattttttacaagaaccaaagtctttaaattatttgcttttcttcactgaaaaagaatgaaggagacaatcaggtgttgcatcgcttgcattctaccgtgtggagcgcttgacgtgatcagaatcgttcactcaaacggacacgtggaggagatcagtggcacgatcacggccagcgaaatcatgaaggctcacccgaagcacgtactcaagaaaccatcttctccaacgtcagatcacgacgagcgtgacgtcatctcagccacaaagatcgtcatcgtccctcccgaagctgagctccaacgtggtaagatttatttcctcatgcctgctactaaatctgataaatgcgccggaggaggaaagatccgccgggaaaaaagtaacgcaaacgccgtcgtcaagaaacggtcacagtatcgccggcagcatcgtgacggtgatgagaaatgtaacggcggcgaaagtaatgacgttaaagataaaaactacgagaaggatttattgatctcgtctgatcgatacttgacggagatattatcggagaaagtggcgacgcaaaaagatcggaggaaaggacgcgtcggcgtttggaggccgcacttagaaagcatatcggagatcataactgaagactgagaaaacggcatcgttttagtggatttcttgatagtaacaatcgctactttttttcaccttctttttttttaaactatcgtcagttgtgcatttcaatgaaaatattcaagaacaaaagattttaacttccgattcacactcattcaccccaaaaagaatattttgtttacttcgcatcaatttcttaattgttttagatgtgtactcttcttatcaaacttactacacctttgattatatcctaattatatttaagttatttttcgacccaagtatacatatgtaaataacttttttaatataaaaagttatccaacaattttgatataaaataacaaactagtattgaacattttagggtgtctataacctaaacacgtgtgttttgcttatgtataattaacttataaacagaaatgctaagaaaaacgaggagtgtatatgttatttgagatgatggcaaatttccactcttattttgcatatccaactcatcgttcatggataaacctatgaatcatcttatagatttcagttttgagccattaagtttgatttgtggtcatcaaaatcatacactcgtcctcaaccataaaagctaacaaaaattaaaagtgggaaaaaaagagacaatggaaaagaaaagaaaaagcttttattcttgttagtaaacgactaacgactatatggtaagaatgaagatagcaaagattaaaattcatcaaacataatttagaattttttttgagtggaatctatcaaaaatgtctcagcttctctcccgactctccaatctctctcccaggagcccattcactcgtaagcttcacagtttaccgaacaaaaatgatttttttcctctggaaattaaattacgttatgtacttgaaaaaaagaattgaaatttcagtttctgaactctttggtactaatttggttaggttcgtttgttttcatcatcatccaccaacccctttttgtcacttgcgtgcaacacggaagcgttacgaagtggcggaaacattggagatgttctcttgttcgacgctgctaaggaatatatgctcactgtacctgacaaaacagtacctcaagagatcgttgatgggagaggactcggaacttctcatggatgggtagttttctgtgaccctcatgatcgttttgtgtgtatcagtgacgtttttaaccccttggcttctaagacaaacccgaaaatgattcctctgcctcccgcttactgctcttaagtcttgtcaaagccaaatcttttggaatgtggcaatgtcctcttctcctcctgatcaagattggattgttgccatcaagttcttggatagacagcttagtctatgtagtcctcatcgtgacttgcggtggactaatatcttaactcctttggacttttcggaaaactcaaatctgatgttttcaaagagagaccaaaggttctacttagcttgcatgctcctgtaggcaaccgtttgttctcatatgatctcaactttaaactagtcaagaatcctcacttccatgagttgcagttccgagaccttccggaatttggttttcttaatcttgatgactttcccggccacgtcatagctggttttggaagctcatcataaacacggttacaaattcaataatatttcttacaacaagtgaacaagagcaataaccatatagctatttgatcaaatctctcgactaaacatgatgaatacaaaatgtggaacaaaatattaatcgaataagcaccaacactgttttgtatggacatcgcttcctacaacctgtgcaagatggtcgagacatatgattattgggcaacacaaatagctttcttccatccttgtagatacacaatgaaccgggcttcatgtataagtccttcccaatcagacatctgatgtgtaaggtgacacaacaatattcatcacacttataaaaccggtctttcgaacttactttttcctcacagacttcacaccaatatgtctcagtatttgtctccttcccataagaaagagtgagaatatgatcatcatgcttatacctcacattttgaggtaaagtagcacatccaaaacacaaagcaaagtcgcatttgatgcaattgaatgtttcatttgtacattcaagtcttgaatctttgcaaacagagcatcctctttgctctcctggtttagatgttaggaataaaggatccatatgactttcatggactaatggctcagaaattgtagcgcactgcacatgaatcttaaaataacatccttctttatcacacacatagaagaaacctgctatgcacgaccaaggacaagctgaacacttatcctcatactttctaacttcgttatatcctcccactagggagagcataggtggatgtatcgggtgatgtattttgcgagataaattcgcacattcttcgtgaagaatgaagctgcattgtatacaagagtagaggttaccaaaatagattggtgtgatgcatgcatcacactgcttactgtcatcgtaatctctgtctttgttctcatcaagtctcaaatgatgttgttgatgactaaaatgttgtatgattccatcacttatcgtcacaaacggctcaacttcttcttcaatctcttctaacaccccttcaagctctatgccatcccacacatttctttgtgtggcacatcttgaatgtgctccgtacgaacaatcatccttgatgcaagaataacccccaaaatcgttgtcgatagtttcgcgacaaacaccacaagatctatctcgttggtcgaacaaaggggtaaaagagatgcgatgggggtggcgagatatccttatgacacgtggtaagttgatacatcttagatggaccacaaaatcacaagggggacacatatagataggagagcttgcatcggccaaggcgcacacattgcaagttaagaaagcttgtctaggaaagagagcaagtgtatgctgatgccaattcggatggtctatatacaagactggtggtttttccgcacaaactatattcatagcataatcacaatccgagcaatagtagaatatcttttcgagatcctcctcacaacagaaacactttctggtttgaatccgatattgagttgctgaaagatattatttgcttaatgagtgatatgagctccgactctggctccggctccgaatccaagtccatagagctgacaagagagattagttgactaaaacgtaaaataagtgatttcgtttttgacatcttttgcgactcatccaactcctcacccgttaccacaaccgtgtcgactgtgagtatttgagaaatgactgatatgagctttgactccatctccgaatctgaactcgaacccgaatctgaatctgtgaaatccggctccggcgacatgaaaagactgtatatttgaacgatgatcgatatgagctccggtctcggcttgagtttgaatgtttcagagtagagtgacataacctgtgaattaggctttggctcagaatcagaatctatagagttttggagagataattcttgagtaatgagtgatatgagattccttaacggctccggctgggaatccaaatccatggagttgaaaagagagattgtttgagctatgagtgacatgagcttcgtctcgggcttcggctgcgaatccaaatccattgagctaacgagagatattatttgaataatagtacatgatacgagctccaaatccgaagagttgtctagagagatgagctgagtagcaagtgatatgagcttcgactcgggagaatccatagagtgcagagagagaacgattacttgagtaacgagagattttgagtttgaatgtgattaacttagtgtttctgaatttctaattgtaataaaaacacatcttacacatataacaatgttagtactatatacgtgtgttagcttacaggctgtccgactacgaagtcaacgatcgatttatagattagatatgtataaatcatcggtagttacgtagtattagtctacaatattacaactagtattcgagtttctaaactaatactaagaattagcctacgcaattactttcacaaaacaacaaaatcattattgaatgatctttcctttatgaggttgtccgaacgcaaagtcaatgatcgatttagagatgataacagatataatagtgcaacttgctggcatttatatatgttgagaatctatcaccctcgaacacgtaccaactgatcaccaagatcaggcggctaaaaagtgcactcggtctaggagtttcgaatacttgagttaaaatgaaattttatctagttcatatctttgtatatagactacaatacaaaatagtgtattggcaacaacgagaccattactatgggtgttaagtgttaacataaattgtttgtatcgtatctacttattttcatgcttctctaatgattatatatttgtatattacatcatacgtatttttatcatcaggttcgagtataatatttattttgaaactacaaagccacaatgaaatttggtttattcactgttggtgactttcccgccacattatagctggtgttggaagctcattaatttgactaatcaaaacaacagaaaacagattcaataatatttcttacaacaagagcaatatgttgaatacaaaatatggaacaaaatattaatcgaacaaacaccgatattatattattttgtatggacaacacttcatacaacctatatatgcaaaatggtcgagacatatgaatatatgattgtaggagcaatgagaccatgactctaggtgttaacacaaattgtttgtatcatatctacttatttgctatctcttatatgattatatattacagtcatacatacccttattatcaggtttgagtttaatatttgttttgaatttaaagcttcattgtttgataaattaaatctaaacactatatggacgtaagccccgtcgaaagataacagaagtctaaagcaaaattaaaatttgttttgttctaatttctttcatttcaaaattataaagatattaattctagaaaatccatatagttatctcatatatgacaataaaatatttaatcagtacaactctaccaaataagcaaaatataagcaattataaaaaacttataacaaaaggataaatattttgtattcagtttaagaatttaaaacaaaaatagattacctgtttatggaacttcggtttttgttatggtagaaggtagattacacagaaagagaataagaaagatgatacaaaggattttaggcagaaagaaataattatgaaattgcatggcattgttaacatagactagaactctgttttgaatgcatagattattttttcgaaagagaaaaactttcatatcacatgatttttttatttttttttggatacaatcatacatataatgtttgatggatgaaagacaaagcgaacgccaagtataatttgttcataaaagatcagattttatgatatctggtgtttacgatatcgccaccagaagtatccgtcattttgaagaccaagttgaaacaccataaggggttgagtttgacagcctccctgtatggcttcctcccacttctatataacaccaacaactcttagttatgcttcttcttcttatattagttgagaatgaaattaagattttcttcaatatcaaagttggtgttttagatacaattgagtcttattatgaggttttgggttcttttgaaatcctttgatgtctcttcttccatgcaagttcgaattgtaggatacaaaaaaaaatgtctctcttctcttgtcaacttgaacaaaaccacttggaagatgattttccgtgttctatatgcttaatgacattactgcttcttgatttcctcttgtttttaacccaaattggtctctccccaaagtataatcttctgggtctttttcttgtaaaatttggcatgctccaagatctatattagtagctatctcttttttttttggtttttggtggttgtttgccttgttcactcctccatatatagtaactcttaaactgtcgaaacattaccgtataacatgtttgtttgtagtgattattttaatcgatgttaatatgcatcagttgcaaaaaaatgatattaattttgcatcattgaatataagtgatttattatttgtatcaatttatcaaaataacgttaatatttgcaacatttataataaataattttaagtgtttatattaattataataacttataaaataatactaaattagtttttatgaaacaaatatctttattaattaatattaagcgaacacttaaatttagttgggatagtaactttacactttttggacaccatctaaaaccagaattatgtaactttacatatataaaaaaattatggaggtttttttttccttctgtgggagatatgtggtatgtaaacaaattgaataaacaattatatcagttagtgcaactgatgctaaatctgtaattagcatcggttattattgatttaaattttgtatcactttctaaatgattaaaattcacatatttgtattaatattgtgaaagtgaggcaaatagacctagatttgcattaattttaatgaactgatgtcacacaaactaatacgacatcagttattgcaattgatgttaaattataatttttgtatcgattgtaaataagtaattcaaattagtattttttaaatttttgttgcaagttaattgatacaactaaccttttttgtagtgagattcttgagacataatatccctgcctcttcttcttcttcaattgttggggttgttctcccaatcataaacattctggtggatgtaaacataaagagcaagtgattttaactcttgtatagaaaactaggagtcttgaatgcattggagaaaccactttgcatcggatatgcttaactaatttacctagttccaagaattataaatgtggaattccacgattacaattaaaaattgtctacatttattgtatcatactagaacgtactatttgtaatatgtccatctcactcgttggactttgtttcaacatgtaaccaacccaacaattttatttattgacaaacaaacaaatccttactcaaataactacaaaacttgacgaaacatttatttgacattgacattctctcactttttttccgaaaaccacttcatttttaaattacaaaatcgaacatttattctgtaatcaaaattagaatttaatgttcatatcgtgcgaaccaataacctttctttgaaccaaaaataaaaataaaatccttcttttctcaaaaccccatcacgtaataacacacaaaatacaagggtaatttggtctttctacttttctgtaaaccccccactggtaaatgaaattggaaaggaatggcttgcgatattggcaatgtcaatgtctctctctctcacagtctctttccctctctgcctccaaaatttccctctctgtttttgagcagttaagctgcctcatcaatctcactcaccagaaacccatcaacaatcattaacctttttctcgttttcatcaaaacccattttctcaatttcttcaaaaaaaaaccttttgattctttctcctaatccttttcccagctctcttaatgctttagccacaaaactttttgtatctcaatgtgtgacagttttgtaccttttaagagaaaaaatgccacggaatgtatacggtatgaaccaaagcgaggtgtatagaaatgtcgatcgtgaagaccctaaagcaattctcaatggtgttgcagttactggacttgttggggtcttgcgtcagcttggtgatctcgctgagtaagtattcaattcgagctaatgttgcgtctcttttgggtatctctactgttgaatgattctttgagctagtggtgaagttaaagatgagaatcattactttgtgtgaaagtaattgcctttacttgtttaaggtaatctaattggtgtttgtagctacaaatttgggaacccattttgattgcatgatcctttgaagtttttgagttaagctttagcaaaaaggaagaagctttattcatttatgattctatgattgttgtgatgtttctatcaatcattctccatttttgctgtgtttagttttgtttcatgagcttagtttatgtttcttagcaactccttatgtggtgactctttatgtcggctctgatatcaagcttagtttgggtttggagtgatctctggttgataagggtcattttagcacaaaggaagaaactttcttatcgattgctttttctcttgattaaggtttgcagcagagatatttcatgggatacaggaggaagttatggctacagcttcaagaagcaatcagttaaagattagattgcagcatatagaagctacagtgcctccactagaaaaggcgatgcttgcacaaacaactcatatacattttgcatacacaggaggtttgttttgtcttcttccctcttgtcaatcttcttattgtcttgacccaaggtgtctgattcttgttaggtttcacattaattcttttaataaattatgtcacatccttagttcattgtaggccttcacatgctttttcacttaccctaaaactaaaactttctctgacgaggctagtttagaatctggaatgattgagaaactaaatcattgtatcttctgcaaaaccttaaaatagattaacttaaaattgaattgatagtattagttgtttggttccccttggcaaacttttatttattgtattgaaaccgtggaagtaatgggtggtgagaaagtggtcatgcttgtatttttcttactttatatcttgtgaactgaaggagtttaatggggttcaggtctggagtggcatcctcgtatcccaattacgcaaaatcacttaatttatgacgacttgcctcacattattatggatccctatgaagaatgcaggggtcctccacggttacacttgcttgataagtatgcctcaagctaaaatatttatatctgatatgtatgtactatgtactataatccatcatgttatactgattctttgctttattttctcagatttgatataaatggtcctggatcttgcttgaagcgatactcagatcctacttatttcagaagagcatcaagcaacctgagtcaaggaaacaagaagttccaaaaagataaaaagcattgtaaaatgaaggtgtggttctcagattaaattggtaaaccattttctgtagaattctcttttacttgacacatatatatctgttttctggcatggacagaagaaaaaaacttcgtcaaggagtcgagatatgtcacgtttggcctccttggctaaccagaatgccaggtaaattatagatattgttggcatatttaagtttccgtgcacctaaagaataattaactcagacatagttcactccaggaagacatttgcttcatttagcttcagtggacaaacctcttctaccaaaaccacctcaaccagtgacatggaaaaaagatatgattttcaagatcatcattctcgctcttttgagtccagaagtggttcaggctacaatgaatgcctttcaactgcaacttcttcactgaagactggagaaagaccgaaaggggtgttcgtttcatccagcttgacaccaggctcttgcactattgcttcagtcctttctgaatgtgaaaccgaagatgctcatgataatttccagtttagtccttctcaagggcaagctgctcgtggctcttcttgcgttagttgggatgagaaagcagagatagtggaatctcttggtctgcagacagatgaagcttctgaaatggtggaggcgaactctgttgtagatactctagatgagaaaccaagctatggggaagggataggtggagttgatttccattctaaggacaatgaaaatgataaatcagaatcaggactacgaaaacgtgctgggattgatgaggtaagagagataaaaaatggtcgggagattgtgggagaaccgagggatagtgaacaagagactgaaagcgaaggggagtgttttgttgatgcgcttaatactatcgaatcagaatctgaaaacaatcaagggcttcaaactagtcaagtgagcagttcctgtggtgttgcagatgagaggttggaaaagtcagtgtgtgagcaagaaacagagcagaattcctacagtgtcgaagattcttgcagatcaatggatgggcttatggccaacagttttaaaaatgaagagaatgcatcgtcagaaaatgtatctgttgaaatgcatcaacaaaatctacaggcgggttcagatatcaaccgcttacaaaaaaatgatctttgtgcaaacaaggatatgcgtaatgattctggtggaaaagataccatcacatttacatttgtgccaggtctcgagaacagcttagttgattcatcaaaccccttgattcatcatggcctacaggaaaatcaagaaacagaagctgaatcttctggggatctcgaagcctttaaaatatggactaatggtggtctattgggactgaaaccatcgaaacctccagtcttggcaatgccaagttctttaagtccagattgcaagaccgaggaaaggacagttggttttgcagaagctgaaaaagataaagcagatgatctagttgaaaatgcttcacatagacatgttctgaataattcaagcttagcaacgccaggaacccaaaatccaggtagttcaaatggcatagtcatgggtattgtagaccaaagagagtcccatgagacttcttctggagtttttggactcagccacaagtttcttactagtggtttccgcagaaaggattcatttgcacatgatagaaagactgtaccagcaacgattccagagaacgatgaagtgactacagagaggaggaggttttgtgaccaagatattaatgagaaaacctttatggaccccttcagagacgaagctcctattgattggatcacttcgtctccgcctcttcaacacatgaaaatatctctcaatcccgctgacactcttcaggcttcgagactgaagcttaaattttcagatggagacaacacttacaataccttttcctccttccagttgcttccagagactggaacttcccttcctgattcttattctgacgacgacactttttgtagatcatctccttacatgtcagataccgattatcttagcgataatcactccttgtcaaattctgagccgtgggaagaatccagtgacagccatggaagaaaagagcaagaactatatgattctttccacgaaagtaggcatgttgataacaatgctgaagcttcccctctagggatcaaatcagaaagttcttgcgtcgccgtaaacctctcatatctccaaaatcctgctgagcccttaccaccgccatttccacccatgcaatggatggtttcaaagacaccttcagagaaaatggaagacaaaacacagtccctacaactacaagaagctctcaggtttgcgtttgagaagcatatttcattgcctacagctaagaacgaactgcctagcatggtgacttctgctcctaaaccagaaattaaggtatggagaagattttgactctttcttcctacttttctacagtgtgggtcagttccatatattccagatgatcgttttcaatatagttcaaattacgaatcttaacaagcatatgttctcataggcccatctgaagaataatgtcagggaggagaaacaaagtgccaacgcaaaggagactgaaactggagacttcttgcaacaaatccgaacacaagtgagtgcaaatagttcctttttgtgaaagaaagttatattctgatgcttgatttgttatatcatcttttgctacattcttggtttctttcaaatcaaagcaattcaaccttaggcctgtggtcatgacaacgacatcatcggctactgcaacaactgaccctatcataaacactaagatcagcgcgattttggagaaagcaaactcaatacgccaggttcatcctctaacttctgcatctatatatatccaaagcaaatctaatctttatttcagaatctaagtactttttgtcttaaatccaacacaacattatctatcactcactcttttcttcttttcaggctgtagctagcaaagatggagatgaaagcgatacatggagtgatacgtaaaagccctttatcagattccatttcatctttgtaatctactctctgaacgacataaatggagaaaaggggttcaagctagtcctgcaagaattttttgtattttgtatcatatctaatgtgtggatttgtgtaggtgatagtaaattttgtcgagtgtgatctgtatcttcaagaaaataaagtagtgcaagaaataaaaatgaaagtaaaatctataatgcccattcatcttaaggaaaactttctagaacttgggattttagccacgagcttgctacaaaaaaaattcatgaccataaagagctaaacttaaattagtcatggacttttatcctagagcaactaagaagaatccatggtcatagttttttttttttgtagtaccactaaattttataaacaagatcaacatttgacttgatattaccatcaaagcaagtcggcaatagcaacattgaacgacaaaacaaagtaatgattcacgtttacggttattcgatatatttcaagttacgaatgagaagcatatgttctcatagacccatcttaagaatattgtcagggaggataaacaaaatgccaatgaaaaggagaccaaaactggagacttgttgcatcaaatccaaacacaagtcagtgtaatcgattcttctcatgaaaaaaaaaagtatttggattcttgatgttatatcatctttaattgcattcttgatttcttccatagcataaatattaattcaacctgagactcgtggtttccacaacgacggccctaccatcaaaattcagatatcatcacgattctattttggagatatgaaaactttatacgttaggtgcatcttctgataatatttgcttgattagttaattaagattgtaattctcctctctaaattactctatgcacgacaccttaggttgcggagagacaacctataaaagggtttaatcttgttatgcaagtaattcttattgtgtcgaatatctcatgtgtttattgtgtagtttataagtaaattttgtcgtacgtgatatataccttcacgaaatgaaaatataaaatatatacaatgctacgtttttttacgtagtggaagtaatagattagtttttgtttgaaatgcattataaaaaaatatgtttttctattcgatctctgaactatatggaagagtatcagttttgtgtcagctgtgctaccgtttcttgaagcaatcgcgcagtttaaaaagattgaaggagaaatattatttttaaaatttaatggattatggatttgatgatataaaaaaaactttaaaaaaatatcaaaaaagtgagttggcaagtagaggtctcaaaacacttaagccgtgaagttcgcttacgttgtggcctttaattgttttcttatactatttgccactggaatcaaaagattaaaaaataatagagattatgttattgtgtgcactgtattaatttcttaatgtctgtctcgcatttattaatatcgaatattaaatcttagaaatttgcttgtggacatgtgatgggattatttttttctaaatgggatattgaagtactaacagtttttgtggaaaaaatgtttcttgaactatagaagtatggatgacagaattataacttcagctggatgatagaaacatacagcataattgtgtctacacatttttgttgttgaaagtgcccgtttaatgattgatcaagagcttagtatggtagtatcctacgtacattagctaggtcttgcgttcaatcccaaacccgggtaatgagtatttcaaatttccaaaattcgaaattaatttttttaaataattctcctcaattccatcctttttctaaaaaaagttgtaattctaaatcgaaagtaaagattttcaaagcatgtaccctcaaggaaaagtgcccctttttctcaatgaaactaaacacgtataaagtttaattatttattcaatatcccactttatctagcaataatcaaacattatcgactttattaattgtatggatgtccttttttactgtggaatatggaaccattagtattgaaagttgtaagcctcggaaagaaactttgatcattaatatcaatatgatatccttttaaaccctaaccatacgtttatagagctaatttacattttatgtggccatgtgagataacaaactaaatcaaatttgtatttttggacgatatacggtagacgagtttgaatccggatagtgagttacatacgatattagtatgaactatatatatatgttctagtcatgctctaatattttaaaatatatctaagttatatatgagcatactcgagaatttcaaatataaatatataatttcatcctacataagatcaagaaagtacagagtcagatctctataagactataatagatatgaaagagaaaaataataatttatttctttattcttctaattaatttcaaatcactttattaaagataggattaaagaacaaaacccatataaaagactttgctttcctttgtaaagagagctttttttataaagtgaattttcagaacccaaaagaagcacatactgaaaagtttaagatttgaaaggagaaaagaaaaaaatgggcaaccaacaaaagttagtcaccaaatccattgaaaccctaaagaaagaagaaaaaaatagcctaagaaaagataatccacctttacaaggtacaactaattacatgtgtctatatatatacaagcatgttatagtttatacatatacagagtataaatctatgcggaacatgactaaaccttcctttgtttttataatgcatatttgtctagcacgcaatgtataatatgtattagtactccgtatatattcgaaacatgtgatctcaattctaaaatgaagaagtatctacaatacgttaataaatcccacattgtattgccactacacaaacccgtattatattgacatgatttttcttacatgattatagaaaaattaaagcagttgcgttgtattaccaaaagttgtcgtataacctacctgttacaattaatatacatgcatgcagatgtgaccattcttaaatcttaattgtcttttaattttgatttggccataaacttaaatctaatcacctttagaggaatatgaatacaattgtttagaatctgaatattttatctttatatgcatatatactttgcaaaaatagctcaatggatgaaattctttgtctacgtaaatatatacgcacatttatattccctttttgtatacgtctattacattcatctttaatttatatttaacttaaaagtcgatctcttttaaaagtgcttaaaagttgttcttttgcgactatatagtataaaggtaccaatgagaaaacatttagtataaaagcacgaatttgagaaaaaaagagaaacatgaacatcgattagtgctttcctttttcttttactttcttttcctcttgttttttttttcctttccctcatctttaacacttgctttagtgtttaataataacgtacgtgaaagttaatttaaacaaaatattaaaagaaacatgctttgcttaactttatgtgtttcttctccaaggtaatatccactcaaccattctagtagttgatcaagcaaaattgcacaaattattagtctaattgtaccactatccatggaccatgactgataagaagggatagatgttccattttggtttaacatagtgttgtccaactagaactagattgcacatatactattattagaagttctttttttcggattgaaaaaccaattccaaaattattttctaaattaatattttggctgacaaaaaaaacctcaaaacataacaagcatcaaaatccaaattcttgtttccacaattggtttctctccatcaatcagatgtttcatcccaacataaatgatcccttgtaagatcttaaaaaactttgaaaaataaattcaaattaaatatttattccgttcaaattatacgattttttaactaaaaatgcagattaagaagtatctttttttaaaaggttcatccaatcatgaaaaaggtacggcataatcaaaataattagaaaatatgaaataatatataatttgtataaaaacttgaaaacatttataatataaaacaaacaagttttcccaaaacatcttctattataaaacgaagatggtattaattttttatttttctttaagttttattgtagttatgaacacaaatctaatattaaatttttttctatagtttcattgtcgtctcaataataaaacattagatcattcacttcaatatatatgacgtaaacctttgaatataaaatttacacaccccataaaatcatgaaatgtaatctactggtttgtgaaaatatgaatccaactcttataaaagaaaaaaattacgcgccttatcaaaacattattgtttttttttgtcatgtttactgacataaatttaatgtagattcaactctgcttatattattttatataagaaaacaaaactctactaatactattaaataaaaagggactatatttattcgaaataaataaagaaatgaagaaaatggatggatgacttggaaaagagtggccaaaagatgatgtgagcctagaattgaaagctgatccctctactcattcatgcttaattatgcttattcatctcttctccttttctacgcaacacaccaaaaacgctctctctttggcggctttgtccaaatccaaatcattctcacttaaataaagattcattgaaatatattaaggagatacacataaaatagaaaattatatgttaatagttgtggttctcagctgatagaaacatcatttactttttcaatcgcataagtttccatatgtttttttcctaatttctatattatttatacattttggagattttgataaatattttttgtttaatttaaacctatagacctcacatattcatctcatgttgaagaactgggtcaaagcactggggtcgaaaccggtagtaaactagaaatgagagttacctacttaaattgctctcctcatatttccaaagatgcaatcatccaaaaatgttagtcaacggtgaaaacaaaaagaaatggatgatgcttatgcgaatttaaaaggaaataatagttatattatatggataatataattaggttttgaatgtgatcttaattttgttttgtgatacacagccccagttcagaaaatattaagaatttgccactgaacatacgtatcccttccaaatcactgttgacatactaacatcattttaaaaatattcaataatatcttaatataaattttatgaattaattaaatcgaacaaagcctttttttacccaagataaacaaacatttggatagcttgtaagttaattatagtagttttaggcactgtaagtatcccgcataattcatatattattagtgatttggaaatttagcaaagggagtaaattataaaaaaaaaactagaatttacacaaattttgataaaagtcatgtcaattttttattttttttaaaggagatgttaaacatcactgttcctaaaaaaactttttaaaatatacggaaagacaatggagaactgtaccaaaatacacacattttggagaaaaggaaaaaaaaaaaagcaaaagaacacacacattttgtcagctgatatatatggatcgatatttctttgaatgcaataagcaataaatgtgcctaacatattctttcattatttttttttaatattctccctactaacactattgcttttctctcctttcttacgataaagatataataatgttttcacaaaatctttttacaaaaagaaaagaaaaaaacacattgaaatcttcttcctataaacgtctcttctctctttcatcactgcaagaaacttaatcacaactctctctttaatctctttgtctctctctctctctctctatctctctctcattttaatggcgacccaagattctcaagggattaaactctttggcaaaaccataacattcaacgccaacatcacacagacgataaaaaaagaagagcagcaacaacaacaacagccagagctacaagcaacaacagccgttagatcaccctcatcggatctgacggctgagaagcgtccagacaagatcataccatgtccgagatgcaagagcatggagactaagttttgttacttcaacaactacaacgttaatcaaccaagacacttctgcaaaggttgtcaacgttactggaccgccggtggagctctccggaatgttcccgtcggtgccggtcgtcggaagtcaaaacctcccggacgtgtcggtgggttcgctgagttgcttggagctgcgactggagctgttgatcaggtcgagctagatgctttgctagtggaagagtggagagctgctacggcgtctcacggtggtttccggcatgattttccggtgaagaggctccgttgttacaccgatggtcaatcttgttaattatttttacatttttatttgtttgttttcgggtttgggtttgggtggtttgctataatttaacccgtagaaagaaagaacgtggttaaatttgctttgctttgattactctggatacgtacaggctagcaacaaaatttaactagttaattactaattaattagtaggtttttaatacttgcttatctactaaacagctgttgctttttaatttctcttgctgtaaattgaagctcgtggccgtgggatttttcttctctaaacaaagacggtgtggttgaccattaattatccttgaaactatttattagtagtactaatttttttagttattattgctcaatctcataaacctatagaaatctaacttttttggtctttgtagcttcgcatcgtttaagtgtacgtaaagttagttaaagattatggacattagtctagttaatctttcaaccaagaagaaacctcattcaattggacatttaagttttcacttttcagctataaactgacaatcacacaataatgggatacctacataactagaataaggtttttactgtttatgaagaagaaattgaacaaatattggaacactctaaatgtttgtccttccaataaaagaccagtaaaccactaatgataaataaccttttcaaacagccaaaaaaatgtcttaaatcttaacgaaatattatgatttgtgaaaatatatgccttatcaacatttttgtggatgactgtagtatgtcacattttagtgttaacatttaaaataaacgttttaacagaatttgtttacttcatcaataatcacgaagctaactagaaaagctactgtgatgaagcagcacataaaagaatatgacagaagaagagaacaaaatcaagacttgcttgtgtgcaagtcatgtcctgagttgagaaaagaaatggtgggtcctgtgaattgagttctgggttggtcagaatttataaatgcggagatagaaaaatcaatgagatttggatgaggtaaagattaaaggttttggaaaaagagaacacaatgttgacttgcgaggctaagaaaaagaaactgcaacaaccagatgaaaacaaactacattttaagcactaataaaaggtaagaaaccatgacataataagatcataagcaaaacgagtaatgtgaacaattcagacaagtttactttctccattgagaaacatcagtttctttgagtccaaacgatatctaaaaccagaaagaaagaacgatagaatgagattcatacgaccaactcactcactctctcaggacatgattttggcagaccggacataaaggctgtcgacgaccttccccatgtttgcaatggtttcgagggtagccgagtagatagcatctgcctttgggtcttcgaagatgatgaggcatccagctccttgatccaaggtacctgcaaatttcttgtcgagtatcatctgagatagcttcttttccacatggtcgagcggcaatccaatgagctcagcaatgtgagctatctcaactcttgagaagggctcgatcaaacgacacagattttgctccagaagcgtgtcatagagagaagagagatgcctgtggacaattgggtcatcttcaagctgtgctttgtagtcacggagtgcgttctcaaacaacttcaaggacctcttcgagtgagcatcagcgactgctttcatggcatccaggtcagggccaacgtactgtagtccagcctttgaggagattattcctgcaacatcatcagcttggctaaccatgatcttgcacagtaacatgtacttcaaactgaaaaccgctctcggatctccgagagcgttgaaggactcaaaggcttcaaagaagtaactgtatccggttttgtagtctttctcttcagcatgaagaatcccactctgcagatctatcgtgccttgttgagctggtgggacatatatagcgttagcagctgtcctagctgcagtgagtgcagcttttgccttgggtaagtttctcaatgagaagtgaagtttgctctccagcaagtctatgtcgaccagaaggagcttatcatctaatctcctaacctcttttaccaaagtactcaacaacgccaaagcttcaacatactccttgttctccatcaaaagagctgcaagcctagcctctactcgctgcctgaggaaagtacgcttctcagcgcgggtccattcgaccatctctttgcagagagtgatctggagatcagttgttccaggaatctttgccacagcatcaatgattcctctgacgattttcgcagttttcgccttggggattaaggaaaagaaaggcctcaacttggtcaacagtttccggagatcctcacctctcttctcttcagtcaatcgatcacaaaggtttgtaatcgcttgctccttgatccgtatagcctcaggagatgaagaagggtcttccaaaacctggtacagtatcgtaatagcctccgagctgttggcttctaaagccagggaaatcgtctctgtggtagcacgataggaaaccattgtgggtttagtgcaaactcaaatccctgcaacaataaagccatagacctgttaatgcaatgttcaaatatttctcctttcaagcttattgatactctttaggtttcacatcactacaaaaacaaatccatcttcgatacattaccaagataatcagataaagacaagccacgatggtaatttatcactgtaatttatcaactcttctgtacctaatgatcaagacaagcctagagatctatcaaagacaaagatacaacgaggctacaataagtaatacaggaactgaattacaaagcctatgaaactataacctaatttttaagtaataagatgaatcacagagacatagttcagtaattactaacttattcagttcgaattcttcgactcaaatacttttaagatctatttaattttgtattcagcttctttcaatcagaattagaacatcctcgggcccatcttcactgagatcaactaaatcgaagaaagctaaaccctagaactatcgagacaaggaaccagatgtggttttttaaaacatcgaaaacaatacgcataccaaaacccagaattaagcagatctgataagcaaacccagaagaagaattaatgaaatttcgcaagaacaagacttaccgatgaatcgtcgggggcgtgagattttggtaaagcttttcgacgacggtatagaagaaataagaagaagaagattcgagagttttttttggcttgaaagaaaagataaatggacagtcttctcgtagttttacaattttttgaagggtatatttgtctttagatgctgaaatcaggaaatagagaacgcttaacaaattcggcgtcttaaaatctagcgtttcggattcagagtttgaaaaccaacgccagacgctgcaaaagatcctggtgcaaacgcttgtcgtgaaaacgcgttttgtgattcaggcctagtggctcagactaaaggcccaatatatacaaaactctgatccgccttctttaggtaagggttcgattttatttgttgtcttttgcttatttcagtttgagtcatttacctcaaactataattcacattatatgttacatatgtagctttctcaaactgtcataaatttcactatgcatgtaaatgatttaaatttattttagagtagggtttttcactacatcatgcatgtatctgttcaatcgaaaagtaacaaataaatattggaaggtaatcaaatcattcgtaaaaaagaactcccaaaaataaaacaataacaacgaaaaaaaaacatggttaattagtaaactcagacagacacataaaaaacataaataaatgttttatatattaaaaagagtcatcaaaaaaattgaaagtgttgagactttgagagatcgatgtatatgggtgtgtatatatgtatattaagcttagaaggtgacgtcagggacgattccaagctccttgaaaacttgagggcattcagcgagaggagtcttcctcatgaacccaagtgggttaatggttcgagtctcgttggagacaatgccatcattggccgtgagactgattctggctgcgtttcttaggaattcttggttgttcacgtctccacactctgggtcaggtgattggaggaggacgatctcgcacacttcctcttcgtggtcacccattacttccatctggtagttaccggcgttgtcggtcacggcttctttggttagggtcactgtctggttctcacgacccttgcactcaagctttacctttgcccctgatatacacacaataacgtaattagtttttcttataatcttgcaacactaactcttagaaatgtgactaaccacatttttataaaattttaacattgttaaaaagacgtctatatatgcttgtaatcatttttgtgaatttttactacacaattctaaccattgacctatataccataatgggatcgattttttatcaaccaatatattttgctattgacagtatgctcaacaaatgaatttgattagagaatgtggttaattaccctcgagaaatttgctgatacgggtgatgaattggacacggcatgtgtcgcagtagacggagcccttgatgtggaatttgtcaaagtcgtcggcatcagctgcggtgaagtgaacgagggtggtgaaacatagggcagaggcaaggaagacaatgaagaatttggccattatgccttaatccttttttttcttgtgtttttacttcggtcttctcctctcttggatttgagagtttatttgtaaaatttagtttttaagggagaacaaattgtaagctttggttgagaggagacgctatgatagatccaaccaaatatctccttttatagagaacaaatagacaaaacaacaaaaccatgtgattctatatctatttttggaagtttttttgtttatttttggtgtttttgttcttgagttttgtacggctgtgttttccttgaacccgatcttttctcattgccatctgtttttcttttctgttaataattcttcatagattccgtttaggtcttttttgtatgaggatggtttcccaaatgtcaatctatagaatcttatgtatgtttagacctccactaaaaagattcaatgggggtggagaattatctactagaccccaaagtgaaagttttattagtagtaaatgactaattaatctgagccgcacatgaaagcttttgcacaattttctttgaattaagaaaaattccaaaaacaaattgactagaaacaaatgtcttcagctgaatctgttattttgaagagtagaggttgaacatatataacttttctctttaagaaaccttaatctataataacatctttcaagtgttgtatcatcaacaagctaatacaagaaaatcatgtacagatgaattggattgtacttcttctgatttcgccaagaaaaaaaatagaagaagcaaagatgcgaacattcttgatctgcaccgatctcccaaactgtatggtaaaagcaaaacacaggaatggttcaaatgtcgtagcacactcagcattaacgggtcaaacactcgaaatgctcacgatttataagctggcggtaataaacgtggaagactcttgctgttttatactatctgcaacgtgtgcaataactccagctcctgctttgtaaagtctttcacttttcacctgaaacaagactcaaaatctctgttagtccatgtttcaaagaattaaaaagctccaaagtgaagatgttggaagtttacgtgaatgttgttatgagctaagtaaggccagaaggtggagtggaagctgacatcaactttcttccaccccaacctctgcagaccgcggatcatttcctctgcaccaatatttgtataaattgtaaatctcatgccgatttagaagaatcaatcaaatgtttgggctaattctacaccttccacaatttcatgatactcaagtgtgttctgagggctaggagagctttgtgcggcctccttggctttagcagcttctggagggaaatgggcaccatctgatgaaacaggtggacagtattcaacatcaacaacatgcttgtatccatccagagaccggcgtgaaggctatattaaaacaggggaaaaacatatctatcagatctcactcgtgacagctaaataattttcaaagtttcatttgactggttacaagccacagagagcttcttgcacgaagctacttgagataaatgaattgccgaaagtatttttggtgattctctacagacaattgtttcatttcttagactctttacctctatgaaactttccctctatgattactcataattccaaaattcaggataagttagctaccgttagcatttcacagcaagctaactatcaatatcgatgaccccatcatctagctagtgtgtgctacacgtttcagagtcgaaatcaacttacataatagaaggaacatgaaaacaagtggggtaatattaaatagaaaggttccattgcttcatatagcatgaaacgtaccttgataagttcagtttctctcctaatggaagatgtacgccaaccaaccatgtctacttgatgtcaaaggaaacagttcagaaaacaaatgcagacacagctaggcacatctgtactagttaaacagcaacagaaatgcacaggatacggtcataagatacgtttgcatatataatgcgacttcgaaatgcccccagcgccgatctgccagacaatgaaatgcattaggattacagataagtcattaaggggtcgaatgatttaaattggtaagagcattactcacaagaatttcagatcttcaccatcagatgccatcctcaaaagaagaggtggtttatcagctttaccatcagtgaggaacaactgactaccagtccgaccaacaaagaatggagctattggtgcagcaagtttctcaagaataggaactcccaacagaaaaggcagctgatacaaggggttccagaaaaagaggagagaatgagatagaatttacagggattatcaattaatattcatcactcatcagtctagacacttaggggaccaaatagcaaaaaacgcaagacagttttgatgaaacttatgatatctgtctgaacacaaggagaaggtagatgaaatttacatgtgaaaaacgactaactactttcttaattacgcatacaccacatctacgtacaggtactgcgagatatatatgaaactctttgattccaaaattccaattatgataagtagagaagaagagaacctgctttctgcctctcactcctagatgaggtgttgccaaagtgatgaaattaatcggttctagccccgcaatcctacctcgcagaagatttgaattgccagattgagagacagcaacatcacttacttgtgccattgctgctgagtaaagaacagcaacagcatgtctggaaaataagccaccgagggagtgggctaaaaacgaaatcttctttaagctcttgctcttttggacaacttgtctaacctattcctctctcacatccagaatgggaacagaaatcagctcatgtactgaagttaagggctagaaaaccaagacctacctatacacgaggtgcaaatgaagatattaaaactcacctcttctgctagtcgttttccagctccatcgatcccgccaaatgttttagtgaaggtattggaagaacttgctgtgaatgttcaggagaaacagagtaaattaaaacacatcacgtgtgatccattccacgcatagcataaaagcacatgagtattataataaaatacaaaactaaagaagagttgtggttccagacgaaaagatcttaaatttttcaagaaaatgtatatttcgcctcttgccgctaaagattatataagaccttgaagtgttttcaattttgtgcccagcacatgcattcaacttacgttaccatttcattcccaaaaattctcttctattatacatacaatccaacaactactcaactaaactaatagatgataacaatttagaacaagatgagcataccataaatcaagaatcttcttccaaggcgtcttttcagctcagcttctacgtagagccagtcgctgggactgcaagtaattgtgtcttagtaaatttggagtctataaattattcaatctgaaaacaaagtagcagaaatgatagacataactttctttcttttttttgacaatgatagacataactttcaaattcaaatacttgcaagtttctatccaacctaaaacaaaaccatgagggtttcccaagatgcaaacccagtaccattcaattgatgaactacttagaaataatacctggccaaaataccatgtacaagaacaagaagatgatcaggttcatttttgtcatcggagtcgcctttcgatagcgaaaatttccgttgggctgtggaactcattgcctgaaccctgcgtccctgttggttccagcttctgtttgacccttcttaaagaaaaatcaaacaaatgaacccgcggaaaaagctataaagaacagagccaattcttaaccaaacaaatcatactatcaccatttctacttagcttctcacaatcatttaacatgttcaagcttattttcgatcgcagaaacagggaaaaatctgtttaaatagacaccgaaattgtgagctctaaatcaaaagaaaaacagagccgattcttgaccaaacaaaccatactatcactaattctacttggcatatcacaatcatctaacatcttaaaatcttctatctcttgcagaaacagggacaaatctgtgtatatagacactgtaattgagctcctcctcaatctaaattaggcgatactattcttcaccatcctaaacaacgtctttgatcgagaaatcctcagctatgaaactttgcagtacaatgtcaggtcatttccagatgtaacaacgcatcattcgataaacatgaacaaagtaatcaatccctaaatctacacgacaaacatcattcgaagatcaaagcctattaccgaaatcgaaattcaaaatctccgaataaccacaggagcacgaggatgaaggcgaaggagaagaagcggaagctgaaacaacgccggaggaaaactgccgcgcgctgcgagagcttggcttagagaaaccgccacgatccggtaagtatctaaaaggaggttgttgaatccaagaagaagccgtagacatattgatgttgagcttatatatagagagaggagagaaagtcaaaatcagagaaaggagtggaagaaagatccttgattcacggtttctgagtgacgtcacgcttcagaatcaaacataataactctctctacgttatcttcttcacagagacccatgctcctctctatctcttccattcactgccaaataaacattcaatcatcatcttcttcgacttttgccaatttatataatttgattttattacttttactttataatttcgggtggtgcgtgttgttgttaggcgactcaaacacagaatatttttattccgttttatattcaaaaaaaggtttagaatcggaccaggttcttcttcttcttcatcaaccaattcactccaaaacaaaggtcaaaagaatactatttacaattttttggtatatatatatatatatattttctgttttaaatttttaatcaatactgctagtagtttttttttcttttttttggtgtaaatggtaagataacaccaaaatatatttgtctactaaaccgagtaaaatttttatggtttttgtaaaaatccaattgttaacttgttagtgatgctttccaaaaaagcccttacatgatattgtcaaaggggtatctaaatatcatatggtgcgaattggttatgtatatgtagtgtactagtgtgtcgtcgtggacctcgaggtatcatatgtaaccgggtgttgtagatgttgttatattgaaactaaacttttatttggacaagttaaaaaaacaaatcaagcttaatgatggattcatatataatttttttttgtttttttgctaatctacttataatactgcctaaggtatcttaatcataaggatatcatgtcaagatatccattattggtcgcagaaatttaaagagttccaattccttttcacaaaacgttgcaacaatgttgccgcttaccatttagctaatatggatgtgtagattcacctttctatttggatgtctctaatccagccccatggatttgccatcatttgtactagtttgatattcgattaaagttaataaaggttcattttcgatgaaaaataaaatcaaaatctacttgtaattaacacgtcttacactataattttagttttattagcgataattttaaatttggttttaaaatttgcattgaaaattcaaacaatgtttcttatggaacacgatttaagtgaaaaacacatccctttatttattatgaaagtgagggaaatacgtttatatggagtaataaaatgaacatattacagtttttaaggtcaagtttaagttgcaattttaccacatgtaaacaatcataaaccaggctacaaaatgtatgatcacttcaatataaaaaaccacctaagtaaattagttaaaaaaccggataagcagcaacctgagctataccacacattccttgaggccactccacatctctacggatcctcatgtaaccattttctccccaactctcaccccaagagttcttaagaacccagtagttgagcccactcatcgttccgtacccaacgatcgtcactgcatgattcacgtctgtcccacagtccagcccagcgtacactccccctttgtaatgaccgaaactgtccgctcttgcgtcaatcaacaccgagacgggctgtcttcttacggcctcgagcaacgcacgctcgttgtggcttggaaccatttgaaaccctctaatctgtgtatgtggggcgcgtctggcgttggcacgacaactctcctttttcacttggtaagggtattccgtttctaaagaaacgcctccgttttttattatgtacttgaaagcttcttcaaattctccgccattgcaaccaccgtttttctctatgtcgcaatctattagctgttgttcggacagtgttaatagatttttgccagatatctttgtcaaaccttcatcgccccaatcgctgagaacgcccaacaacttcctgcccatgtatatatatattggttacttcattttgttagtaaacaaatcatctgttagccctaaacctaaaataaccctatcttggggattaagtttagcgaaatgtatttttttgtatgtggaatgtaattttgacattaattaaatgaccaatccagccgtttactatatcgtacgtatattgttttccgaccaaagaattgcgacgaatctgtttcgttggaaattcggctgaaacaagatgttccgacaaattctttggtcggaatatgctatcctttcttgtaacgctgtttccaattatagtgtaaagtgtttataataaatgatcacagtattcttacgacatgctccttgatatttaacaggtgttacagctccttcgtctctccagtctttgctttcgtcttccatgtcgatatcactcatgttccaattccttgatggcttcgttttattaaatagttcggatagtgaagttacgttaacgcggaggccggtgtgggtcgcaaggaactcttctgttttccaatccgtgaactcgttgacaccaagtgtatagctttggttccccatattattgaagttctcaatgaatttcaagtttttcttgaacactttaagcctcatttctttctcggattcatccttgtaaactcgagagaattgagtcatccattgttggtggtaatcaacaattgattgctcgttcaaagtgacatgaggtctggcttgagagatccttagatccatggaaagaatggttagagccacgaacacagatcgtacagacaccatttcgatttttgtgagtaatatttaaagtgtttgtgttgtggtgatgaagaagtgaaaatggggagaaagagtttttatatatatatatagtatggaatgagaattgtggttgaagcaaatgaaggtttatgactctattgtggtgatttgctttacttgcttcatgatcttagaggaataacttctttctttgttttgcaagataactttccattctttatatgcaaatgtattgctagtaatgtatatatatttcatcacaatttcattttctacaaaaaaaaagataagatctagctatattttatgtgtactatagcaacctagcttaggttttgggtagtgttacatttgcgtttaaaccgtacatggttaaggaaacaaataaattgaatacttaaaaagttttagatcaacttgatttcaccagtaaaatggaaaagaaaatagatataaattttcaccccaacaaagatagtgaataaagaaatccaatactggaaaactatataatttttgtagtatttatacatatatatatatacactttaaaaagggtagaaattcattttttctgataacttttgtttttcaacatctgtgatgctaaatatagacttgttctaaattaatagctttagatttttattttattctgaagtaataatatttcacagtttagaagaaatagtagtaaatatagtttttatttttattttaagtaatgatatcttagattttcaaagaaaattattgtaaatatctatacagtaagagaaaaaaatacaaaacttctttaaaaatgagaaatatattcgggagagaaatttaaatgattcatcctttagcaagtatttgccttgtgtttatcactagtgaagagggctcagcttgctgcttatccagttgcgtaactaatttggttaattaggtaattttattgaagtgatcatattcatacacatgtagtcttgtttatgattgtttacatgtggtaacatagcaacttaagcttggccttaaaaactatatggtgcgaattggttttataaatctttgtttgattgaaactaaacgtgattttttggtcaagttgaattatggatctgattcatgatttttgaatttcgtttaaaacaattgcatggaaatacaaacgatgtgaaacaagatctaagagataaaatgatagggagggaatacattttatggagtaataaaatgaacaccttatagtttttaaggtcaagcttaagcatctaattatgacgttattaaaagtgataataatatgatggggattattatttttatttattattattctccttattattttccatttcttcactattcaatagatctatcatgcatatacttgtttctaaattaagtacagcttattttattttttaattagtgatattttacattcttgaagaagattatagtaattcatatatatacatagaaataaaaataaaaattttactttcaaattgataaatatataccaattattttgttagaaaaacataccggattcgatagtacgcggtagaagacctcagaggctcagaccaaatacttttattcccttttttaggataaaataatcaaaactcttgccaaaattctagttccatttcctttgtgaaaactatatgtaccattactttaattttcgctcaaaagagcctaaatacatcatattacgacgtaaatcatcttttcaagtttgactagaacgaaactttactttttatcttgcgattatttattttttatttctgacggaatttcttaactaaatattacaatattgatttgagcgttgagttgtcacacacacaaaaaaaaaaaaagttacagaagagctatctacttatgcatacatacatatatcttacgatgatatagattatagacccgagctttccctaattaaaccaaatctaaaaccaaaacacttttattacatgcatgtttatatacaaattgagcacaaccaaaaccgaagcaaagttgttccacccacgtagttgttgaaatatgaagatcgatcacatgatgctgcagaaatgagggttttcttcactgaacatggagctagcgctcggattgataagacctgaataaggccgttcttgatagtatccatgctcgtgtccgtggtagccatgcttgtggtagttataggaactcactttctcaccgttcaccgacatgttgattcttttgcgaaacttcttcttgaagtacctgtcgttatatccattagattcagggtggtaagggtacgaccataagcatatatctctctttgtaacattccttgcaactttcagaactttcttctgctcggccgaaccagtcaccgttactctctgctgttttatgtctatctgaacatcgtggactcctgttcaatacaagacgtaattatcaggtttcttgggtgacacgaaaactaattactcagtaaatgttaattagtttaggatttgaaacccatcttcactgattaattaccgttcatcttttcaagagctttcctaactttgttctcgcaaccgggacagtccattggcacttccatttccactacctgtgtacacatacacaaattcaattaacttatatataaatgagctagttttcatggaaaatgataaggggaatcaagataattactcaccgttgtcatctttgtattatagctcaagagaccttaattataaattagacttaagagttaacacagtttggtcgatgaatgactagaggataagcgcaaacacacacatatatgtgcatgcaaacaattaggaacttaagggagaagatctttgacggtccataaaataatatttttttatgtgttgcttctacagaaatatcttgtgaaagtacatggaaactaccttgaaactgaagtcaaaagtttatgtgaccgcaggttttacactgcaagcaagctctagatctattatctatataaatatttatatgactaaatttgataaggatgatcatgatttgacatatccattctttaacaaaaattgattttgacatataagtttagttatttgccaacatcatgatatgaggaaagtgtgtttatttaatccgaagatgatttaagaactacacgaattctaactttctaaggaagataatagaaacgtacatatagacatatcttttttagtttataactgtagcaataaagacgatcaaactggaattatgcgatcgtactgatatttttaaaaatacatggatacatggactgtattctggactagtttaatgtaagttttaacatgtctcattacgcatattcaatttcaaattttctcccaaacaaaaatgcacaacttaaattaagttactaatatgaattataaagattaattaagcttgacaatgatagagcaaccaatgagagctttgtacaaagcttaaatatttagtgttatagttttgacgaaaccatctatcagctggtaagcttatcagtggggtaatattacaaatataagaaaaaattacgtacaagttgaagattttaaataccttgatgtctaaagattgggagactatacgagtatgagtgacttaccctaaaagaggctatataaagaaattcaatgttaatatttttatagtaattttctcaagaatataaacactttacaacaaattttttttaaaaatcgaataattgaaaactatattatttttggaaataattagttctgcccgggttgttgactctactgatcttaattgattcaagcttttggaaatccttctccaaaccgacttctgtctttctctttcttcagcttaataatttactacaatattagttctatctaggtgatatgtgtgtctatagttcatccatcttgtctgatatatgttgagtttaggtcgaatggatatatatttcaaactcttattcaatcaaaatttacatttttctccgtacaagaaggatattcaaattcgaagtgcaaacactattgtagccatctcagatcatacatgaggtaacttttctcatgcttccagagaaaagcgtcctcacatttccgcttactcatggtaccgccgaatattagagttagtacgtagtttggccagtgaagcaaaatctcctacaaaactcctataataacctggattctagaaaaaattccgaacttccaagatatttgagagccaaggccagtcctaaacggttgcaaaattatatggctttggcgctgaaaagttacatcacataacgtcataacctatgcatcaaatctctttcttcctgactttaagcttatgaacttttgtggatagttttcgctcatgtcaaccgttccagcgctttaggaaatgagtcacatgaccctagaactggtataactctaatgggaacatatatgtctaatacataattgagtaagcatgatatccctttagatcttaatcgacttcgacctgcattcgagaaacggctagtggcattgagttggtgagaccaaaaaagattttgaaatgctaaggattttttttctctcttaacagaaactcactatttaagacccaccttggacataatttattcttgagttttctatagcaaaaaaaatccaaacgagttgattttgtttgtcgaataaaccacacacacacatatatatatatatatatcttataaattcgtccaaaaacattttttatctatctaaaacatatatgacattgataaaaatcagaatttttaaattattttattgagaaataaaaaatcttcccttttttatgttatcactgatactaatacaaatcattatttaattagtcaacatgaatagctttgtatatcatcatgaattagtttccgaaacatctaagtactactacgctagatatatcatatatctatcatttattggttcatttgggtcagcattttggaatcacacgcttcaaatctttttaatattcatgaccaaaaaaatttatcatatgataatgataatgcaatctcaatgcgtgcatatgttgcggcgcgcatgagagccgccccaacttgtagatgggaaaggaacgccgccaattacaaattcaatgtttaagcaagagacttaggtttctctatatagctttatatttacatatttatcagatcaggccatatatatctaactttataaaatcatcttaagttctaagttagcgcaaacctatttctatttcaaatcatcacgtattcaagttttctaattcaacctatgtatattataactatttgatgcaatttttaaagttcaacaactgtatcaacttgggatgaaacactcttaaacgagatcattgctcctagagacatttgattaagagtgcaacttgagatgaaacctttaaccaaaaataatacagtgggataaaatataatactatttttttagaggaaaaaatatgatactgcatttggaacccatgcttcattgcccctccattccgataatggcaaatatattttttgtcggattgttactcatttcaaatataatacttctaaaagtgaaagttgaaatattaaaatataagtttatcttattatccaaccgtatttgtatcgtagccaaaatccaatactaaaaaatgaaaagaatactaataaaccggacagaaccaagaaaaaaagtgatgaaaatcaactagcacgatccagtgatcagtttttccttccaaaatcgtttgcatcattgcatgacttcttttttttttttttttgcatgacttctttcttttccttttaaaataaaactaaaaatcataaggggtttttattactatttttgttttttttgtgagaacacaaaatccattaatttggggagtttgcttgatgaataactgtttttggaaatttctttttctttcttgttttcaacaacttattgggagatatatgaacagaaaaataattatattagacagttgaatatttttttcaagaatggttctaggatttaaatattattgcgtcatttgttcttaacaaaaattaaggatttattgcatcactgaaagaaatattctagctaaaaaagttaaatattgttgaattggaaattaattatacgtacacgtatcttggactttccgtatgatctttgttcatactgatatcaacggtccaaacaatggaataggccaggataaaaaaaaatcaacaacaatgaaagggagatttaatcgcaagtggaataaaaaggttttctcaattaagttagaaagtggaaatcatcgattatctcttaagtggagcttttaattattacatacacagcacaccagtctatttttatatattttatgtaatgttattgcaacggaaaatcgagaattgctgaatttaatctgtcttaatctacaattatatattgtgcgtataatattttgttttacgttttattaccattccatatagctaaatttagaaatgtattactaataattactagttaaccaccgaaaacctactacgtactccccaaaataagcattagataaatttgatatgtgacgtgaagatattttgcatctcatcgcatcaattattatcttcataaacaattgcatgcagtaagaatagtggccatcgatctccaatgggctactattttttggcattctaaaaattacaagggaaaaaaaaaagaacttgagctatgaattatgccttgactggtcatggcattctaaaaattaatagtatgaaacgaatccattgtaccactggaccgtacgtgagtgttcccaaaaccaatagttgcaatgaaaattttgcgttcggaataatttaacatttttaaactcaccacgaccgagaaacttctaaatacatttgattggaccatgattgcatttgaacgcaaatgttatactaccctaaatcctagggtcactagtaaatatagctagatcttatctctttattttttaagtgaaatcgtgatatgtaaacattagttgcaatatgtgagcacataaagatgggaaagttgttcttccaaagatcacggcgcaagtaatgtaaactatagcatcaccataataggagtcaacttgcaatttgctctcatttttcagttagacataactaactccgaaacttttctttataaatacccttctctccatcttcacttcttcatcacaacacaacacaaacaaaccatttacataaaacaaaaacaatttaatacttcttagtgtgtaaatgtgtgattctttcatcaataacaaaatgacatcgatattattcatgctcgtgagtctaacaattctttccatgaatctaaaagtctctcaagccacatctcgtgtcaccttccacgagccgatcgttgctgaacaccatcagcaatggatgactcggttctctcgagtttacagtgacgagctcgagaaacaaatgagattcgatgtgttcaagaaaaacttgaagttcattgagaaatttaataagaaaggggatagaacctacaagcttggtgtcaacgagtttgcggattggaccagagaggaattcattgccactcacaccggcctcaagggggttaacgggattccatcctctgaatttgtcgatgaaatgataccttcttggaattggaatgtcagtgatgtcgctggccgtgagaccaaagattggagatacgaaggagctgtaacacctgttaaataccaaggccaatgtggtacgtaagcttgtcggaattatacatacaaaagatgattcccacacgtatctcaattatataaaaaattcgattcaatatttgaaagaattgtaataatcattcaacatacaaaacgtaaaccccaagttaggtttagtgttaggtttagttactaagagattcgataattatcaaaatataactaatcaatatatcgatgcatttatgggcaggatgttgttgggcattctcaagcgtcgcagcggtggaaggtttgacaaagattgttggaaacaacctagtatcattgtctgaacaacaacttctagattgcgacagagagcgtgacaacggttgcaacggtggaataatgtcagacgctttcagctatataatcaaaaaccgaggcattgcctcagaggcatcatacccttaccaagcggcagaggggacatgccggtacaatgggaaaccctccgcatggatcagagggttccagaccgttccaagcaacaacgagcgtgcattgctcgaggctgtatccaagcagcctgtctcagtgtccattgacgcggatgggcccggtttcatgcattactcagggggagtgtacgatgagccgtactgtgggaccaacgtgaaccatgcagtgacgttcgttggatacggaacgagcccagaggggatcaagtactggctggctaagaactcgtggggtgagacttggggagagaatggttacattaggatccgtagagatgtggcatggcctcaaggcatgtgtggtgtggctcagtatgctttttatccggttgcctaactaaacggcagacgacttttgttatataaaagtgatattattgttttaaacattttaaacaacaaaatggtgatatatcttgttatatagtttggtttatgaactctttagatgtggtctaaatctgcatcgcaaagattgaccaatacactatgtaagtgtgtataaatgatcgttatattacatatagttgttgtaacttctaagaaaagtatatagaaagaaaaacttctaaaatgtaatggggtatttatatttcgtctcgttagcactgttaccatatataatttcatatgtttgaagtcaccatttataaatcgtgagatatgtatgagcttctaatttccgtagtctagagacggtggcagtggtataaccactagagatgagaaggcgatcaataacgcgtttgggacaccatcaccgaaagtagttgagttgcttctagattattatttccgtagatgttgaataagatgaatatgatcaaactaaacaggagaatattacgtagttcaaggaataaaataaatgagatgtacaaaaaaaatatacaataaacaaatttaatccactaaataaaattgaacaagttgaaaaattattcctctctaattaaagagcaatgatgttttgctaagttctgtcatagatacgagagcgtaatatttacgtaactccaaagatttggattcgttattgtttgatgatcaatgcaaaatcacatccgaattatatgtgagacaaaaaacaattataagaaaatttctagtaatatatatgattcattttttattttggggaaaagtgaaaaagctgtatactatttagataaaaatggctatacaccatataatactgaaagtaacgtgaaaaaaggttatatactaaaaaaaaacaaagttagtatctattttttatttttcatttttatttaatttagtgttaagaaataagagtttattatctaaaccgagaatttaattagattcattctaaatttatgttgtattcatatttttaacatcaatgaaatttgcaatttgagaacttattaaaactaccaaaaacaaacaaaaacatcgaatgctttgaccgtttcacatatggctgctattgattcaaatcactttattaggctacataatcctttagcatttaccctcaccagaaaaaaaaaaaaaatcttttagcacttacggcaacaattacataaaatctgttagcatttaaatttgaaaatatgtttcagccaatttatatatgaactagattttaacccgcggtatctttcagaaaaaatcaaaattaatttgtttaatagattaactatatatataacctacttatacatattttaaaaatgtacaactcttatatctatatatcatttagtgtacaattactatatttaaggtttataggaacgttaatataaaattcattcagttttgatttagtgaagaaataaattatttttcttttttgaatttagaggtcacaaatagtttgtaaccaacgtaacaatatatagctcgctaccaaaaaaataaaaattaacaactcttaagtatagtgttctttgatacaaaaataaaaatcattacattttagattatactcttaaagaaagaaaagtgagtaggaaaaaatcgcaacaaaaaaagaatgtgttaaagcaaagaatgtagttttgtgtttagtgatggtaaaccacttttaggtgcagtgtatttataaggaaaactaattagggtcatatttgatagccaaaaaatattccgtttagaaagatattagtgacaaaatcttataaactattagtttcttttttggaatatgccatgattatgccttatttagagtaattaatatggataatcgaaattgttagtttgattagcaagtaaatgacgacgcaaatcttggatttgatatttgaatacacgtgtagttaattttgagagaatttatggcaatattgttaagagtaatattcttttgaaatttttgaaaaaaaaaagatttaatgtcagtggcattgagttgtaaataagtctcaacttcatgatttattttacaaagtgactgcaaaaatgtatatgtagatctcacataagttctcaaacatttagattttggatcaaacaaaaatggttgtatacgtcaaaaacaacttcttttcagttcctatactaattttacatcttttttgtttgtctcaatcgtatgcaagatttagtacgaacgttacaaaaagtgaaatcagcgacatttgcacacataaaggaaccaatgcatcattttgttttgaattcctgaaatcgtatcctgaaattgtaacattgaattcctgaggttattaatcaatacccaaacctataataataaaatgtttttttttattcactttagttctatatatgtttgcactttaatttttaaattttgcatttaaaaaaactcattaagttaaaaatacgttttttaatttatataatacatggacataccttttttccaagaatgaactttctccaagaatgaactttctccaaagatgagctttcagcactgtcagagaggatagtttctctacaagttattaattcttgtatcgcattaagttattcgggcatctccaataggactcttcattttgacggtagataatcttaaaaatgcaggtttaagtagggatgggcatacggtttttcagtttggtttttgtttggttttatggtttttcggttttctaaaaactaaaccatatagaaaccgtataaaatttggtttggttacggtttagcttttattatggttttacaggtttttggttttatgaagattgaaaccatataaaataattaaaaacatatgtatctcggttttgttcaaattggtttctgtttggttttgggtttttcggttatttcatacttttacaaaaaaaaatatatgtttgatgatgcataaataaaattagaataaaaaataatatgtgaactaataagttaaaatacaattttaaaattataatccaaatctagtttcataaacccaaatcctaaattaaaatttaaacttataaaagttagaaagctataggaaacaaaattcagaaaataacttgtatcattgttatctctaatcagccacgattatatatatatacatagttaatttttaattttaatagaaaaccaaaagtatctatgcatgtaatccttgataaaaataaaatattaactagaatttaatccgcggtacatcgcgcggctaaatttgtttttaaaatgtatttttttaaaaatgtaatattatttgttaaagattaattgaagatatatcatattaatttgtattttaaatgtatatatctatttctgtattatttagtatatgattactattgtttaggtttcaattttgaagtataaatacaaaaacaaatattttttatacatttaaaattttgaatattttatccgcagtatatactgtggaccgtttttttatagctaattttttgaaattttaagttatatttgttttgttaatattgaaagttttttgtgtttaaagttgtataattgtattttgattgttaattttaggatttcatccgtgatatacctttctttattaatatcgatcaaaacccgtcattccatataaattcgtctatattatattgttagctaaattattaatgttataaaatccaagaaaaataaattattattattataaatccaataattttaggatctcacatgtggtataccgtcccttgaatgattttaaatttatactactaatatagattttaaatttatcatataaagtatatgatttcaagtttttgtgtttttttatttaaataaagtaacggcttaaatgatgattgatttagttctttttcttgtatgtgtatataacttttgtgatctttaatttattataaattagtatttttattgctatacaaaatgttaatataaatatttgttataaatcggatttatgcatattttgtggagtaaaattcacaaatttgttttttgattgtgtagagatttttagaaacaaattaggcaagatattgtttggttattatctttttaaaattttgtaaaactatataataaatgctagtagcaactatagaaaaatgaatatgtagatggataaagggtgttcctccgaagattagaagtaatgcaaagtataacatcaccattcaccacaatagacaacttgcatttgcttccaacgtaacaactctcattcctcactctatataatatcataccccccattctcacttcttcgccacaccacaccacaacacaaactctttacgtataaaaaaaaaaagttcatatctttgtgtaaacgatttttttttcatataccgaaacaaaaatggacttcgtagagtttgtgtgtgttgttctaaccatatttttcatggatctaaagatctctgaagctacatctcgtgtcgctttgtacaagccatcatccattgttgattaccaccagcaatggatgattcaattttctcgagtttatgacgatgaatttgagaaacagttgaggcttcaagtgctcacggaaaatttgaaattcattgagagcttcaataatatggggaatcaaagctacaaacttggtgttaacgagttcacagattggactaaagaggagttccttgccacctacaccggtctcagaggcgttaatgtaacttcaccattcgaagtggttaatgaaacgaagccagcttggaattggaccgtcagtgatgtccttggcacgaacaaagattggagaaacgaaggagccgtaacacctgtgaaatcccaaggagaatgtggtaagcttgtcatctttatatataaactgtctctacatgtatgaaatttggaagcaatgtaatgtatgaaacggctggataattacactccgtatttagaaaacttattcctcacgtaacctataaatatatatgagcaggaggttgttgggcattctcagcgatagcagcggtggaaggtctgacaaagattgcccgtggaaacctcatatcactatccgaacaacaacttctagattgcaccagagagcagaacaatggttgcaagggaggaacatttgtaaatgctttcaactacataattaaacaccgaggcatttcttcagaaaacgaatacccttaccaagtgaaagagggcccatgccggtccaacgctagacccgccatactaatcagagggttcgaaaacgttccaagcaacaacgagcgtgcgttactcgaagccgtgtcaagacaacctgtcgcagtggccattgatgccagtgaggccggtttcgttcattactctgggggagtgtacaatgcgcggaactgtgggactagtgtaaatcatgcagtgacgctcgttggctacggcacgagcccggaagggatgaagtactggttggctaagaactcttggggtaagacttggggagagaatggttacattagaattcgtagagatgtggagtggcctcaaggcatgtgtggtgtagctcagtatgcttcttatccggttgcgtaactaattcggttagattatttgaattgaagtgatcatcatgtgtttggtttttatgaattgtttagatgaggtctaaatcttcatcgcaacttaagcttgaccttttgaaactgtaatgtccatttatcgtaatgaagacagtagaataaataagttaagacaatatgtaacagaatttcaatctctcttcttgctttgattgttgtagcaaattcccagtcgattagtatttatcatgtcactatttacaaaaaaaattacagatgtcatgaatcttatggttaatggatccgattggtaatacaaaatgataacaattttttttgccgtacacaaaacagtaatcaatatataactagttaaaagggataaggtatacgagataacgataccaaaaagctgaaagtgtttttttgtatcgattttagtactacatcggtacaggttaccaatcataaccaatgtagctttgatcgatgtttcatcatgtattctatgttttgctagttagttaataattctgttgtgggactggtcatcatcatcgtcagttcaaagcgaagctgagctctttttatacgtgtactctgtttttgtctgcattaataataatttttgtttttttctgttgatacaaaactcaaaagtactagaataacataaacggtttctcctaagtagtaactaacatcaattttttttaaagaaaatttcaccgttaacacctttctcagtttttttttcacgaagaggcaaagtggattgggccaaccagcttttaaccatttgggcttaattggacgaatctgccctgaaacaagaaatgaaagaaaactgttcagtttcgttcctttgtattctcgttactgaaataattttaaatctttaaaattaaattaaaaaaaacgtaaataattttaaaacttaaaataaaatcaaaaactgtcttcgagaaacgcaaaacagtttcgacgaagtccgtattcgaagacgcaaaaaattccgacaaaacttaaacccaattccgattgaggctctgttcgagtttgagtctttgcttgagtggaggaaatttcgatcgagttcgttttaaagtgtctaacaaaaagaggattttctggtttctcgaattactgttcatactaaaatggcagagatgaagaagagtagtcggcggcgaggagttttggaagttaatgtatcatcgtcggcgacgacaattgtgggtaagggtaagaggttgaagaagagtgcaaaattaaagttgcagaggttgaagaagagtgcaaaattaaagttgcagaggttgaagacgaatgcaaaattataattatacccttcaataaatttcttttgtgtacgtatatgtaatttacgatgtacgtacatgtggacatgtaaatataatagattatgttttattgttaaagcgatatacacaattatatattgagtttgtacattagaaatctttggttattttgattagatgagatattttcggagttttctccataaaatctatgcatatataataattaagtaaaaatatatagtcaaagtatagatattcttaatacttttgaaaaatgatgtacgtacatcttttcatgagttaaaattgttgagatatatttattgatacaataataaaccaatattgaccatggtgagggtatattttactatagtcctactagagatgaagacattgttatttacaatattgacgaatttttgtaatttttggtatctacgatggtgcatacggcgagttagccaaatgttatgtatttagtacgatatatatgatattttttgttttgatgttgttgtttctatttaattgttattttgacattctttagtaagcattatgttatacgatattatttgttgagaataggtaagatttaaaactaaacccgtagacgtacacgataatattgagatacacgtacacgtgtatgacctcttcaaatatttatatcctaaaaatgcctaaatcacataagtcttatactatgtacgtacacaaaaatatttattggagcgtacatggtacaccattaatctaattttttgacatcaaaattaagttatttgtatggctataaatctcaatataaattatgcaaatatgatattcaacgaatcgtagtctgattcaggtaaaacctattttccaatactaaactgcaggtctttcataactatatgtattcatgtacgtaaaatatttacctttcaatactataccgaatacatagttagtagtgtgcttatattattccaaaaatcatgtcttatctcccgtttaggactcacaaatgatcgaatgacttaatttttttctaaatgatcgatgctttttcaatcaagaacatgttcattagtgacactcaaatgcagaaaaagatactcaggttaaagatgactgaaaaattacagttatacctttcatcggatttcttcatgtatatatatttaatttataatgtacgtacacaaaattatttagtggaacgtatatgtacgattcctaataaatatctaaccaaccacaacaacaaatttgatatatatgttagtttcatgtacttttttcatgtgttgttcatacatgatttgaatgttttgattttatggtcaaaaaaaatttgaaccgtaaatatacaaattatttagatatttacgtacatatatacacacacattactcccgtatacgtacacattactccggtgtacgtacacattactaccatgtacgtacacattactatagtgtacgtatatattattacggtcagagtaaaatgaagcaaggcgacgattattggtagtctctatgcgggaacgcattccctacaacaaatcatcatgattagtgacatgtacggtatgtgaaagtaaaaaacgttataaacacattggcaaaatattactcgattatctgccaagatgagacccaggtcgaactcatttattcccacgcatttttgaaacacccagaccacaaaagcgcgtatactccatccgactataccatcatctccagttacgttctcagctatatcatctgtgtgctcaactaattcaccttcgcatcttgtctactctgcacagactctagtgtacgtacattggtacaaaccatgttgacacatcggggatggagcagaggtgggtgtactgtcaaccaaaacaccagtgggttctacgtgaggtacatgtgtactcgtcgacgtacacgatgccaatagacgagtgaattcccctgggggttccacggtttgttgagtgtcattcacgacgtcctccttaacatgaccatttccatattgttccacaatcatgtcaccccatttattgtaatcgtaatcttcgccactaccttcactaccgtctactgtagggtcgagggtacttccacggctttcaccatcggtgtcatcgtcatgtacatccatatcttcgtcctttacattatcctcgtcctcatattcatcctcatcaccttcatctatgtcatcctcctcatctacatttatatcttcgtaaaaattatgagctgcatcaacatttgtaaccctgtttctgtatggcctcccttgccgataaggtaaaaagacaaaaacaagttaacagaaagatcgccattacgaatcaacataaatgtatccaggctgatttgattctcaatatatactggagggcgattacttgctatcatatcagacatctttccaggcatccagtaacttattatagggttccattcactaaacttatagctgaaaacatcacatattgtacttgccaaatccgtgtacgtcgttgtgtctgtaatacgtacacagcgtccgaaacttcctttttcagcttcaaatttccaaccttcttctttgtatatccactcaccaaccataattaatacaggtaactccatacctgcaacataaattcctcaggtcagaacaacattaaatacaaaagatatttttgaaggctttcatttatatcaacgaagacaaaaagaatctctaacaaaacaatttatgtacttataaatttaacaaaacagatcatagagctttcatttatatctacaaatacaaaaagaatctccaacaaaacaatttatgaacccagaaatttttaaaaacgtatcattactttcatatcacgttctcaagtgtaattaataggattaacacgaatttcttacccagaacacagattgtctctccttcaatccttcaaactttgtaaaacagcaactgaaaacttcagattcttcaccgtaacacaatttcgattttcgtttttttctcagaattctaatctcaattatgtaaatatcttacaatataatctctattataataggtaatcatgagttttagttttgtcaaaactttttagcatgaaaaacttctgagcccaaccaatttttaaaatttttaatttcaatctcaagtgtcaaattcgccgaaacctagaaaacatttaatgcatttctcgtcgatgaacagtgtacgtacaaatccggttctcttggattccaacgacgcggtccgtacgtacaaaccgggttcagtttcgtcaggggcattttgatcagtttttggctgaatggctaagaaatgaaaggcccagcccacaatgtcaaaatctaaaattaaaagtgagtcaacggctactgtgcgcaatttacccttttttttaaacatctttttaggtgactttcacatcatgtgtcagataactcttatttataatgtaaatttgaaataataatattattatatattagaaactatcatatgaatatatagactatatataatttccaacggttatgagaaaccgttttctcttaaaatgcaatccccaaggacaagtttgttggcgtgtcgggataaccaacaatctgttggatttgatcacttttggataatctgtttttggtgggttttcttttctcttcattcgatggaatgtgtgtcactagtctggttgcacttttcatcagttttaaagtgcattttggtggttggataagtttggaaaaattacagatattttccatgtaatatgatggatagaattcactatataaaaaaaaaaaaaatcgcgtgtttggactttagctgagtttagttgtgttttgctcaatgtaaacatatatcaaccatttcacgaacatcaatatgcaatagaaatggaattctcatgccatctcgtcctaagatcctactcacggcttttactagctactagctagtccatcacatcatacaccttttaaacataataacgtatgtgaattatgttatgaccggagactttccttcctatgaagagtttgatgagtagaggagtgacacggatcgaatatttgataaatagctcattcatctagataggtttaaaactttagactattacattgtagacaaaaaaaaaaaaaaaaaaaaaaaaggatacagaggccttttatcggcccaccttaaaaaaagagagctacagaggccttttatagacccactttaaaaaacaaagatatatgaatttgagataagaaaccttatttcaaacaagagaatagtttattttgtcccacatcgtttaggtagagatagtgatggtagtaacatgcctataaaaaagaaagagctaattacgtaaaaggcatgatccttcaggcaagttaaaggggatatgatgaatggtaaaaactcgcttatattgcgagaagagcgttccgcccaaagcctgttacgactattgggcgctctcttttttacacaatctgatccctccctaatttccaataagaaggaacttttcttttttagttttggtttcatttttcttaactagtttgtttttggtgcagttttctttttaaggggaatataatttagggttagtacttaaaagtaattgttaggttgaaataaaactagtaaatgaaagtaaaatccttcagggattgaaccccaaactatatacatcaactttcagcaaccattaacactacttggaatctgaacaattcttacacaccagaattatcctggtggccagaagagatctttaagtaattatggctttgaagttgagacttcgagtagtaacaaattcaatgaagcaagtagtatagtagtacatgtgatgaattccaagaacattgatttataaacgaatcaaggatgcaagagagttaaaacgcagaaaagagctcaacgaaccatgtttctcattgtatcttctggtggaaaaaaagcacatgaaacaagattacagatagagtgaagagagaaacaaacttcaagcccgtttgccgctgctagggttggacttgggacagaggttccaacgtcccttggcacgtcgacgctttatggttgctctaccgctagtggtcctcatccttctacggaaaccatgagtcctagctagagattttcttgatctgcttctcttagtttgacacagagcagcttttccagctctaaccacaaggcctctgcgtctctggccattcagtccactagtttgactgctgagatcaaacgcaatggacaaacctgaaaagacagcaacaccattttgatcaatgtgacattataggtttgatagtgtatcaagctgataatattggaaccggtaaactccttcctttaattacccaaagaactcaccatacaataccaaactctcaacacactgctcagaatcaagacccagacaaatccaaaatgactttaatgcattctcctaggttacccttttaactcttgagctataaccataacgtctgttgctaaattggcaaagcttataattcactgctcaaatcttagcctagctacaatggtcgtacaatatactttacaagaaaattatgatcaaaggaggaggaacaagttcatgtgacatattgaagcaaatctataaccattgtacctaaataatcgacatgagctaaaagatttttgtactaaaaatcaaacaacatttacttgcggctacaaatacatgagctaagatatcagaaattgaggcttaagttgcaaaatgttatcttcacttgttgttataaacttaacaagaaatatcagaaacaaacaaaatggcttctttcactcacactcccaaatcgaattcaccattgacaactatgtttcacaattcccaaattcttctaaaaaagcttcgaatatatgtgtttgcaaagtaagctagagcctaacacacgagaatagtgataaatcaaccaaacccaaagaaccagaaaaaaaaatcaaaattgggtaaaagaacttgatacattacatcaccagaagctaaacacaaacaataattcgaaccaatttaagatgtaccagaaaatggagacgctagggaaacaggcgacgagagaaacgagcaatgaagcaattgcgaagaagcggaagaagtgagagaggacgaactccgtctacaacccgtacgcagagaaagcgaagcagaaggaacgcaaatcttgccgttggaggcagcaggattccataaacgcgacgaagccgaagctacaacggaagtggataaggaagccattcaagttcccacttcttatctccaaacccagttcctttgtttctccggtctcctttacatagtgtggaacctctatcgtctacggacgataccaccataaacttacgcataagaaccaaccataataatacacgtatcacgacacttcagcccataagactataaaagcccaatactgaattggaccggacgggtaattaatcaagttaaggccagatttgaactggtctaaaatatctcatgctgttgttctgtgatacaattttgcttcatgtaaactgttaaaaacaggcactctatataacaggtaacgagaagaaccacaaaatgtttgtaatctagaggatattttctacaacttatccaacattcatcaagggtttttttttggggggtaacacaagtatgccatgagtctctctatctatcttttgaacatcttggaccacatgtagaggataaagaagaggaggagcgcgaaaagaactacgtgcattatgtggttgttaccactacggattatgcttaggttcagtttccttatgttgttcttcacccctgcttgcgctctgatcaatgtcatttgctgtcacaaacaaaaacaaaataccattgaagcgttttatgtttcagacaagaacaacatttcgtctacttattttattttgcttataacagcactaaatgcttgtttctgcagtctcactaccaaatctagttgtttgtcattatcttctctaggatgttcttctaggtaacaaaagaaaaaactagaacgaactaaaagcaatgaacacattcaacaccaacattctcattgacaaagtggcaggaactcaatgataagctgtaaccatttcctgctgcatttcaccaaactaggtgagattgaagatatctaatcctacccaccaccagcgttcagaccagatcctaagtaaacataatctacactttggatttatcaagattcattggttttgtaagctacggttaaagttatctaacatatgttaggatgaaactatattttcccaactaataatgaacagagacatctgaaacaagttataggaaaccgatattcggatatactatatataatcagtgattcatcttaaaggtaaagaagagtaaatgaatgcatgttactgatgttaagtgcttacattgcaatttactatgatggataaagaaaaaactaaagggacatcaacaacataccagttcatctaagaagtccctctgagactttgcttctgacccaatttcttgagcaatctgcatcaaaataagcgatcaacgatataacaaaaaatcatgagggataaataatgcgcaaaagtgcaaggtaaaacacaaggaattgtagagaatgtcgactgattccttcaagaagggtggtgatataaaacaataaccacagatgtatacaaaagacatcagacaagtggattcaactaattaatcgtggactgactgataagtattgtgaacaataacattatcatagtaccctgaacaaaaaaacacctacacaactaattaaccaagctctaaccactgtcaaaaccgaaaagaagacaaatttccaaattcatatgatcaacttaaagcttaaagagaacaatgatccttcagaaccacaagaagacaatacaaatggcactatagataaaaagtagaaagatcgaaatgggatttagagggtttcttacatttttcaattgcctgacttggccatggagacctagaatctcatcatccaggtcagagtgcataggatcaatcctcagctgaatttcctctgaacctgaagcatttctagtgcttagcccttctctacaaatcacacaccaaagataaatacttgtactttacgcagaattcaccaaatctaggacccgttttctctatccagaatcgatttcagaaaaggagaaactgataatattagaaatatacctagatctatacggatcagctccgccgtatagagaaccacccgcaccgcgattggacgccatcgacgcgaaatctaatgggtgtaagaaaccctaaattcgaatctgctggggtttgagaaattaagttttgtattctctcagaaaattcgagatcgagaaattgcaaccaaaagaagagaacaaatttcaggcaaatcaaagagaaaaacgacgacgattgaaacaagctgggcgggtgctcttcgattcaatgataaatgaccgcgagggaacacgtggcgttttaatattggttgattatcgtcatgtttttgagttatgtaaacaaataaagaatggcagttttgaaatattcgtcagccaatattttttggtttatgggcttttttaacgggccgatcccaactttagtggaccacaaattcattcgttcataatgatgtcattgaaaaagagaggtatttactctgttcgttctacattcgttgtattgtaagcatcaacgatacccaattacacaagaaaaatgttgttttttcatgatggtgttgttattttctaattgttgttaacgaagagtaaagataatagaatcgtgtttgcattgtagtcgttagtttatccatcggtatttatttttaattttttagtctttttttaatatattaatttttagtgattgttaaccaactgttttataaacgttaacgatatgtaggctaaattttctgaattagcaacaatgtaacaagcatgattttatcgctgaaaggtattgttgaaccaacaaactacaaaacaaacataatttcatcatttgtcactgttgtgtatcactgatgaaagccaaacaaacatatcctagttttggttacaatatctcagtgttgatatgatagatgatggtaagcggtaactcaattttcacataaagtagtggtcttgacttgttgtttctagttggttggggctaggtgtcattgcaatcgttttgacattttagtaggatcaaagaggtccagtccaacgaatttgaggtctagtacagaaaatgaaaattttgagctttaattaacatttttattgaaaataaatattaattggaaaatttctatttttttcaaaaacttggacttttattctgttttattgaaatattgtctgaatttttaaaaagaaatgagcgtttgtcttttgtacttatctaacaaatggtttatgtcttgtgtcattcatacttttgtcctctctattttgatctggtatgacgttaaagtgttatccattattcatacggtccatgttgcattggactatatatctactagtcaaattcaaacatttgaccttccaccagatcctatcgtaatttttacgtgagttgtagtccttttttgtttcctgaaagcagaattattgtacccatctttttaacaatggtaagaagatttacgaaaaatggttcaatgaaacgttcaaaaactgtgaacagaaattgatttgctaatgtagttcggaaaaggagaaaatggaaagttggagaatttatatattaaaaaaaaaaaaaaaagttggagaatgttattaaatcatcgcaaaaacttgttaaatcactgatacaaatattggagaattttacattttcctttctgcattataagcttatggttatggctatctttgtgagtaaataaacatctttttaattattatttttttcatttatatattcgaaattaactagatgagggatttagtaaacagaaagaagagttgacatcatgtaaaatcgaccgacaggttcataatgatgtcattgaaaaagagaggtattgtcatatatggtgtcaccgctaggtaacagagacgtacattagcttatgttgatgtattgtcagttggttaataaagcccaccactacttcacaacttggttgacttttcgttttagtattcgatttgtcatcattaattatctcccaagaatttagtccaccgagtcgtatgctatatagaatccaaaagatatcaaaaatttacaaacaaacattataataatactttgtacaattcctttagtttagttcaagtgcaaaatagaaacttattcatgaactgtatagatttcatatttcgtactttgtctcaactaacaaaatgtatgtacttttggaattaaaaacatatttaagattaactaaatttcatcacgagtgtattttgtatatgatcgtactacgttaaccaaaaagtttcactatccccaatacccgagtttcttaaaatatcgtatactctatatatagttttattttcaatatatattatccttgaattatcattaaattcatggatttaactacccaaatattatttataaagatttcatatcttttggattcctaacaatttattgtatttaaaaagaaaagaaaaaactagatctgacgttagatagttagtccataacagatatagttgatatcctatcaattgtgaagtgggatagttatataattgaccgttttgcggagccgagcttgttccacgcatattcgttgattaatattatgttttttcactcaaaaaagtcacatttgaatagcataaattgcataattatctatatcatctatctataatgataattatgaaatttattgtatgaaggaaaacatatcttatctaaaggacatgtttaggctttatcacacagccagccaatctggaatgacaaagaatctcttctacgtgactatccttctacaatttcttgtctaataacatctcgtatattatctagttctgttagcacacttattgatttttttatacaaaactactagttataaattttatttatatccttgaagttttctttatttttatttttttaacacgaatttcatttttattacttaggtacgtagtttgaaaacaaagcatttgagatacacaatgggataaaactatgaactatgtatgaagacagagcatgtctctggtttttcgctaaaatatcagcaggttgatttattgatctgtgtgaccacgtgaacttgattgcgtcaaacttatttctccaaacttggatttcatggatccaattgatagcatcaaatcttcagcctcttccattcagaacattgactaggagcttgcagtcgccttcaagtattacttttctaaaacctcttatccataattgttgcatggcaagaattaggctttgacattctgcttcaaaggctgaggaaatggtcgcacctgtcgcttgagcagcccctttgaacacgccgttatcatctctgattatccaagctgccgtagagccacggactcgattcataaagctgccatcgtaattacacttaatccatctcatatctggtaattacactttatttatattatcattttagctatttttaaatatttttcaaattattttatgagtattttcttttatatagttcttcagtttatggtataggcctctagggttaatatttctaacatccttaattttatagtttttatgaaattattatttattaataatatgatttatatatacatatatatatatatatgttcttttggtaagttatatatatattgtgttttctgtatttaatttacatcaaaataactgaaattgtcgctatcacatctatttgcatttgttgtacgaaagcataaatcatttagcattcatcttttaatcattttttggtgatcaaaatccgaagctgaaatctaaactaatttcgagtatgtgtacactatataaattaaattttgtagtggctcagaaaaagttagtctaatgaaaatggaactatgacctaaacatccaacaataaaatttaacgcgcatgaacaaaactttagttgaatccaccttgacatctccattggattctcaaactctaaccacataataaaatcttataaacaacaaaaagaaaaaaccaaacaccttcatccaattttatgattggaattctatacaagaaaagaaattagaagacgtgaaatgattgatccaatgcaatttccaaatatataaaaaatagatgttttagtggatacggaacttgggtaagccttgcctagaagcaacattggccaccaaacaaaacccactcattggagcaacgtgtgtggacccaataaacgagcctcatgggacccaaacggcccatctatttcatatgtattttagttgaccaatatggttcagaacttggagttggaatgagatgtttctttgttttttccaacatgtatatatatttatgttagctaagtgatacttaaataactaggttagtgaaaccggagaagccggatgtagaaaaaaaaacaaaaaaaaaacagaagaactagatctgtactttcaccatgtttggttttaaaatatattttcaccatgtttaaaaaaggaaaattttgtgagatttctccacttcatcataataagttaataacgactcaaaactttcaacaattgacaatacacgatggttcaaaacaacatgtttgaatatcaatgtgtgtaatgcatcaatgataattctcatgcttatatattaagaccatatatagttattttttgtccgttatataaactatataaagttttgacgagagccgcccgtccgtgacagatagagaggcaaacaatcgtacgaactctaattcttataaaagtttttcgagaactaaatattccaagtattttgcaataaataacgtagacaaaatagatgaattacccaaattccctacgtgtcaacttttgcaaaaacgtccttaaaatattccttcacaatctctcgttcacaaaaccgataacgatgtttgtttaaactcaaaatgacgatgatttaactagtggcgttccaaaaatatgactttttctatattttcttgacaaccatgaaccatacaacagagattttacacagaaagttgaatttatctaatcagatagttaaagcgagttaaatttgtaggaattgctctttagaaaacacggatgctagattactaaagaacgcgactaggtgatatatattaatcacactgaggaacgaacctaactaatcttcattcagtattcaaatttatttactagctaggtttaattttcagttcgaaaacttctaaaaaacaaaagcatagccatggccaggaagacaaatttgtttttgtcattccaaagattctccaacattcaaattagaatgatataacttgattagttcgagagacaaaattttatgaaagaaaaagtgtgagtttagctctaggttttgccaaaatgtgagcctaaactcagtctgatgtttagcgtgagtttagaaattttttgaataagatcgaaaacgatttctaagtggtactacaattcttcgaatgggggacggtggtcgaaaattgttacgtccagaaatttataacattttttttttgtagcaggagattttgtattatttgtggcaaatataaagtacttaaatcatcattcttaatgaaacattgaatttaaactcgaatcttgtaacacgaatacaatattttttttaacatgttcgctctatcattgtgagttgcttaaatatgtgtatagtcgaaatcttaaatgaatttcttttatataaaagtgagtcccggagtttggaaatgaaaagaaataaaaaagcgaaaatcctatcgaaaatgtcacacaattatagcgaagaaatcaaagctgaaaacattgcttgaggacgacagtcgaaatgattcggcaatatataatatgattgttagcaatggaatgattggttggtacaatttttatgtttgcttgacagcaaagaaattattaggtcttcttaatagaaaacaaacacattttatattataaacctaggaaaggaagaatgtttattttggaacaaaatcaatcagaatatcatatgactgattaataatattttctgatatcacctcttaaataatagaaccctccataataggtctaggaaaaggtatatattcagtttacatttctaataagtatcatttctttctgtcgacagtaagattatttctacatgtaatagtactataataaaaaacgaaattttaaatagtgatatgaaatttgttcccgtatataaggtgatttcttttgagtaataatatgcgaaatctagtgcaatattcctaaacaaccataccaaaaacactaaaataaaataagcaggatcctaaacaactaaattatactaagaaacagccaatattacatgtctggtactgtccaaaatcttgtattttgacataaaataaagtaatatatatgatctcacagagtcacagcagatggcgtaaaagcatgtgaagattgatgcaaatgatttaagttgtttcccgtgacctgcagacgaaacggaatgtccatggtccatataaaccttttcgtcgttcgtggaaccgtcctccaagaaaacactactcttttagataaatatgtacttgttttatcgtcagagaaatatagatttttctagaaaactttgtttcaacaatttatggaggaattatgatatgaaatagacgttatacccctattttaaaggaaatgggcaaacactatatgaattttctaaaaaaacaattttgcttagtgagtataaaaccgaaattaatatggattaaccttataatactgccatgcatgtctacatttttcctaacattgatacaaaaaaaaatgactgaaatttttcacatatttttatattattttatctgaaaactatgaacttggtaaagtttgacatcataactatgattacgcctcaatttcacaagattggggtttaattattatcagttacatctaatatatcttacattctaaactttctttttgaataattgatgttaattaaaaaacattattctactattgaactcagatatatcatgcgacatttataaggtctcgtatgaaacatctaccaactaataattcatggtagagaaggtttttaaatcttttgacaactaagacctattttaaatttatttaattcccacagaaagaaaattgaggtaagtcttaaaatatgataagtgaataatgttttgaggttgacgaagttttagagtccgatctctcacgttatgttaagaaaacaattttaaacaaagagttctttttattcatcttttaaattgttgaaatttattcatttaagtacttaaagttttaaatggatgatgtggagctaagtagactaaactgttaacgaattagaccactctatttttattaaataaacaactatttattatagattaaatttatttatatgtaaaatttagtctatagttggtacaagcggatttttttgtaattttctcaatcgacattactacattaaaactatataatttatgaatgataaaaaaccggtataatccgtaaacaaatttgtttgctttaaccgcaacaatttaaactcttaaaagaaataagttgtttaaaaacatttttagatacttgctacaaaatagaaaaacaaaagagttttagattccctaggaagacaaagcctgcactactttccactcatgagtctttcccatatccttccatgatctttctctgtgccatagacaaacccatacacatgtattatgcataatgtacataatccactactcaacatacgtgttttcttcatgtgatctgtgtacccacgacggtgaaaactcatatttgtcttctactctaaaatgtgattctgtctttttaaaacagttgaacccaaagttttacatgaactgtctatgccgtttataaaaatagactgtcgatgccgactattatcagatccggaatgtcttttcctataacattttaatatgattatttgtcttttcctataacattttgatatgattattcatccctagccgaaagaaagttagcacttgtttaagttggtaattagtattagaagcttgacatatacttgcatgattagtcttttaatttaatattaccacatatagatgcattatatgtacctaattagcttatattaattactttgctttcgtctcatataaagtaacatttatagtgctgatttaagactaaaactaatcattgagatggacttaacatctttcggatgtcaatttaatgtcattctctacaaggaaaaagattagattttgttgcgtaacaagaccagcgacataatgcaagtttgtgaagctttctaggaacatactttcacacctaaaaaacgaacaaaaaaagctaattaagcagttattttcttaataattcttattatcatgtgttatattcgtcgtcaaaataatcttgtaatagacatgtattaagactttaagaggtataattttccatttttgattcaaaactcaaaattgattagttagaaatagatatatttaaacaaattttgattttactggaacatcaagtttttaatgtacacggtaaaatcggacccaaaactacaacaaaatactattgtacgtccgtggcattagagttgagatcacctaaccgtgccactagcttgggtttcataattgacataattgtgtacattaaaatataagtattatttaatcacattaagaaatatgcacagaaactttttatcataattatatgtatgtacatgcattagtgcatatatacatacacaaatgagtgtataaaagcttgaacccatcgaacaagcttcatcacaaaaacccaaaacctttgatatttgtctaattttacaaagatgggtttcaaactcatctctctcctccttctttttcttccacttctaacagtcacaatcttgtcgggagtcgagcaggcctttgcttccgacaaggcactcctcgtgaccggccgcaacatcacggctgacggtggaaggtcgtcactgagagggaagaagcagaggagagcatcaggatgtaacttgttccaaggccgatgggtgttcgatgcttcttaccctttctatgactcgtccaagtgtcctttcatcgacggcgagtttgactgtctcaagttcggccgaccagacaaacagttcctcaagtactcttggcaacctgaatcttgcaccatcccaaggttttttcaacttttttttttttcaacttaatttacttaaaacttcactctttacataattcaaaatgttttgtttaactaaaacaatcactttagttaacaagaattttggttggagaatatttcgagatctcatgatctttgcatgagttagcacaattattactattttaaaatatattttttcatatatatatatatatatatatacagtatatattgtataataactagaagttggtgatgatatgtttttcatgcactttgttttaaagaaacgtggattgtagagcatttcatttatattatttttacaaatgaaatggaggggtttaaatcagtatattaatatcaaaagtgattaagtggattattatgtgatatcaagaatagtaaaaaaaaggagaagataccatcaagttgtatttaaattaaataatagtatatgcaaatgcaataatgcatgatgatggattgttaattacgtaattaggttcgacggtggggcatttctgaggaaatacagaggaaaacgagtcatgttcgtcggagactcactgagtttaaacatgtgggaatcgttggcctgtatgatccatgcgtcggtaccaaacgccaagaccacttttctcaagcgtaccccactctctactctcactttccaggtctctctttcttttttttcttaaaaatatttttataaaatctgtgttgctctttggataaaaacaaaaatctaattatcaatcttcacgaggattagttgtcatcaacgaaaactgaattggctgtcattaatattgaagaatggtcgtattattagtcacggactataaaatttattggtcatttagaaaaagaattgaaaaaagctgtttggttggtgctaataatgcttattaacatatggttgttgttagtgttcgatcacatccacttgcttgatatcttttgaaaaagagtaagctattattattgaaaagacttatttgattcttcatctacatataccggaagtattattaagtatagaagattcgatagaaacatataaaatttccttatttcgtgccatttttctttttgttttcttcactcgaaagctattgtcatctttaccataattgtgcaaagttgtttatcatacatcaattacgaaactgaaaacattatgaaatgacttgtctacttcacttgatatgtaagaaaagctatggacctccaaactctttttctttttatttatttataaatcaaaatatataaatcctacagtaattgagattctatttaccactatgagattctgtctctttttaaattcatggaattagttttaataattaaaaaatgttctaccagaaataacaataaaaacaaatgaatacgtaaaggaagtacactaacaactccaacagtccaacttgttatctcttgttccctctgcctactttttactactattctcattgttctatgacactttttctttcatttaattattctcttccttgaatattcttataaaatcttgaatctgatgttatgaaaaaacaggaatatggagtaacgttatatctatatagaacaccatacatagtagatatatccaaagagagagttgggcgtgtgcttaaccttggagctattgaaggaggtgctgatgcttggaaaaacatggacgttcttgtcttcaactcttggcattggtggactcacaaaggccaatctcaagggtccgtaccattaatataaacaatatatacccaaaatatatcactcataacttaaatttttgaatttaggtgggattatattagagatgggtcgtctttggtgagagacatgaaccgtcttgacgctttctacaaaggactcagtacttgggctcgatgggttgatcaaaacgtcgatacggccaaaactcgagttttcttccaaggcatttctcccactcattacgagtaagtccatttccgtttcgattgtttcaaacacagacaaacaattgagaactaattacgtcattcaaacacaaacctatatcgactaatgtcttcctttcgggtaacaggggaagggaatggaacgagccgaggaagacttgtagtgggcaaatgcagccgttgggtggatcaagttacccaagtggtcagcctccatcctcaggagtagtgtcgaaagtgttgagttcgatgaaaaagccagtgaccttgctcgatatcacaactttgtctcagttgagaaaagatgctcatccttcttcttatggtggcgatggaggaacagattgcagccattggtgcctcccagggttgcctgatacatggaaccaacttctctacgcagctcttacgatgtgaagtgttaagatactaaaaagaaagtgcataacacctttattctgtaaatgacattcgtaaatcttctagtgttgtgtgatgctatagaaaacagatttataacaaaagagacattctcagtataaaataacacattggtttggtaactctttgcttaacttgatttaagagcaaaagctgttctgtatcacctatgaaacaagcattttgacacactcataaacaacaatttctctgatttgatattcaaattgtactaataacaacaccatttacaatcccatattcgtctactatcacagaaaatttgaccttgaagaaccctagataaaacacaaaaagccaacatgaagaaccaaaaatcatgaaaatttcaagtgaaatcaccttaaaatttgaatcccttttgcaagaggatttgcacacagctcatcttctcaatctctttgtcttcttcttcctctgtgtttctcgaattcataactatggctttcacaacttcccttaaaggaatcttaagtttctttcctccaccttccttcttcgctgcagattccagaggaacatcactctgcttctccgccgaaacctcaaccgtcggatctgcaacatcttcctctaaatcaacggtgtccacgctttcctccggagtgacgcatcgaatcgcctgactctccaccgcatcgttacccgagccgattacactatccttatccgtatccgaatcaccggatgaacgctgatatggaattccgtcgtttaacggtggcggtgagactccgacggagggatcggaatctggaggtggttgacctggtacggcaaaaccgcatcgctgtagataaatctcctgagacgcagatacattgcaatcttcgaaaatcgaaccaatgtttttctttttccctttcattttcctctgcattttttttttttgtttcacatgtatgttttgcttatgcttaagagctatttctaggtttaaggagggaaaactttcccgcggactttagagatttgaggcaaacgtgattatttctagaccgcaccaaacgctgcacgcctacaaaccaaaatggttctgaaatcaaaatatacaactaaaagtgactgcatttgtttttgtttttctcttctatcgacgagggtgacattgttaaacccggcgtcgagtcgaccatacaagaacgatagactagtaaccgacatagactgcgacattcactatgtagcaatcttcatttgtatcacccatttcttcgactagaacaccgcttgagcaaatcagtcctccatccaccacctctacattcacaatcttcccacttcaaacaaaaaaggaacgaatgattgtgaaaacatggtagataaagctgactcaagagatgttgtccaagactaagtaacaaaatgagagatgttttcccacaaacactatacatgatcaaataagtaaacggtaatggttgtttctttctactttttcacaacaccaatcttaatccaacttcaaaacaacttatatctagtaccaagccaaatttaaactctatgatagaggttacttgaggaacttactatgggaagatagacttaaccttgtccaaatccagctgctggtgaagagaatgaggcactccaagcttaatctgcaacttcatttctccaaatgaaactccaggaatcgaaccttcaccaacacattcaacgccactaagtatcaagttaaaagttcgaaattgctagataattacttgcattgttgagccaagatgatgatattcaatttggtacccctcctaaaagcaggaatcgaattcgaagaaattgcattcttacaagccttcatcgccgcagatgtcacatcttgcctgtttcaattttttcaacattttcaagattcgatctcaattctcacatcggtatgatcgatgaagacgcaaattttgagagtaagaaaactaaagatctgacgtacccgtgctgatcgtaaccgacacccatctcaacgaacaataacttcatcgtgttgttgggaacaccgccggtaattgtctccgccgtcgtctccatggcgcttctcgcgatgactttgatcggacgtgagatctgaggaaaatggtcgagagagaactgcttactacgggaagagagaaattttggccgcgaagaagagattgttaaacacgacggagattgacggagacgaagctcagcgcagatatgaatcgaaccagaaatcaacgaaagagacattgaactagtgtttgattggttcgctctataataaatttttgggacaaagttgagagaaatgataaataagggtgttgttttcaaaactcaaatttgacacaaaacgacaatgtttaaagtcagggcataaaggttgctctttctccttcgataaacccagaaacccttggagtcttggactgctctgcgagagaacatatcaaccttctacactcttccaaaatcgccatgtacggtctcatcttctttttctccttctttcacttcttcgtctttctcccgaagtttttttcattattgtgtacagagacgtgaatacatgtgtatagattctgtttcctgcaacctaaactgtgtatattagtataaatactcattttcttagattttctccgtctcagctttatctaaagctccccgaaatgtcagaacagtattccgaagatgctaaacatatcgagaagctttatgagttcgacgagcgcttgagcgagtccacggacaagtctcaggttcgtctctatttcacctagggtttcgtttttgtcctggatttgaaattaggcattctctgtttgatttagctgttgattgtgttcccgaatcgtctctttggtctcttatgcttcgaatttgtgtataatcggtctgaaaatggatactggcgattaagttttggctcttcctaggcttgcttggtttgtttcttgtgtttgacagtgttttctatgatattctcatggtttgcagaatgttcaagactatgaagggattattgagttgtctaagacgaacatcaagacaaagcagcttggagctcaactgattccacgctacttcaagttcttcacaagtctcgcaacagaagcttttgatgcgtacttggatatattcgacgaagttgaagtcggggtatgtaactagtcttcttactcatacgatttatccagaagcaaaagtgtgctagtgtattatagatgaccttcgttttgtttgtaaggctcaaacttggtgtcacgtttcatttgcttcttatttgtaggtacgagttcaagccatccgcgggcttccattgttctgcaaggatactcctgattttatatctaagataattgatgttcttgtacaatgtctaaatactggtaattctgtttttttttatcatttaaccttgatctgaatactttgttttcaccatttgactatgaaatttgatccaaatagaggaatttgtggagcgtgatgctgtgcacaaggctcttatgtcattatttcggcaagatactaagggtaattcaatttcttctgcattcatcttcattgtctgaagatgacaattcatcttacagccgcaatgctactttgagaaaattagttaaattggtctttcagtcttatggtagatagtttgctatctgtactgttactcagtccatcttataaagcataaaaataagtgtagaaattacagactacaggttgtggcgtgctctaaatctaagatatattagtatgttgttagtgacagtaattttagtttttaaactgttcttatgttcaatattttcgtctttttttgtgtagcatctttgactgcattgtttaagcacactgaggccactcttagtactgatgagcaaatccgtgaaaaggtcttacactttattagagataaggtcagagtcctttctacattttttaatcttttttttgaggttctgctatatcttagcttgacttgacttaaatgaaatttatactctcatgttagacctatatgatcttttgattcttttcgccaaatcaacttgagtaggtactgccatactggtgctgatagctagcgtatatttagtggagtcattcttattttggaatttggaaagtttgtttatcaccgaaaaatatttcttatagaacaatatgtaaaatgaaaattttctgataatgcaagttaatggtatgctaggaattccttggaaaggttttgtatatcttatcctattttaattgattttgtatttccatgtaggtgttccctcttaaaggggaactgttaaagcctcaacaggaaatggaaagacatataaccgatttaatcaaaaaggttagaacatatctttggctgcatggagtttttctttgtacctatttatctggatttgtttttagcccttttatgatgttaacagagcctaggggatgtaactggagaagagttcaatatgtttatggatttcctgaaaagtttgagtatatttggagggaaagctcctcaagaaagaatgcaagaacttgtagaaattattgaaggacaggctgatttggattcagagtttaatgtgagtttctcggtcacattcttttgggcatgaacttaatttcttactttaatacaatggcagtaaaatgatttcattcctcgtagatgtttattgatttttaaatcacccaagtggtcgtcgttatctcggaatgaagtatgctagttttttgggtgtttgtgagattaaaaggatacttctcctggcacaggctttcaccctctcaacaaaaagcttataaaggatagataatctttagatctgcgattcttgcatgtgttgatctctgttgtttaccttgcgtattttttgttgtgaacttgtgatatctcattggtagtatgtgagaaagttgcctctaaattttcatgaagtcaggattttttccgaagtccagtatactgtccactgcccagtctaggattgaacatagggaaggggttaacagttttcttgatgcaaatccataggaagtgagtcataaaatttgataacatctgttttagtcaccatgggaatatctactaaggttttacattagtaaataaaattaatcttattatggtgattgtaaaggttgaaatttaaaattctgaaggtttcattttgatgattcaaaattatgccacaactactgatgttcaaatattattttcccaggtttcagatacagatcatattgacaggtttatatcatgcctgcaaacggcccttccattctttgcagtatggaatcatagctattactgcatagcacttggatatttcaaagttgagatgttttgaatcatatatatatactaatttcgtcctcttctgaacagagaggtgctccaggtagcaagtttcttaactacttgaacaagaatatcatgcctgcttttgaccaggtatattgtaactttctcaccttttcgtttaggtgtttgaccgtagttttgtatgtgcatgatctctttgtattcccttgggcatattaagaatagactagttaatggtatcgagggcatgaagtcacatctgaattactgaacgtggagcaactctttttgttcatacatgatattgccacttgtctgtcttgttgtttcattttggtaaaatctatattactccatgggtgagcataatattttgccaaatccacttttactagctgccagaggagaggaagcttaatttactcagagctcttgctgagatgtccccatacacaacagctcaggtagcacgtcagatacttccatcaatagttcagctcttaaaggtacctcttacgaaccaaattctcatcttgtcttcatatcttatattaagaatttatggacatacatattatttactgttatcatttctctggtgtatattcttattttgaacgtaaacactgtaactgttacgatttgctctcagaagtacatgcctgctaggaaaactggggaagaaatgaacttcacatatgtcgagtgcctgttatacgtgctacatcatttggcgcacaaggttgtctaactatttttagttgcttggcaaggtctcttattcttccttattacttatctatttctgttgaacatataggctccaaatgcaacaaacagcttgtgcggctacaagatagtgactgggcagccatcagatagactcggggaggacttctcagagttcaacaaggaattcactgagaggtactgtgaataaacagtagtagaatgagattcagttttcttcttgtaagacataaattttggtaaactgttttgaaaatattgttctgatgaaaatggacgttgcagattgaccagtgttgaggatctaacgaaggcaacaatgaaaaaacttactcaaggaatgtctgagcacagcaaagccatgtcgactgctaagacagatgaagagaagtcaatcgtggtaagaactttaagttctcactccttctgtatccatttcatctcatctttctttgctggtttaatattaccaaagctgctttcagaaaacgaagaagcagagtacaacaactggactcaggacctgcaataacatattggcaatgacaaaggtgaaaaacagagccatattttcttacctctttatgtcccttgctttctaggtaacttgtatatatctgtttaataaatcaagggtgttagccaatatgactgtttggtatgttacagggattgcatgcaaaagcgccttcatttatcggaaacaccagtgttactctttcttggaaagaacccacgaaagtgacgaaaccgttagcctctacaacgactgggtacaagccaaatcaactttgttagttttgcaggtttcttttcttgttttgcaaatgtggaaaaactaatgtttgtacgtttcatgtggctctaccacagaggaaaacggcctgcaaatggagccggtaataacgtgggtgcaaaaaaggctcgtgtgcagaatcaacaacaggttgtgaacaaaagatctgagggaatctcacacggtggtggtagaggcagtcacagaggccgaggccggggccaaggtcagggaagacacagtggtggtggtggcggccgtggccgtggaagaagaggcttctggtaatttcaaaggattctccatgacactcttttttgtctgttcttgtataacagagtatgtttatccttcttgttttggctcttttaggctcctaacattcgacaaacaaattaatctcttttgcgatttctttggcttctcctttatatgacaaattctttgttttcttttctctttaactaccctttctgggaagtcaactgtcctaaactcataatgcaatagtcagaaatgattaatgccaaagtaacagtaaaaaatattaatttataaataaccccttcaaccttctctgtatttatcaacttaatgtcactccatgttatatattcgacaatgtaactctgtgtttcaacgcccatgcatccttccaatggcacaacttgttctgtccctgacttctctctttctagcctctaatctttaaatgatctcatgaaactggtgtgtaacttcctacagaatccaacgaagccaagcccagagctattaaagagacttggtgagtacgtaacatgatggtgattctgttttgtggtttctgcagatatatgaccttcttcggattatttttcaatctgcagaagcaagtgtggaaacagatcatgcttctcacattaattcctttcctcattgtgaaactttcagagctattcgattcacgatcttggagacactattgttctaatgacgctgatggctgatagtttccacttctgcaactcttttgcttttggctctttcggtatacatatgtacataactttatagctttactgaattaagttcaagattttgtgtctaatctttgacatattatgaatctctgaagcttttggatacgagtggactaaagaatagcttggataagcgaggatttagctcatgtccgaagtgaaaaagaaactgcagagagatattcgcttgaacgcattctgcaagatggacaactcactagggaaagcttgaaaaagtaaaccactgatcgattgttttgctctggttcttgctttggtttttaatagaaaactaactgactttttacaggctaagggaatcacttgcgctgtaagtttttaaaagaagaacattctttctgttccattgctcttactggttctcggtttttaactttcaagagactaaaaactgctgtgtaggcggcagctgttgctccgagtctgaaggtgggaaagcagaacaaaagtgttggttagaaacataaataacgctttgtctagaaacctaaagaacgctttgtctcttcacttctgtgccaaaaaaagaaaagcaagaaacagcatctctcacattttcacaggtacacataatcattgattcaatcttggttctttagattttttctttctttctttcttgttgctgaatcttgaagttttcgggttcagatctacagggatgttacattcaacaatttgatggggatgtcgagaatcttagtgatagtgtacgccaaaagattgacatggaattgttcaacagagaaaatcttgattttgtttccctgcttcttcctttgtatcatatcccttcaatcattgtctttactacatttcaatgtctcacattgtaaaaggaaaaatgtacagagaagataaaatcttttgacatcgatacatagttatctttctatgcaagtaactctggtacagtccttgttctactaaacaagtatacaagttgtattttctagttccataactctgataaaacaaaattggccttggtgtctacattgacgtttaaagttgtataatgaacattattgatacacatattaaactagaaaattagaagtttgttcaaacgattttaaaagtcaatataatagtcaccaaccaatcatagatgcataattaaagaggtgtcaattcacgttcttctaaaatccagcctcagcttcatcaattttataattttaccaacctcaacaagtatttatttattctaatatatgataataaacctcgagggatattatgataaaactatataataatcaccggcttataataattagaaaggtggaccatttccgttttttaaaatcagactcaataaatgtgaaagtccagtgtttcaatattttaacctcagtttcatcaattttatataccttattgtctttcattattcttttacgtaaaacccttccaaaaatcatgttacattgcttaatttatgtgtgtgtgtgtcagtgtattgcttaatttatgtgtgtgtcagtgtatataaatatatgcagcgtaagaagagaaggatcagaccaaaactattgacttaaaacactgtttcaagtttacttccatggcacgtcttactctgtttctgtcttttctttctctagctttagtctctgttgtaaactgtcgtgttttaagttctgtgtctgaagataacaactcctccatcttggtctccgatggagtccaagacagatccagcaacgactttctcagtcttaatccgccaaatctttccgagagtgcttgtgttcatgtctacgggtttcttccatgtgcagacaatattgaaggatatgtcttccaagttttctcctttggttgtctattgataatcggtgaatactttttgtctaaaggaaggtctaagctctttgtcatcttcgaggtcggtttctttggcggaattatcttccctctacttacaatgttcccaagaattgcccttattctatgtaagtcatctcttcttttggagaaataacctagacagaatttgagtactacaaaatatcttaccattacgttgggttttgatctcagccactggactgataggaagccgtgaaatagcaaactcgatgacgggtaataatgttgcagttactgttggatactctgtctttgctttgacaatgcaatggggagcttgtgttgtctttggcttgtctggtttgagatcagatgatcagtccataacttgtgtaagatcttcttgtccttcttctctttttgagtgtatagaatcatcaagtgatttttataatttgatacaggacataagtagtccaagaagacaagttaagaagagcattaatctattgaagaacctagctggtatttttaaatcttacaggtttcttgatttttcgagaatcttctacgcgagactaatttgtcttttgtgccgtttctctatgcaggagctagcattagagcagatcctaagaacaagaaagcggcagggattatgctcctgactttattgcctttcgtcttagtcacattttcagagacatttcacataaaatcttgggatgacaatatggttttggtcacactcatattctctggttctgcaactgttctctactttgtttatttggtaatgattcacaccttcaaaaaaatgatgtaaagcttcaagattcatatctttttgtgcctaatcttttttttttcaaaacccgcagtattttgataaagcggaccaagtgaagagcctagaatacgcgaagtttgagctcatgtcagaagttcataagcacttgcagaatttttcgcctcaaagccttataagaaatggacaactatgtcaagagagcttgaaaaggtttgtttctacattttttcctttgttattctaattttaagaaacgctctttttatttgattctgtttctgtattcttactggttatttttattcagtttgttcaaaaagtttgatgtcaacaaagacggaaagatccaagtatcagagttaaaagatctgacagtggactttggggtattagggagagtgaagtgtgatataaatgagcttgccactactttgcttgctgatttcgacagtaatagagatggtgagatagatgagactgaattcgccattggtatcgaaaaatggctgaaacagtacaaatttagcttcaatggcaccgagtcacaaggagaggacatagccgtaagtgcagcacaatcttctcataacattttttacatgtttgatcagattaagaaattgggaagtgttaactgcaggaggatgatggagttttgaaggtggaacaattactaaagggatgtctttttactaagttgcttacaaagagaaccttgaaagctgtcattgaagtcattatagggattactattgtcagctttcttgcaatgcctttcatgatgaatatcgaacttttgtcggtatcagctggagtgccttccttctatgttgtctttgcagtgatccctttggcaagaaacctaaagaacgctttgtctgctcacttctgtcgcaagaaagagaaagcaaaaattacatctgacacattttctgaggttagttttcttgaaactcacgtttattaactcggtatcaatattacccttatgatctttatcagagctcaaaggtgaatgagttttgtggttcttttcttttgtagatttatagagatgttacattgaacaatctgctggggataacaattatattggcgattgtgtacatcagaggattgacttgggattattcaacagaagttctcattattgtgatcgttggtctcataataggtgtaccggcctatgtgagatcgacttatccattttggatatgtgtcttggcctttgctctctacttcttctctcttatcctaatctatctccattccaagtctacctttaatgaataatcagtgaatatttccaaattgtttttttttttgctttcaagatttcatagttactattccgatttcgatacgctatgtattttgaaagttccgtcgacgttttatgtatatgagctctttgatgattgttaagcatccggagctagataagaattttaaatctttgatgttatgaatatctatgaaagtttgcagaaattgtgaaaatggacgttcaatgttgacactaagtaaggaaactactatacaagtttgcattctcacttggagacatttcaacgttttcagataatacttttctcaaaatcactattcagaaatgaatgttgaattcatatctgttagctataccaaaagaatatgaatccaaaaaaaatcaagttctaccatataattgacacacatgtgttgaactagttgattctgtatttctttattttttccaacaaatgcatttttgtttttatcagcgaaagaatgtgaagtacagtaaaacctctataatcttatgatcgtgaaattttattaatttatcgataaattagtatttattaatttatagagatatttgactaattttgtaatatttcaagatttttctttgagaaacaaagttttttcattataatcaaatatcattttataaccaattacaagtaaaaaaaatcattattctgtttagaaaacatcataaaaagttttcgatgtagtaaaatattatagacgaattccaccaaaattaaatgtaatttttttaaaaaataaataatactagagaatagagtcctattaatttatgatattgatgataccatatatttacatagaattttcggaaaaactattatcttattattttattaaattacattaaattttacagtgatatgattcaagagtgaagaaatttaattaatttataaatgattattaaattatcaaagttttgtatttagatttttactgtagatcatcaatcgtcaaacattccatgcctaaaaattaattttccaaatattttcacgaaatgttaatggtagacatcacatcgggtgcttatgtaaacaaagtcctccccattggctctatgagcctttctaataatataagttgttgacaaaaaaagaatgacatcggctgcttttcacgcaagtaagggcattgaatacgcgttgtggtctattgtgcaactgtattttgacgtcagttcctatctaatatttggggttaaggtgatgtactggagattccacacctttaaactaagcacactagttcttatttaaaccaaaattcaaaagtcaatagtccttaacaaatctatctatattctaccccactgacccggccaatcataattagagaggtgtaactcacgttctaacatttaacaataattcagaaaacaaagtctttctttatttactaagagctagtcgtaataacttgttcaactctagaaagtctttcttaattctattacgtaaaaactaaacagtaagaaattgctatagtaagattatgtttctgttggtttctgtgtatatatatatatgttggagtcagaagagacaaatacaacaaaagtgctcattataaacactgtttcgagtttacttccatggcacgtctttctctgtttctgtcttttctctctttgatagctttgatctctgttgtgaactgtcgtgttttaagttctttatctgagaaagactcaatcttggtctccgatggagttcaagacgggtccagctacgagtttctgagtcttgatccgccaaatgacattaccaagaatatgtgcgtacatgtctacgattttcttccatgtgcagacaatgttgcaggatatgtcttccaagttttctcgtttggttgcatcttgatcatcggtgaatacttcttgactaaaggaaggactaagctctttctcatattcgaggtcggtttttatggcggaatcatctttcctctccttactatgttcccacgaatcgcgcttattctctgtaagaagtctcttcttttggtttttgaatctatatatgttgttgtattaagaatgtgagattataagctctattctggatttgttctcagcgactggactggtgggaagccgcgaaatggcaagctcgagggttggtaatatcattggagttactgtgggatactctgtctttgctttgacaatacaatggggagcttgtattctctttggcttgtctggtactaaaccagaacagcccatagatttatctggtactaaaccagaacagcccacagaatcatctggagaaaattcagtaagttttcttcttcttctttgagtttatgaattatgaagtgatttcgattataatttgatacaggacgtaaagtgtccaagaatacaattttactggaaaaaactatcagattacgttttcggtatgtttagaactcttacagatttctgtttctttggagaatgttaattatgtgctcgagcctaatttgtatctttgttgttgttgtgtgcttattatggagcagctagtgtagaagcagatataacgaacaagaaatcggcagggattatgctcttgactatactacctttcatattggtcacattttcagagatatctagttcacaatattggaatgacataatcgttttgatcacactcataatctctgcttctgcaacttttgcctactttttttattcggtatgagtctccccaaagattattcatatctttttttgtttgtagtaatcttgaaggttttctttgtgaaaaactcgcagtattttgatagagacgaccaagcgaagagtttagatcacgcgaggtttgagctcatgtcagaagttcataagcatttacagattttttcacccaaaagccttataagagatggacaactaaatcaagagagcttgaaaaggtttgaaataatccattttattgcaaattaagcactaattgttctgtttagttatgtgttcttgattactgttattatatattatacagattgtttcaaaaaatcgatgcaaacggagatggaaagatccaagttgcagagttgaaagatcttacggtggagtttgggatgatagggagagtcaagtgtcacatagataagcttgtccatacattggttgatgatttcgacagggatggagatcgtgagatcgatgaggctgaattcgagattgggatcaaaaaatggctgaatcagtacaaattcagcttcgataccaccgtgccaccaagagaggaccaagctgtaagtgcataacaatcttctcaattcattttttcttacatgtttgatcagattaataaatatcaaaaacatgttgattaattgcaggagggagtaccaattctgaaggtagaaaagccagagcagagtcttgttaagaagctgctctcatggagaaccttgagagcttcccttgaagtcattttagggatgctagttgtcatctatcttgcaagacctttcatgatgaacatccaacttttgtcggaatcagctggagttccttctttctatgttgtctttgtagtcattcctttggcaagaaacctaaagaacaccttgtcagctcacttctgtcgcaagaaagacaaagcgaaaatcacatctgacacattttctgaggttagttaggtttcttgaaactccattaaatcggtattgatgatactcaaaaaactaaattcttttttcttaaaattcttttcttcttatgtagatctacaaggatgttacaatgaacaatctcatgggaatttcaattatattggcaattgtgtacgcaagagaactagtttgggattacacaacagaagttctcattatagtgatcgttggtctcttaataggcttaccggcttatgtgagaacgacttatccattttggatatgtctcttggcctttgctctctacttcatctctcttgtcgtagtgtatttccatttcatgtctctcgaaaagggcacaactgtcacctttaacaaataatcagtgaaactgtccaagagttttttttcctttttttttctcaagatttcctagtttttcccatatcgatccactatgtattttcatatatttcgtctgtggtgtatgttttacaagctgtttggtccataaatatagctctaaagtctcaatctttgaggttatgaattatctcttaaagtttgcagatattgtgcaaatgcttgacaacttaactcttgacactaattacgaaatctaaaaaaagaacatagagatatttcttcaaaattgctattttgctgctcttagaaatccacagtgcgctgcagccatatgcgatctgtctgatagtgaaaagaaaacacgtcaagcttcaaacttgatttccatataattcaatgaaatgctaatagtacacatcgattgctttgcatgcaagtaatggttttgatcatccgttttcgccctttttgtgcaactttgttttgaccaaaagtgagattgattcctcttattggcattaataaggtgatgtagtggagatttcacggcattaactaaaaacactagtaattacttaaaacaagttcaaaagtcaataggtttaaacaaatcataattagagaggtgtaactctaaaacaagttcaaaagtcaataggtttaaacaaatcataattagagaggtgtaactctaaaacaagttcaaaagtcaataggtttcaacaaatcataattagagaggtgtaactcacgttctgaagttttaacaataattgtcgaaaacatagactttctttaaatattgatcttttttatttgtcatatttcttgcaaaacctttcatgatgatccatcgagtttgtcagtatcagctggagtgccttccttttatgtcgtgtttgtagtgatcccaatggttagaaacttaaataatgctttgtctgccccctttctggcaagaaagacaaggccagaaacacatatgatacattctctgaggttagttttatttaagcccaatttcaatttttttctttaggtaaaagggcccattttttgtttgttttaaaatttattaagaggtttttatagtttttggttttgctaaggggctttcaatacctcgacttaccctttttggatatgtctctcttccccttatctatctgactatcttcatttctcaagtctctagatatgaaatgagaaactcaatgaaacccttatcaatattctacaagtttcaatacgttttcatatgttactttatgatcttggtgtaaaacattattgtaacataatgtttgtatttttgaagttaagttttgtctccatttatacagtcttttgattattaatcttaaaggcgaaatagccatgattaagtatgtttctttcactcgcattatggttttggttttttataagaaacgaagaaaatccaagtctttggcatatcttttgttacatatttatccaaaactacaaactcatggtgtaaagattcgaagttttgaaaactgcttagaacaaaacttattataacttaaggcgaagatcaatgccatgatcagggactgtgtcatatctctcggttctcaagctgaatgatcgatcttggtcgcgaataatctggtcattcgcgggtaagaagctgtagaatggttttttgtttaaaggaaaatttgtaccgctctttcgttgtataatttcatgatcatcctcttctttctgtccatactaaaaagattaggaggatgaaaatggatttgatctgatagaaacataaagaaacttcaatacctgtaaaaagcgcgggaaaccgagtgacggatttgcaaatatcgttgtaggaggactggctgaagaaggagaatcaatagtgattggatttcttattgtggttcctgaatcttggacatgatttttcaatcttaggtctagtgatctggtttgtttagcatctctgaaccaattccaaaataaaaaaatgtcaaacaaagaaactatgatcttagattttctatacatatatataactcaagaaacttaaccctaaaaacaaaccttgagatagttgtgctcggtccaacactacatttcgcggtatctgccataaaatgccatggccttttcgcagacgagatctatcaaagaataatcaaaatagattattaagaattaaactcaaattgattactttgattttgtttcaaaaggaataaactcaaaacattaccttttcttcatctagaaatttagtgacattgtcaagagaagatgtttggcttgaaggaggctctataaactgataaaatcctccagatccttgttttggtagattcatctataaacaacaaacataaacacaaatcagtctcacaaaaaaaatatgtaatttatcaatctttgaatatgttttttttttgtgtatataccggagggaggtagtgaagagacgaatcatgtttcctctgaaacactggagccggaggaatcaaatcactagggaaagatccggcagagaaataagacgaaaacgggtaaactagaccggttctgtcagtgatggttggagacttctccagggaaggaggatgatgaagagtaaatggtgcggccgtagagatgtgttgttctccgagacggatcttctcgagttcagcaacaccaggtcctctacgtgggactcttttttttcctccattattatgtttctgtttcttcggacacaaggacgagtaattatcatcatcttctctgtttccataacttacactactcgtcttactacacattgtgatgtgttctctctattacttaagtgtgttttttttgtctcttggtgtctagtttatgaatatacaaaagagaaatgattgagagcaatttataatggtgaaggaaaaaaaggtggtggagaaaaatatgttgcaaaaggagaaagaaataaaagtcattaaaaataggagagattaaaggaaagtaaatctgagacaaaatcggctcttctggcgtagtgctaaaaaaagttctgagattttaggaattttcaaactccatgtttttagctttctaaagatctctatcatttttttttaatgatttaaattttaaaccacctggagagagatatcatgaatccacatttatttccgtgattttttctttgaaaagttgtgcttaaaacaaaaatgttgtgtgcttttcttcaattctattggaggaaataaaaatataatttagatattttaattttgcttttatttcaagaaagaacttagaaattacttgataaccccaatttttttgttttgctgtaacaatatatttattacattattggtaaggcatatatgatttgtcattgttgtactcatcacttgtaatagtataattaagaaaaatattcttaccaaaggaaaatagatttcatatttatttatttattgttaataataaaagattactatctttcggtcttcttagttttactaatccacttgttgtccacggttgtgatttgtgaattggctggatggggtaaaattattttggttccctttatttggaataatatctaatttaaaaaacaaaaaaaagaaacacaaaaatttggtcaaacgtaagaacttaagaaaagtaattatgtaatttctatgtttaaaaggttgaaggaaaaatgcagcgaacagatagatgttgaatttgtacaaatagaaaagaaaaactaaatatgggaagtagacaaactagaaaagttttcatgtggattacaaacgaggaataaaagatagaaacaaatcttccaacttgttaattagtacttatatatgtcatacaatattgaccaactttttgtttgtcttaagcaattaattatttcatcaaaattacgaaagaatatatatctacggggaagctaaaagattacacatcaatttagtcagtatttagtcttgggcgtatctactaagtaagatgaagaatataagacaaagatctttttaaattggagaaaatatataagaaaatatagcgcatttactcttagatatgggataatcagacaaaaatcacatctttaagttaatggactgtttccagcttttgtaaactcgaaatatatctttctttctataccttattttctgtaaatctatttgagctcgcataaaatcttcgtttcaattataattttaatgattcaaactaatttttttataccagttatagagtatataaattaatgtgttaaggatgttattgtaattacctttgccctcatctatcttgtgtatacattgctcatctaataaatcaattcactctacaacaaaaatttaaaataataattaaattttagaatgaattgctttattagatgagtaatgtacaagagagattagaaaaggctaaatacaaaattacgattaacacattaactatttatcctctatatcacgtaaaaaaccttctttttaatgaatgttcaatctattcacaaaaaaccggtattacatcaaatgcaactgatttttgagttgtttttaacatacgctactagatagagtttagaaattatctcctagtagaaagccaaaatatgaacaattatcgatgttttccccaaggcttgaagttgtttgaggttcttcaccatgtcttatattatttctctttctcaatatggtgtggactgtattttggaacatatactgcaatagtaattagtagagctttcatttcgattgttgcatccgttaggagtagagtgatttgatcccaaactgaggtgttacttttcttgacgtagcccttttactagctagcttctcacatacttgtcttgtgaacgagcattgaaagaagaggtggtgcttattgtcttgtctcaaccggttcctggaaaaatgtacaagtgtagtcattaaagtattacacttctccattcgttcacatgtagtcaatctgtcatccattgcaagccatgttatgaaagcgtagttaggtgcagtgcagaagatactaaaaagtaaaaacttcacatcaatgcttgtaatagatactaaaacttcacattttagtatatatatatatatatattgattcgatttatataaagtggtttatgtttcctgaacttaagaaaatccgaaactcgaaattgttaaaacaaaaaaaaaatccaaagttattggttaatacaatttaggcaaatatggaaaaaaatatcggtacaactgtaaaattagtcttatttaagaataatcattcaacattttattctaaaaagatatttgatatagcgttcattctaccgacaaaattactgtctgatgatacccggcataaaaaaataaattatagaaattaatgttacacttagaatataggaatatagaatatttcttattcacgatgatgtcaaaatatgtacatacataatttggataatattcctcttctacctatataaacattagggttttgagcaaaaaaaaccctcaaagtcgcccaattttgctactttaccctctacataaaaaaaaatgcaaaataattatatgaagtcaagaataatacgcagtatatccatttttataactttacatatattttaaacgttttcacgatcacatacattttattttaaaaattttaaagatatagttgaattcatcatctcgaaaggttcaatttgatatattatttatcaaattttaaaacttgacaataacggaaaagagctatattacttattgtcttagtatgattattttgcattttttatacgttaaaggtaaaattgcaaaaatatacgattttaaggtttgttttgcattaaaccttaaatattacctcattgattgcggctaaaggtaaaatgtttagaagaagaactatgatgtaaagtttcgaccaaatatctgagaggcatatgagcttggaccagcaatatatatatccgtattgttgtgtctttatatgcatcatctgcaaaattattaatccatattaataggtgattctttctaatacaatatcacctcatcatcatcatcatcatcatcattggtttaagtataactgatattgatagttatactgtataatttcatatgtagtgtatatatgaacaatattacaaacatatacaactcatgtaactagacaatgcgacaagcattagggttttcatcactgaacaattgtggagcgtatacgtagtggacaaagtaaggtatgtttccatctttatctttttggccctcaacttttactatctctttatactccacaacttgagtaatcgttttggttgttacttctacttttacttcttctttctttttttctccttccttcttcttattctcctcttctttcttcttctcttcctctttcttcttctcatcttccttcttcttcttatcctcttcttccttcttcttcttatcctcttcttccttcttcttctcttcttcggtctttgagcttatgatctctgcatgtttgtgaactttcttctttatataggctaagagttttgcggattctatcgtcccttgtaccgttagagtttgcgcctttgtatcggttttgacaatgtggatagctgccaaaataaccaagttagaatccaagccctgaactaatgagtcaaaataagattctgaaatttattgcgaattccccacttaattattttgaatatttctaacgactcaatcttacctttatgtttcaagagtttgtgctgaagatctttgtcacactgtgcgcaatgaatgtgtacctttagtactgtcgtacgaataacgtcctgtggatgattaaaagtaaactcacaaatgctttcacacacgtataggtacatatatatatggtatgcgattatggaagcaaaattttacctttttaatctcggtggtcttcttttctaccacagaagtagttgttgttgtagtggtggttttcttaacctcagaaggtttgggagagatgagctcaacttttttcttgctccatttctcgatttgtttgtgaatcttcacgacttctattttcccttttactttgatctcgttcttctccaaatcaaagtccacattttgaacccctacaatattgtattattctttaatcaaattaatgctactacatcactatatattaattctccacataatagttaaacaccgcgcttgtgaagaaatttattagaaaaaactctataggacatgcgggagaaaccaaatgtaaataactctcatgagatcaacagtagatcgacccatctctgaaactactttctatatgggaagacttgtaatatcttaaggccatcgtctagacaatgaagcctaaccttggaatcgaaggagaggctttttgatgtcgcatgcacatttccggcagtgaaggtgaaccttgtaaacggccgtgatgatttcatcgcctttctctttcttttcttcttcctctcccattttttttgttctacaactctaaattttagttttgactgatacgattattattatgttgtatagtttttctttggtctgtacaactgcacgtagaaaacgccaaggagaaaggaaattaggacttcaatataatcacgacaagaaacaatctgatatgatcatataaactaatgtaatgtaatttgaaaaatgacaaattgtttgacacgttaaataggtttggtttgagtttatagattcagttcatttacttggttactaaaaaaaaacattcatgggtgtgcggcgtgtgctgcacaaacggaaaaacttagaacagcaagatatatgttccaatgcatggcatggtatagggattcacgttctatatttaacgaagtacaaataaccacgtctataagctattttaaaccaccgatgcatatgtttatgagccacgaacaagaggactaagatatgtactttctcagaatttagatcactgtcatgcttaatatataacagaatacaagaaaaatctcaacggtcatggttttatatatgaaaaagtccatttgatcgtgccaacccttcaattacttggttgaattttgtaaaaggtggtttaccagttccaatgctatatattcgtattttagtttaaataagctagctaacaaattatatatgtgaaaatgattacctaagacacataactcatatatgatatttaaactgaactagagccacaagctccaaaaagaaaaaaaagaaaatccaactaattgaagtttgatcattgatgatccaaattccaaaccatttgaaaatggtcaattatttgtttcgtatgcaaaccttcaattttgaaagtatttatgataattaacaaatgaaagaaaacacaaaatcgtttacatcaaatttattacaatcgcaaagatttggatttgtagcttttaaagattgaaatccaagcgattttttttgtccacatgtttttacaaatcgcatacaataaattacatcgatgagtacacaaaacggtaaaattcttttcgcaaatttaaaataaaataaaaataaaatataagatacaaaaaacagtatcaacatctaaaaaatacggattttgtgattcaattacaaaaacgataaaaaatagtatataccaatacccacagctgcaataatacgtgtttactaaaaaaaataaaaaaaataaaaaaaaaataaaaaataaagccaataataaagcttttcacatgagcgaaagaaaagccaaaaaaaaaaaagtcacaaaaaaggagaaacacgtggacactcacacgaggaggtgtctgattttgtctaattaaatttgagttttttttttcttctttgaaatcatatgattgatctacacagaatccatttccgcaaatcggattcatgtttttgctttatcgtaggcttccttcatttgcacgaacaacaacaacaacccttctctgcaaatctatggagcctgcgataacagcgacttcttcttcttctttcggtggtggctcttctcgtctcgccgctttagcccagcaacttcgccaatacaagcccccaccttcttcatcgttcgatgactccgaggagatgcagacagatcaggagaccgctgggaaagtcgtttctcaggttgggtttcaggaatctattgctcctctttcgaaagaccctgataggtttaaacccaagagagccgctgtgttgatctgtctctttgaaggagatgatggtgatttgcgtgttattcttactaagagatcttccaaattgtctactcactctggttcgtatggtttgcgatttaaagttttcgtctttttactttgaaatcattggcttctttgattttggtcaatgagtatggtttagtgttgaatttgaggtggttgtttttttttgtggttgcaggagaagtttcattgccaggtggtaaagcggaggaggatgataaagatgatgggatgactgctaccagagaggctgaggaagagattggattggacccttctcttgttgatgttgttacttctcttgaaccatttctgtctaaggtattaataaatggtgttaattctccatgtcttattggtggtgatgcatgctcttagtgagatcagaatttgggattggcattaaagttgaggttatatagactatcttgttgatctgtgcttgaacatcgaggttatagtatgagttactagtggttctatagaactttggttattgaacttccatgtcagctgtattatatcatagtagcagagatctggtagctaaagtgacgttcttgatcgctatctagttttgattctggatgttcttaagtaggactaggtgttaattcggaagaataatgttatctggattatgtcaacatttctgatagatatttttcttacatgtgcgtcattgtcttacagcatcttcttagagtaattcctgtgataggcatcttgagggacaaaaataaattcaatccgataccaaatcctggggaagtggaagctgtgtttgatgcacccttggaaatgttccttaaggttgctcttgttttcttaccaagttactttagctgtagttgtgttttttcccttctcaagcatcattacttgaacctttttttttttgtttcaggatgagaatcgaagatctgaagagagagagtggatgggtgaaaagtatttgatccattactttgactacagaacaggagataaggattatatgatatggggtttaactgctgggattttgatcagagctgcatctgtgacttatgaaagaccacctgcttttatcgagcagtgcccgaagtttaagtaccctaaaatggtagaaaaacatacttgtatgccttaatgaacataatttttcgaatgatgctttcctagactagtcttcttccactatttgataacttgtaccagacaacaagacaataacattccatacaactgattctctgtaccagtgaatggctgaatgcagaacttggctacttgcttatatatatgcagacgcagtagctgaagctccaattcatttcctgctggggcatctcataacaggtttccatgactcttctgtttgtcattagataattggaggggcttctatttcattatgatctaggtcagtctgtattcttgaatttgatataattgtattgtaactttttctaggcttcatttctgagttgttcccacaggatgctcaatggtgattcagagaaaagttggcttgttatgattctaggcaaacatcaccctcaattgtgaatttggaggaatatttgtactcagtatttaccttcaaacgctcatttttcattgtatacttgttatcttctatttgtatactgaaccaatttcaaagcaaacttgtcttatgaggcttatgatttttattaatcgttgtagattcaagctgcagttacgttattatctctggactagattttttgtgtttcaatgataaattcagttaggttttcttattgctttgtagttaaccccaggaccaccatttcttcgtattgagacatttgttttcctgttattgcatggctttggttttatctagttctgctttggcagttttttatttgtgaatggcttcagttctgcattggcagttttttatttgtgaatggcttcagttctgcatgtatgaatttctggtgaatctatccaaacaagtgccactttagacttgttctagaggcaggaatttgcactggctacccattctaatggcaggaacttgatccttttcctaatgttgctacttattcatggagaatcccgcagtgtacaacaattgtaagtgtcctctatttgatagcttgtggatattgtttccttatttaagaaagctaactgaattgtggatcctttcaattgagttattttggtccttaagtcttaacagaatgtttcaagatttgaagttgatgtgcaagccttttccagttttccttttgatgtgtatacttttgcgttgcgtcaagcacttaataatggtacgttttatttttctttgcatatgcacttattaacgaaactttaaggcggttgtcattttttattttctcttgctgaaatggaagggggacttgtggtccatagttgttgaagaagatatgtgaataatctataactaaatcaatattagttacctgagcaattttcagatgtttgacaaaaagtcaaaggggcattgcgagaatcgaactcgggacctctcgcacccaaagcgagaatcataccactagaccaaatgccctgttattgatttagcaagcaatgtgttgttgagaattc

SEQ ID NO: 18 - DNA, 127462 bp, Arabidopsis thaliana
gaattcaattttctaattccacaacgaaaactcatcacatcaaaaaaaatttcattccaattttatcaccatgtatatacgaaatcaaacatatatgctggttttggaaagttagtacgaaaaaggtatcatctaacgtaagtgaattatgctggttgtattaatcttttatcaaatttattatttacgttttttttcatgttactttttggagccataaatatatgtggatttcaaagtggaaaatgcgttgttactcgaatgtttcaaaggtaaattatgcttttaacaaaatagattttttttttaaaaggggaaacaaaatgaatctttccagtgactttgagcaaagacaggtttttttcttcttctaattgccctacaaaatctgttcaaagactactaatcactcactccactcatataaatatgatattagcaaaaacgagttaatttaaatagtatacatgcataattgacaaaaaccattaacattgctgaattcttcttcttcttaaattttgttctatcgtctttatatattctttgcccatatgtaaatataataaacaagtagtcgttggttaaactccgttaaatattcagatattgtctaatattttttggaactattaagtcttaatgaaaacagtgtataatatttcgacaaacaataaaatccattaaaaaaaaaactctataaatgattgtttacattttttttgtatatataaatgctgtagaagagtccatgtatttaggattacatgtctataaaatcggatttctattatttttaccgctgcacgacaaaagtaaaattaagtgcataaataaaaattaagtgaaaagtccaactctccaaatccgtctctaaataaaaatcttgagaaaggtccatgcatcatgttaaagaataaaacatgtctaaattataaatgaaatctagttttatccggtttggtttgattgaattgatgtgtttattattctctctatctcatatcaattgatgtttaaggttgttacacataaactatttttttttgtttttaaaattaaaacatcatttataatttattttaaaacattttaactagtagaaaaacaatctaccaaatgcaaatgatcaattttttggaaatgcaaatgatcaattttttggaaatgcaaatgatcaatctaccaaatgcaaatgatcaatgtaagttccttcttcttcttttcatctaatatcatcaaatacttaaaaacctattaaaactcaagtaatataaaaatatacaattaaacacatctccctgaagtccaattagtgtcagtaaaaaactttcaaagttagttgttttgcttatagacccattaaacaactttctgtttctatttgggggtataaaacaagtttaagtgtaagccctagtaaaaaggaagatccaccaaaaatggaggaaccaaagaacaagcccttgcctttggggttgaatattatcttacttcccaaaatctgaaatttatttggtcacatttcttgatcttttgatgagataactacatctactacaaagaagtttccttttgtgtgtttctcaaagttagacataagaaaacgtgtagatcaagcaagtgactatgagtcacaaagtctccaaaaagttagacgaggagcaaatcaatgagctccgggagattttccggtcatttgatcggaacaaagacggaagcttaactcagctcgagctcggatcacttctccgagcactaggggttaaaccaagtccagaccaattcgaaacgctaatagacaaagccgacactaaaagcaacggactcgtagagttcccggagttcgtagctttggtctctccggagcttctttcgccggcgaagaggacaactccttacacggaggagcagcttctccgattgtttaggatattcgacacggatggcaacgggtttatcactgcggcggaattggctcactctatggctaagcttggccacgccttgacggtggcggaattgacggggatgataaaggaggcggatagcgatggcgatggccggattaacttccaggagttcgcaaaggctattaactctgctgcatttgatgatatatggggttgagtctttttcactggactcttccttaattttcccttaacttttttttagttactatgtttagttttcactattctacaagaaattatgtactcaaattcaaaataattacttctcaagtcgaaattcgggttctttttgttcattttagattcttgataacagttttggttattgatctcttacttgtggcgatttcatatgttatactagtaatgataatgatgtatagtaatgatctctcaaagtatatgaaactttattcaagcgttagaaagaaaaagacattgtcatgtttactacatagttgcttcaggatctatcaacaatcacattaatttctgcaattaaaagttaaaaaaagaaaagagagaggctcaattatgtcagagaaagatgggacttagctgcatcatctttcatctttgtgccatccactgcaaaatgtctttcctgactacaccattgaacccgccacctgtaacatagctcggttgaatcagacttgctgctagaccgccactgtagtaatgtctgtactgagtcgtagttccattgggtctcggcggttggatcatcatagagacagacgggaatggcttgtgccggaagtgtttcaacgaggtaaacaaatgcctatcggattcacggttttgtggagtctgcgtcgtgttcgtgtgcgatttgggacgggacaattccgttagtctctttgccttgtccatgttggaattgctgttgtgtggtagttctggccgagtacggatctgagctgctggtttcatcttatcgagccaacgaagaatccaatttccgagattcctaccaacttctatgtctctttcttgtatgttcttgtgaaccgaaatcgccacatcgaagattttacgagtcctcctgaaaacaaatcaaaaagaatgcacaagagaaagagaagcatagtcaatgcataaccctaaatgaatgaatctaagcttctgtcaaatctcacaaaacacaatcatgatactaattttctaatcacaacgattcgaaatcatcaaacacaacactagaatcaacataagcttttgttcttgattctaattcctaaaaatcaatcacatcaaaactgctacaatttctaaagatgaatcgatttcaagtctcattgattggtttgagtaaacgattcgaaaacctaaaccgaatcagcaatttcaacaacagagcgacgcaatttcacattctggaaaaaccaaatttctcaaatgcgatttcgtatccaacgacatatttatcagaatcgaaacgatctcgattagaaatctaaccgatgaagaaattgacggattttgggatgtttcggagtaacaagccgacgctggatcttcagagcgagcctataagtccgtctcagtcccaagaagtaagctgttcctagagttatctcccaaaacaccatcttctttcttcttcttcttcttcttcttcggctacacgattatcgcatgatcgccattttcgtcagtcactgaccttttggctggttaacggtgatgcgatcctcaccgtctatttccttgttcgaagaagtcattgtgggccgtctgttggcccactttaacggagtagatatatgggccgtctgttttttcataattttgtaaagtttcccaaacaatatctttgttttgatgatacaactttattttgtgaagaaaaatgtagaaaatcataaactaataacataataattaaatttattaataatcacagattttttctataaattaactcaaatttaaatttacataataaattaacataataattaaatttatttaaatgtttctaatattctaataacaaagcttatgaaagtctcattaaaaagatagtccagagttaaaatttacatggattgttggaactaataaggagataactacggaaactaatgaaacataacctaaataaaagatcaacacttataatctaggagaataatttttcaaaacataagattaattaactaaatcaaaccgttcgtttgattttttttttcacttgaaaaaagcagaggccaacgagtgttataattttttttataaattactagtgattgttacttcgttttcacaaatcattctcttaacatgacagacaaatctagccttggatactatttatgttggccttgtacttgtctgataaatttctgtgtatcactgttatttctcatctgctttgcgtcattcattgcttggatcatggttagatccaacgatgtgaaattccaagtctacgacgctgagctgacacatttcgatctcgaaagcaacaataacctccagtacagtctctctttgaatctctccatccgaaactcgaagagtagtatcggaatccattacgataggtttgaagcaaccgtttactacatgaatcagcggttaggagctgttcccatgccgttgttctaccttggaagcaagaacacgatgcttctcagagcattgtttgaaggccaaactctagttttactaaagggtaatgaacgcaaaaagtttgaagatgatcagaagactggtgtttatagaattgacgtgaagctgagtattaattttagggttatggttttgcatttagtcacgtggccgatgaaaccagttgttcgttgtcatcttaagataccattagcattaggttcctctaactcaaccggagggtttgatttccagtcaaccagatgccacgttggcttctgaagttttaaatatttttaagtatttaatctacttttgagtaaatttgagtaaaagatattcaaaatatttagatattttgtgtattttcgagtagtttggataaatttggttataaaaattgattttggggaatttcgggtaattcgaatccgaaatatccgacccgaatccgatttgaacccaaaattttgcaatacccaactatggcgacataaattttgcaatacccaactatggcgacagaaagatttttgccttttcttcaaaatgcctaaagtaagtgctattctatgttggtgtaattatctattgattgatcaggcacaagaaaatgttacttattggtcaactggtaaaagatacttctgcaaatcttagggaagctagtgaaaccgatcatcgtcgagatgttgctgtaagtgtgtgtttctcaataggaataacttagaaagatgtgagatttgttttcatgaaaacatcacattctgtgaaatttatttactattgatggttctcttttatgaattggtatttgctgatgcagcaaagtaagaagattgcagatgctaaacttgcaaaggattttgaagcagcgttgaaagagtttcagaaagcacagcatattacagttgaaagagaaacttcttatattccttttgatccaaaaggtagcttttcttcaaggtatgaaaaacctagttacggttacttcatcagtagagataaccactatgttctttgttacatgattgctatacttgtgtggttggaaacaaactggttcaagcacataagttgttgactttgagtccaattaaactatagttttatcttgacttgattttactttgatgcctcttttttcttatataccagtgaggtagacattggctatgatagatcacaagagcagcgtgtcctcatggaatctagaaggtaagtaagttctatatatgccgcatatctcggtaaataactaccaccttcatactggtgaactctctctttcttcatttgtaggcaagaaattgtgttgcttgacaacgaaatttccttaaacgaagcacggatagaggcaagggaacaggggatacaggaagttaagcatcaaatcagtgaagtaatggagatgttcaaagatctggcggtgatggtagaccatcaaggaacgatcggtaaatctctgaaacgaaaaaagcaacagtcaagacctagaataaaaaaaacagtcaagacctagaatgctttgagtccaattctcaatcctctttactttttatttttttattttttatttttttatttttttattattattattcttttaatactagtaggttcatgaccgaattctataatccctcttaggcccgaaagtacagcatgtaatattagtttcgtcctaacgtcgaaccgacgacctctaagcttcacctaatatctttatcaattgagctaacgacacttgagttaaattttattttattgcagatgatatagatgagaagatcgacaatttacgttcagcagcagctcagggaaagtcccatctcgtgaaagcatccaatacacaaggatcaaactcatccctggtaagaaaataaaaagaataatctgttatttggttagttgttttcatgttccttacttctctttttctttctttctggtgatttatgcagatgtgtttgtgttggaagtgagaatcctagattaaatcctacaagaagaaaagcttggtgtgaagaagaagatgaagaacaaaggaagaagcaacagaagaagaagacgatgtcggagaagagacgtcgtgaagagaagaaagtcaacaaaccaaatgggtttgtgttttgtgtgttgggccataagtgatgagataaggcccatacgaataagtgttttgttgttgtctagttaaggtccaacaagatgagtgttgtgttgttagtctaagatagagtcatgttgtgtaagagtgaattaaggagttgagagttccaacatagtagagtggctgatgtaagtcttaggacaatgatgtggtctagactctaagtgtgtagtgtagcaagtggagcaaaaccactatatgtatgagtgtctttatgttgtgtaagaacatccaagtaattaacaatgtagtctttggaggaaaacgcttttgtgtctctctagaacaaagaacaaaatctgtgtgagagacaagagagcaagagatctaactaaagtggttagatatgtgagaattacaacagtttgctaatggtgatatttgggattattctcctcgtcattctcgtagtaatcgcagagattgtgatggcaagaaacacaagacattgaagagaagttcggtttttggacatagaagtctgagtgtgcgaagccatacttgttgtgtctgtatattcacttctatcataatcggccttccgtcgccgactctttgttggtacggtttggtttggttttgaccaaaattgtattcgtttacgttaggtccagagaaaaataaccaaagactagtgacaagaattctcaaaaattgacaaggcactttttaagatttaaggttttggatttattgaaggttcaaagtttcgctttagttttgttgtctttcggaaaaatgatattttaatggtatttttggaaatagtgatggtatttttgagaaaagagcttgtttttgtggtattattgagaatctcattatattaaaatatatacatcatctaacatagtagtatattctttatatatttttgtggtattaatgttttaaaaagtatgtttatgatttaaattataaagtcaacaaaaatcatgtaaaatgtaaaagttccattttaattatatttgaaatattaatgtccctataaatttatagacatattctttatatattttcttgttgttttctataaataaggattcctatcctaatattcatacaatagatatccataaataagactttatctattttaattgatgtactaccaaaataagcaaaaggtaataatctcatttatttattactatatataagatatctttacatatacatatgtatgtgtaagatctagatagtgagagatcagaacaagagagagattaaaaaaaaaaatggagaagcaaatattttgtcaattcttagtcgtaatgatgttattgtcatcatctcaaattcagggagatttgaggaaaggatgttatgatttagggatcacagttttgatgggttgtccagattctattgacaagaagcttccagctcctccgacaccatccgaaggttgttgcactcttgtccgaaccatcggaatgaaatgtgtatgtgaaatcgtcaacaagaaaatcgaagacaccattgatatgcaaaagctcgtcaatgtcgccgcagcttgtggtcgtccccttgctcctggttcacaatgcggaagtgagtcttgtttattttattttttcatttatccattaattaggaatctaagacattttaaccatgcaaaagatactttttaaccctttagaagtatatttataagtatgtaattcaatcaatagttcatcatagtttctttttgtttagggttactaaatagttacataatataaacattcctacgaacgttcaagtttaattttttattcgttcatagagatgtttatgctctacttgtgattcttctatttccaggttaccgagttcctggtgcatgatgggatcaatgcgaatatgcaataacttagatgtcaatttctttgttcacaaaataagagcatatagatgcaagagtaatatgataaccgtcctattttctacatgattgttggcgttgcttagtcaattagtcattttttttttgaccggcaaatcaattatattaatatcatattcaaagttacaatatcatagtcaattagtcattaattgttaaaatatgttgccaaaaacatatgttcgcaaatcaaaagaaattttattattttttttaaaaaccatacgttacaaacttacaattggcgatgcagtaacggttataaaatctgaaataaattggcaatatcccacaagttgcatttaatttttagttctacttactagaccttcgtaaaccgagttatggagtaggaatggataggaattatctcgtgatcctccctatacggttcgtttgagacaccgttacttttggttaaaaagactttgattgtaaaagatgtgaccgttactttaaatattaataacagtctgatatgctgtagaactctcacaatgttactaaaactttgatatgctatagaactctgactgttttttaatgttagaatatttattttttacgaataatgagtatgatcaaattcaaaatcaacttgtagtataatgacgaaaaatcactgaaaatactaaactgcatctttgattaaacttgagtttattaataattattcaaataatacgaaaacatataataaattgttcataaagaactgaatatataaaattatcttaaaatgaatatatatatatatatagatagatatatacatatagttttccctccatctaggctatccatataaacatccacattagcgtccacctaagcgtccatttatgtattaaaatatatttaaagaacaaaaaagtaaccttcaaaagaaaattaaattaaatttatatacaactatgaaatctctcccaccatattatatagagcaatgtttatggctaatatttttttatgtctaagtttgttacaaatacaatataaattaggtagtaatagcaacacattcatataatacaaatattatatatataaaagttggtcatctctcttcatatgaatgacacattatcacacaagaaaataacatgtgtcattttatattaattaaataaaaaaattaacaaaactatttgaagaaaaatcaaaagtcttttgttgtgttaaatcctctattaatctcattcttatataatttttctaaaaatatttaataaataaaaaaacataataatatatcaagtacaactttcattctactcaatttgttttattaaattttgtttatcaatagtcattacaccagaatgactaataatttacttatgttgtagatttacttttgttgttgtttataatgtttgctacctaacctcataataatttcgtaattttacttgaatattttttaattattacgttttgtaaatttgatttatcatatgaccttctttctttttatttttgtgcgttttaataatttggtaacattgacatataatttgtttaacgtaatggtctttcgagaagttaaaaataccaaaaaacaaacaaacacgagactctatatggctatatgtaagggatgagatctaaagtgttgacttaaattactagtatattaggatagtgtacaagatgacgaaaaaatatatgaaataaagaattgtttgttacaattaagttagacaagtttgaaataacataagtaacataactacatacattgtatcaatatatcatatattgttatcgtatgtgtttatgataatgaaaacttaagataatagcctaataggtatataaatattcatattatagtaaaagtgtaaaactgatatttcgagttataaaaaaatttcatcataaacaattataattatataaaatagatatgaatttattaattacacaataacacaaacataaaataaacatcaaaatcaacaaaaaaaactatagtcataatttttccgacaattttaaaaacaaaaactcatgcgtagcatgggtgttgatatagtaaagttaaaaattaattacagatcaaggctaggatgcaacacttcacctctttgctatatatcgatttgatactctcacttatatcttgctttggttagttttccaaacaatcatctattgaaaaatacaaaataatagaagacataacgctatataacatctaactagttatctcatacgtaatattgaaaaattgatactggtttttattatttttgtataaaaacatattattcttatccatcaatttagcatttcatataattattgaatttaaaaaataattaaaaatcattcatatatactcatgtttattagaaacataatagaaaaagtaagaatttaaaatcttattatataaagtacggttttgaaagttactaactcacgagatcatgacacgtgtcaggtctatcattgagatgttgacatatgtcaaaaaaaattctttaaaaagaaaaaataaacatatttacatatattaatttatatttctatatctaaaaaatttaacttataattttcttcattaaaaaagaaaactaacaataagatggagtatatagaattaaattgtatttatattgcaaaattggattgtatttgaattgtatacaatcaaattaaattgtattatattatgataaatagatatttaaattgtattgtaatatcgaatttgtaagattgaaatttagtttaaggaaatactaaattaaatactgaaaaaatatgagttactatttaaaattcaaatatcatcaataagttggagtgtatagatttaaaaggcagtttattatgatgaaagagatacttaaaatgtatagtaaaattgaatatgtatgattaaaattttatttaattcaaaaattactaaattaaatattagaaaaatgtgtaaatcactatttaccattcaaattttaaatattatcgataaatatttgaataaatttatattttatacctacctatttaggcggaccttatctagtattgtatacaaatagagaacaagtagaagtgaaagagagataaggttttcgtagaagaaacctttagaagcgtttctcaacaagtagtgacagttgtcataacactattgattcagttaccaataacaattaatattttttataattaaaatattacttttttttttttgaaaacttcccttgtttttgtcaatggactattaaaacactgggaaatttgcaaacaaaaaaactataatcattaacttactattctgacttgaaatataatattctttgtattatatgtaatattaccaaatttgtccttattgtctcaataccaccacctgccacactaccgccggccaccatcgactctggtcatcaccgccaccggccaccaccaacaccggccaccaacaccggccaccaccaccaccaactccactcaccaccaacatcggtaatcaccaacaccggccaccaccaccaattccggccaccaccgactccggccaccaccaccaccaccggccaccaccgactccgaccattatcaactccggccactaccaccgccggacaccaccaacaccgaccatcactaccgtcggccgtcaccgattccgaccaccaccgactccggccaccaccactgccggtcaccaccatctccagcctcttccactctatcaaatagatcaatttagtcaatttactaccctctattattagtttctacattttaaaaatgatagtgttagtttcttaattagtttatcaaaaacaattcaccaaacattattgtcacattttgtttttcgaaaagtagccaaacaaaagtttattgtgagcatgagatgtttatatggtgtgtttcaattttataatattgtagccaaacaaaaaaccatcttattatcttacccataaaaccccggaaattaatggaggtctacacacctaaatttcgaaaaataaatttgcatttttaaggcgcatatgagatgtttatggcaaaagttcaatttcagaagataatagccagacgagaaaccgtgttagagaatttcctctttatttaaccaatgagaaccccgaacaattaatactggtctacaaaaggctcctagtttttttattaactcgtacttttaaatgcttagacgagatatttatggcaactcaaatctcatcgtatcattttgtaaagagtaactatgctatgtaaagttacccctaaaaagctaggtccagcgtccacagaagttctctgaattttatttaatgatttgatttcttttgatttgtaaaattatttgaaaatgtgatgttatcgttcttaattgtatttaatattacatgtggtgaacctataagtaatatataaacgagagtacgaggaaacatttcccttgcaatttgttttgaaaagtttcttacaaaatggcattttggttaagtttgatatttttctgcttttgcacatttgcatcctcaactccaccggatgatccggtcaagtgtgagtcaggaaacaacatgtgcactgtgacgaactcgtacggagccttccccgaccgttctatatgtgaagcggcaaaggtggagtaccccaagaccgaggctgagttagtctctatagtggctgcagccactagagccggccaaaaagtgcgggttgtgactcggtacgttcacagcatcccaaagctcgtttgtactgatggaaaggacggtgttctcataagcaccaagtttttaaacaacgtggtgggaaccaatcccgaagccaagactttgacagttgagagcggtgtgacgttaaggcagcttatcggagaagcggctgaattggagctggctttgccacacgcaccatattggtggggactcacggttggaggattgatggggacaggtgctcatggaagttcgttgtggggtaaaggaagtgcggttcatgattatgtgagtgagataagaatggtgagtcccggtttggcttctgatgggtatgttaaggttcgggttcttagcgagacaatagatcctgatgaatttcgtgcagccaaagtttctctaggcgttctaggtgttatctctcaagtaactttccagttgcaaccaatgttcaagagatcgttaacctttgttatgcaaaacgattcggatttcggagatcaagccgtgactttcggggaaaaacatgagtttgcagatttcttatggttaccaagccaaggcaaagtggtgtatcgaatggacgaccgagttccggtcaacacttcaggcaatggcttgttcgactttttcccattccgtccacaactctctgtagcgttagccatcattagatccttaggtaaatttattctttgtttctcaagataactaatacaaaatatatttgatcatttgcatagtttttttggtaaaaaatatttgatttgcatagttataatgtttcttataaacaactgcttcatgatatgaagaggagagtgaagagtcatccggagatgcaaacgacaagtgtgcgagagcagagcaaataacgtcgtttttgttttccatctcctacggtgtgactaacaatggtaaaaatattcgttcacttacttatgcatctttctattgtttccatatgtatgagactttacaactttctatcacatattcatttgtaatttccacgggcaggtatggaattcacaggctatccggtgatcggaaagcaaaaccatatgatgtcgtcgggtacatgtctagacagccatcaggacggactgatcacgtcttgtccttgggatccacggataaaaggccaattctttcaccaaacagcattcagtatccctctcacacgtgtcaaaggtttcatcaacgacatcaaagcactcgtaaagattgaaccgaaatctctctgcgcccttgaacgcagcaatggtatcctcatccgttatgtgacatcctctcctgcttttcttgggaaagaagaaaaagctttagattttgacctaacttactaccgaagcaaagatgatcccttagcaccacgtctctacgaggatttcatcgaagagatcgaacaaatggcgatatttaaatacaatgcattgccacattgggggaagaataggaacctagcgtttgatggcgtgattagaaagtacaagaacgcaaacacgtttttgaaagtaaaagagagatttgatcctttagggttgttttcgacggaatggaccaaccaaattctaggtttaaaaggaaacgtgacgattgtgaaagaaggatgtgccttggaaggactttgtgtttgttcggatgatgctcattgtgctcccaagaaaggttatttgtgtcgaccaggtaaagtttatacaaaggctagagtttgtactcatgtaaaatcagtaaatggctatgacgatcataccaaatttaatttgatgtttaatcgtatatgagaaaagtgaaaacagaacattttacagaacaacgtcttttgttcattatgacaagcttaacaagttttatggtcggtcacacgggcctttgttgttgggctttagccggtttatttggttcaattcggtttacatggttagtcctcgaataaaataatttcggtttaagatttgttacggctcctccgtcaatgtatcgtcgttgatcccaaatttcttctgaacaatttcgattttgaattcgcgctgagtgatgaacggcgcttctccggctcattcattggtttcgacgaccgccgtagctggtggaggtggaagcagtggcgccgccgctggtctagacgatttccattttccaccggatattccctcaatgcaagagcgaaaagacgaagctatgcgtggtcagttcttactcttttcccttttcgtttcatgatttcgaatcttagggtttcaaattagaggttttctataagattcggtaatcaaatttctcagtgatcagagatttgagtatcacatctccaaatttagggtttttgatactatctgaaaatcccaattttgtttccctgagttttttttatttggttgattgatttgttgatttaacagtaacttctttagataattagtattgctaattaattactaataaatgattaaggacatgagtagattaagaaaaagcttgcttcagtttcaagtgtttgtttgagatatgttatgtaataggtttggtttttgttttgatggtgtagttttgaaagctgatttgatgactgaacttgacaaagaggttaagtctttggaagaagatagttggatgttcgaaggtcctcgttctcgaatccatcttatatccagaagaggttagttttcttcttcttcaatcctatttttctgtatgtcacaaagctgttttcatgtgtacgtttatatcaatcttgaataagttttaacagcagtaatgatcccaatggttcaaaatttcatgtatttgccattctctagattaggcaagtcggtatggtgagaacatttgatcgaatctgcgggtttgtgtgtgtgttttcggtgtttcgtcatcactaagacactctactgaagtatatttgtttctgattaggtaattttctaaagaaaggaggtgaagtgaagctatggtgaaattaagctttgttcagcttcctagatgatcggattcattcaagtaagaaatatcagaaatggtcgtatacgctttgtttcgtgttcttcacaaatgtcactaaaacgttaactttatattttcccattgtaagggacaaaatagtatttctatggtgttaatatacaagtgaggaaatcattattcggctaatgagtctattactcgaaaatgaaatttcaatattctcaagaatatagataatcaactttcatcaaagacaatttttaagtttgaataattaatttaaaatccagatatttttcttgattttttgtctaacttggtactttttattagttcctttaaaaaaattaggttattatcatcttcccaaaacaaagattctactatatgtacggaaaaagaagtaccaaaaggtcattattaaatcccaaaacttgtttacctatttttatcaggaatcaattgatcaccactacctaaaaaccacaaattgcttaagtttgttaacactgattgacaagtgtcatacaagtaatcccatttgccacgtgtcatgtcctttttatgtaacctaggacttgaaaaccacaagtgcaagcaaataacctagatgacacttgttagagaacgacgtcaccaagaacctctcacactctctattccaccacttatttaccacggcaccgccttctccgtggcatcttcttcatcgtcaagccctgaaacatcgccgattcaaaccttaaacgatctcgagaaactctccgttttaggacaaggaagcggtgggacagtctacaaaacccgtcaccggagaaccaaaacgctttacgccttaaaagtcctccggccaaatctcaacaccacggtcaccgtcgaagccgacatcctcaagcgaatcgaatcgagttttatcattaaatgctatgccgtttttgttagtttatacgatctctgtttcgtgatggagcttatggagaaaggatctctccatgacgcgttacttgctcaacaagttttctccgagccaatggtatcgagtctcgctaacagaatcctccaagggttacgttatctgcaaaaaatgggaatagttcatggagacataaagccttcaaatctccttattaataagaaaggagaggtcaagattgcggattttggagcaagtaggatagtagccggaggagactatggatcgaatgggacatgtgcttatatgagtcctgaacgtgtagatctagagaaatggggttttggaggagaagttggatttgcaggagatgtgtggtcattaggagttgtggttcttgagtgttacattggaagatatccattgaccaaagttggggataaaccggattgggcgacattattttgtgcaatttgctgcaatgagaaggtggatattccagtgagttgttcgttggagtttagagattttgttgggagatgtttggagaaggattggaggaagagagacactgtggaagagcttcttcgtcattcttttgtgaaaaacagatagcattagtctcggtttggttttcagggttgagaaaagcaagtcataaactaaggaaccgaactttagtttcagtttgatccggtttaatttgaatttttgggttcggttttcctttgaaattctttggttcggtttagtttgaactttttggtttgattcgagttcagttttgaaatttttattacttttgactaggcttaaaaatttaataacttttttaaaaatacttgatttattttttcttacaaattttctgtttacagtaaaacctatataaattaataatattgggacaaaaaaaatttattactttgaaaggtattaattaataaaattgtataaattttgttaattctaacaaaaaatttgatataaaaagtttttttttctttataatcaatagtatttctgaaacacaattacaagtagaaaacaattattaaatttaaaaaataaaaatagaaatttgatgttgtaaaatattagaattcaacactacaaaaaattaataaaaactgaagaaaaacataactagtcattttttacatatgatatttataatattatatatagatatatattggtaaatttatacaattattaatttatattattgatgagaccatttatttatataagattttcataaaaaaaatattattttactaatttatccgagttgtatcaatttttacattggtttcaaatcgggaccgaaataatttactaatttataaagattattaatttattgaatattaatttatagaggttttacggtatttgaaatagttcggtttagtttacactaaacatagactcggttcaatatgttttgtatgaaatttttggtattgtgaagttatgaattttagtttagtttggatttattcggcattcatgaaggattaataatgtcaaaaaaagagaacagatgaatagttatgttgacttaataagttcgcattgctcttcttcaagcaaaataagcgaaaagttcaaacaagagactgaaacatgacacagattctcatattgatagagaatttgtgtaaaattgagagttgtatgaagcagtaatgttaaaccactttgatacaagaaagaagaaataaaagatcagcgtatgaaaaatgaatatgctgctctcagggactgtgttacctcaaaagactttaaaaactcccaaaatcaaggattttgcctgagtgaaataaacataatataaataactaagcaattaaacttgaatagttagagtttgatagacaactactaaagttgatctttagttaccttgagagatctaaggtttcaggagagaggagacccatctgttgagtcagattatccatatgcttagttttgtcccatccattttgttcctgctctgtttcattgtccactggtgttgaatccatattatctggaaccgggcttgacatgagtaagcgttcgagtaaaccgtaatcaacagggtctatatcagaatccattggaaagtcgtcaatgtcgaaggacaaagaatcatcgatcaacagatctggatctagtaatggactagaacctcccaggtttggttccatgaaactctctggaggcttctctgaattattttccggtagcatatgagtgaagtcgggaagagttagatcatcaggtgaaggaatacagttctcggttgcttctgatgctgccgaaacattttcaggagttgtttcaattggtgatgatgactgtatctcagaagctgtaggcatttccttaagagttatacccgatacttggtttgatgaagtctccatctctgttccctcggtagtagacgtaccattacctagaaggaaaccatcatcgccggttttgtaaggttccatcttcataagctgtttaaacattgctttggcttgctcgtgcattggaggttgatacttcactatctgtccatcaggagtagcagaatcattattacggacaatgccgtctcgcttgaatctccgcttcttactggtatcactgatgcgcctattactctcgttttgctgattctgctgctgtaagaattgagatagaaaatgagggctttgtactgcctttgcaaggaatgacattaattgttgttgccgattctccatgccctggagacgctgaaccatcgtttgaagttggttatcagtggactgttgctgctgtcttaatctgacgagttcttgcataaggacgttcttatctcttttaagcctttcaacttcttcttcgagaccaaatttgccaacttcaacacatgcgctaacagatgagttctgtccattcgagtgctgagatcgctgatgtccctgtccctgtccatgggcaggttttcgcctagttattgattgtagcaagtgcttctgacctcttaaaaaaccttcattcgcaaattcccatctatctgggtcaaccttcctgaaaccctgtatcaagaaaagacacgcaaaatggaatgaaaatggattccaccaagaccaatgagaaagaattcatccgacagctttagaagtgcaaatctaaaaccttcaacacatagtcttttaactgccaactatccacagattgaaacagccatatacaggacgtaactgatcagttggcacatgcatcaagagcaattttaattcagaagtcaagtaaatgaccaatcatggtcaatttaatatatgaatcatgaaaactactttatttatgttcctattatgggtcttacctaccacccaaaccgaggaaaaaccaaaatatctaatagggataactgaaaactaagagggtgaaaagtatctatgatctaccagtgtaatctttatgtcaaagtctgcatggtataaactcataaagattgaattttgcttcaaatagtgcccaacatgtaagacatcatgtaccacacagacagtaactaaggaataactggcaaacaagaactgtcagcagaaaattcaagctcctttaagtgcattcaccatcttgcagcatcacgagcatcctgctctaaatattatgcagtacaagctccattcaccatgacctttagagcaaagcttatatagttatctacttatatacacaataaaatctccatccagcctatatgaataaaaagtatttaatctaagtgcaaccgtacagagcaaacctatggttcccgtaactgacatgccagataaagatttaaagtcacactaataacaatatagatattccaacactaaacacccatatatctacttaagatctagtttctattccaggcactcctgatcacattggccttttaaggttttcaaagacgtgagatatctccactaaaccttgactcatctacaacaaaatgatagattagtaaaacagaaagttgataaccttgcactcaggtcatgatcaacatgagacttgctctcttattccaaatttcttctttcttctcctttataatgaatgctgagaaaattcaggaaggtttattactatcttacgactattactaaacctgattacagagagtcaaacagacaacaaagacaaaaaaaaaagggtatacatctctattctcatccccctaagtttgtatgtacagtcagcttcatcaacgctctcacatatctatcatttcaaagccgtgaggttctaaactaaacaatcacaagatatcaagtattgcaaataaagtagtctctaaaaagcatactcatgaaactaactatcgattctaatggatacaaaactcctctgctcagaaacataaagcaaccatgggaacaacattaatggaacaaaatccataaaatcgagaaatgatgaagtaaaaaaaaaaggcgaagggaaagggaagaagattacataggtattaagctgtctaacgaagctggagaaattattatgcttaaagttcttaggaagaagatcgcgagcgaactccggtggtttccaaacgataaaactgttgttattagcactccaagagacaatcgaatctgtattgtgatcatcaaccatatcataggtcttgctcagaaacggaggaggcgcgtttgaacttagaatcgccgcaggctgaggttgaggagatggcttagtctccattgaatctcctccgccgtcgcttgtggttactttgctcacatccattcggatttttgattccaagtcaatatttgggaattttgagaaaattagggttttatatacgaaactggtgatttttacaataggtgagagagagagataacttttgattgaagatctagagaattctcagagaacattcacgagagatatgggcggagagagatatagatcagaagagagattttgaaatcgatggagaggacgaaagagagacgacgggagactcatgaacacttacgaaattacggaattagacatttcgctttttctcttaaaagcggatgatttattacgtgtcactatattattcgctattacgctctgttttttctttttgggctgactagcctgacacgagtatcgattttaattcgttaaaataataaattgaaattttattttgtcttacaatcttttcaaattccatcagagatttatgtattagtaactaacaaagttttttcaaatcttttaaaaataataataattaaatctacaaactattttgaataataataaaagtagatttttaaatcattagtttaataacactaaattttattaaaaaattttaacttcataattaaataatatatgatttgtaaattttacacaaatcacttaaaatactatattaaatacatcgtctaaaaaataaagtcatggttttatttcctctatgtggatctctactttcatatctgtattttatttcaattcatatttagattttgtactttatttatgagttctttagttatgaggttgagaagtttttgtttagttttaatgttttcctttattctaggttttttccatttgtatctatttttgtttacggaaaatatgtttgtttgtcggtttagcttatagaaatgtatttttttttgccggcatatgtattgtaataggaaaacggtctattttcccatgataactatgacatcatgccagatagagcccgaacaatgaccacaatccagatgtccacgaaaagatacttctcgatctatatctcccaaaatcgatagtttcatctatttccccatatatttgggtttaatcggtttgctgaccagaccctataaaatccactcaaaccgataccaaaccactttatatgtcaaaccttcttaaaaaaaaataaaaaaaataaaaaaaaacaaaattgttgtcggtcaaacggtctatttctccatgataactatgacatcatgccagatagagccctaagtatgaccacaatccagatgtccccgaaaagatacttctcgatttatatttcccaaaatcgatagttttcatctatttccccatatatttgggtttaatcggttttctgaccaaacccgataaaaatccattcaaactgataccaaatcactttatatgtcataccttcttaaaaaaaaaaaaaaaaaaaaaaaaaaaaaaacaaaattgctgtcggtcttgtcttctccattcttcccatagaattccagattatgtttatttgaaaaaatagtttatctctctctttgattgttacgatgggtgttagatttactttgaatccacatacaaatttgtcgtaactaatgaagagatattcaacaaagcattttaaacgcattctaattgctaataacgttaacatcgacattgacctgaaaactggaatcgttgctaagaatatggctaagaaagagaagatcaaggtgagcttccgcatgaattttacaattcacaaaagaacaacccaattaaacaaaatcaacatctcaattattaaataagttttatccaattctattactgttctttcaattgctcatcttaaaatcaatctgggaattataaacaccagaaaacaatcaacacaatccatcaagtcgacaatggctgattcagtgttatcaatcttctacaaaatgaatcaagtgatttcaatgggtggaataatgtgggaaggtctcaattcgagtttaatcaaaatcgatgaagctttgcttaagcagcagatccgagcggagatgaggaataaaaagagagaaaaaaaaaagatataggaagaagaagtaaaaaaaggttatatttatgattaaaaaaaaaagaagaggaagaaaagtaatactgcatatgtaattagtaatttactttgtaatttcctaaattagagctaaatagctttacccgaaaaggaaacaacaaaatacaggaagtgttccttttttgtgtgttaccgtaacattataaaataacctcccattattttctcacaattactctactacacatcgaagagtttacaattctcagatcgaataatcaaaatctctctttgaagatgtcgataatgataacacaccgttacatggtcagaaacgtttatgccgttccgtttcatacaaaatacggatttggtttccattacttctcttgtctctttggtttacatgatgtaaagttggttcctttcttcggcttgaaacgtttttattacccacaaaaagttctgtataactcgaaaccttcaaattctaaaccggttaatgagaagccgattcaagaaccgagtcaagaaggagaattgtttggtggttcggttacaatgggtgctgctccgtcaccgagacacttgccaattccaactttttgcatgtcttctaagctaataaagacttgaatgagacagaactgtggacttttgtagtagttgctaattgtaatagatcctggccacaattagataattgtttcgttttttatttatttttctgctagtgttttatgctattgttacctttcgagtcgtttgttatcatcacttacgaaaactttaaagagtcaaaataaaatctaaagtatacgatgtatattggtaaacatgacagtttatataatacaacactaccactgctttgaatctccatcactctctgtggttgctgacatctcaatcctatctggacaagacttgtggttcaagtagtggatgagataatcaaaaatcaagatacgaagagaatctaggaaacctaagaacatttaggttacctttctttccgaaaaatgaaccaaacccatcaatgtttttatacctcaagcaaatgagaagacacgataatgaccaagtataataaatattgaaacctgaatcgaagaatgtatcaaacttatcaatgtttctttggactttaaaacaaacgacaacaacctctatgttgatctttgcagacatgcctttacccatctgtgtgctgcttgcagccctttggtccataatgctgagcagatttcttcaccactttcttacaaagataacagaaatgtgcttgacatgcccaacaaaacaagtgattgttgtttcccgcctacacaataacaaactccagaatcatctcatgaacctcaaaaacctataattctctgcctttgttaaaaccaaatttttttattttcttacctttccattgaactggcggcaattaggacataactgaccgcgctgtggaaactgaccgccttgtgcaaacagttgcgcttgaatctgtccaatgacttgtctctcattcatcatctcattccattcttggatcgcctcttgtgggaacagttcacattttccctcactttttcccaaaaaaaagacggagcttacttagttccaagatttatatacatatgtatctgttcttttatatatgtaacatcactaacctgaaatgttcataaccagtgatagcttcgttgcaacggtaacaaaagtattgaccacagttattgcataccattttgttacaacctccggttcttgagatggctattttgcacgacggacattgtttagcgcttttcattatcaccttcacactcataatctcattgatcatttctttctctttccgcctttgttcctctccaagacgagaagaatcttgacgctcctgtatagagatttacatgtaagaaagagtcaacggtttaacaaagagaagatcaaaggcacaataatgatacctgcaagatttgaagcctaagttccgggctcatgcaagccacacccacatgtctcttttccttacaaagtgtacagaaactgaagtagcatttgaagcataaagcaagctgttcctcgtcctctatgcaaggggtttcacatctaggacagtaagcaacgtcagtcatggattccagtgttttctgtaacataagagtttcccaccgttcatacgcttcatcgcccaacaatctcttcaatatccctggcggaacagtttctccacatttcgagtccggacacttgagcttgttaactgtgccttcagtgacatgtatgtctgtataggtcttcatacatttcaaacaaaagaaatgctggcatggtaacttaacaaagtcgatacctgtagagggtgtaaaacaactgtaaaccaacccacattactaaagaaaacagctatgaagaagaacaagatatacctgcagattcagagaagcatatgcagcactcatgcaagctctgaaggaagctatcatgacgtttctcatcgtcataactcctaatataaggaatatctgaatccggagaacgacttccagacacagcacgcttatctctggaacatgtaacaccataaggaccaagaacaatctcattatcaaaaccaagatgagaaatcgacgagttctgtagccaatctgtccactggtacaagacttcttgccctggctgttcactccataacgagtccagcttagagcagagacttgaaatcttatcaggattcatccactgaacacttattaagaaataaggcggtaagtggctcggataagcttttggtaataaacatttcaacacaatcggtggaaggtgttgcgccttgaaagagtacaagaaatcctctgactctttgcttgaatcagcttgtaagttaagctttgtagagatagtatattcactagtagcttcaacgtttacatgaacctgcacaaatcaatactattagaatatattgttatgtcacattaccgatacgaaacatgtcagtactaagcagcttatttctgacctgaaagtatcgcatatcgttataccgatcaaagatgaacatgtttcctccatatatgtaccccaatgccaaaagctgttgaaacatcacaaaggtcaaaacttgatatgaataaatgtcctaaagctattgaaacatcacaaaggtcaaaactttatagctcagtttacctcatcttcctgtaattgatcattcatctttagttgctcctctgttagctctggctcactgacactagatcgcaaatctttcagaattgtcaacataatatcttccttcgtctcatattcatcaacaccatcagcaatttcttcactttcagctctctttaactccgattcctcacaattcgaatgatcactagaactgtgatgaaacttctcctccatattcaccgaatgcgaattctgtttcacctttaacctactcaattcatcagccaagcaatcaacaacatcggattcagcaaaattcacctccggtttctccacgggacgaggttttgaatttgatccacggctgcgtcgattccggtgagactttgaaggttttgtagaatgatcgaggttttggattggctgagaagtagacggaaaagctgctgcagatgataaatccgtcgaagtcgtgtcttctttctgatgctctgattttggatgatcgttgactggattcacaatcccagcgtcacggcggatgtagcggcggtcgtgatttcttccactgcctccgtgtgttcctctcatggcggtcttgcagccaagtttgggtccagagagacaaacaaactctgttaaatgttaatgcactttctctacttgacgaaaacaaaaaaaaatgtacttttttctacttatgttttttgggtttttatggattgtgtccgaaaaattccaagtttggtttatttaccggttcgatagaggaaaccgaatcttaaataccatgattgaaccggagaagacttggtcaaagagaaaagaataattacgtttcatgttcacatttgcataattatggttccatatttttagtatcattgatcgattgctggacaaaatattcgttcgatccactttgactcggtattcgatttgattcgatttgaaaaatccgaacatccgtaagattttggagcaaagcaaataagaaaatatggtattcataaaaatcgaagcaaataacaaatattgttttttaaaaaatcgaatatccgcttcgatccgtatttatatatatatatatatatatatatatatatatatatatatatattagaatatataattatgtctatatataaatatcataaatagtttgtgtattgttgttatcttctgtttttatgttaagatgtttgtttgatcatttttcttttatgttatgttttgattaatggcatcttaaactatcggtttttgtttttgttttaattaatttgataacattttgttgactggtgataacaacaacagttatgtttggtatttagaacttattttgaaaggatgttaaataaaaacattgaatatttgatatgcttgtatagtttacagattttttttattatttatatgtatcaaagcagatatccgcaaatatcacaaaaaaaatcggatattcgaatttccggatatccggaaattttcgaatcgaagcaaatcacaaaatcaagtattcggttaaaacgaatcaaaaaacaaatattataatttttccggatatccgcttcgtgtccaggcagtatgatcttttacacacacatgagtagtactatgttcataaatcgtaacaaaataatatggtttaaatatccatattgagctaataaaaacgaataacagttttaaataaatcgaaaacataaaataaaaatatcatggagatccacaacaacatatgttcatagatgtatacacagctttgtgactttgtcacataatctttaatgatatccaataggagccggagcttccttgagttcatgtcctttgaattgtatatcctgcacacataaaattccatattgtaacgaaatttacattttataccaatatcacattgttttatcattttgacaaataaactatacaactccttaccgaagcatagtggttaatatcacggtggtgagcttcgtcagctcgtataacataaaccacatccctaagcgttgcatctttaggcaaccgccagtaatcgattgcgatggctggagctggcgagttttcgaattttccggcatcaatgtctttgagaaattcagtgtaagaatttacagcctcttcttctaagtatccagtgatacgatgagcaagtttgggtgaaattacataagccaggaaatatgcgttgaagaaaacgccttggaccgtgaacacaatcgctcgttcgtaccttcaaacaccggttcaaatgataaatgaattacacaattccaaaagttttaggttagaactgtttctattagataaccgatctaggtcaaaccaaacttgattagaaatgtaatacaagttacgtgttatttagaaaaggtaataaactaaaaaggtacatgcatgcatatatacataccatttgggttgtgaaagttcgatgaaagtcatgagatgcatacgctcgttctcagcctcttcgagcaaagctttgatccatcccccgctatgttcgaacctccggagagatttcaagtgcaaaagcatccccccgaccattcccggcaccgcagccaccgtctctagcaacatcgcatggcacatgtgcttcctctatactcaaaaatcaaattattcaatttttgaaaaaacaaaatcatgttaaaaataaaagaacaaatgaagaagatttaaaatttctgattaaattacctgaaaaaatagttgaaccggtattttcagagtttgaacggtccaatatgcgaatttgtcagtgaaattggagggtttatgatgtttagttacatcaatggacacatccggtttgtatgaatcccatggctgaaaacaattccacttccaagctgaaccgtccggtttagtgatcttagtaggaggtataccccaataagtggatataactttaccatcggccgttcggataggattttctggctggttattcccacttaccggagatgacgtgtcagagctcaatagccgaacattgggcaagtggctaatgagatgtcccctgaatcctccaattcctaaaccggaggattgtaccgaagatgatagtaccggtcgaagagtgcggtaaatcgatctgtaggacatgagtaacaacagttggggtgtgatgtatcaacgagttttggtggtgagaatagaaatactaaaattatgagagatggtttaaggttatgattgatcttcagattgggttatgttcatatgtggcagataaattatgaagagatgaatttatatacacgagtgattattactaatctcggtcaagttcaaagtttcttggaggatgaataagaatggaggaaatgtttgacacgttttgttacattttatgtttgtggaaaagtaaaagaacatgtgaaattacttaaggattgtgtttgtcaccatcatattatattattatcttattgttcaataattcatatattcaaaaaagtactacagtttatcacgagatagacacaccaactatattattacacatcatgaaattacaaactcagatcatgttactatcataatatacaaagacgcttaaatttttcctatatttcgtatataccttgttatattttcttaaacaaatgttaatttagaatctatactatatttgataaatagaaaaattaagaagagtttataatatagaaaaaaatgtggttctctcgaatcagaatgaattgctacttttaccactcaaacacacacacacacacacaaaaaaaaaaaaaaaagaaagatagaaagaaagaatgaattgctactgtgttaaaaaatgataagttgttttaagtttgttttggttttgatccaaaaaagatgttgagatagaaaaggactattgtatatttttctgaaattatgttgtactagattttatcccgcggtataccgcggtgacaatttaactttttaaagttagtataattttttttttgcaaattgaatctatatataatatatttttattttatagtttacaattgttattaagtaacgtcctgccaaacccgtcccgccaaacccgtcccgtaaaaaaactatttatttatattaatgttgatcttatttatgatatgtttataaatcattgtctaaatatttttgtcgatgcgggacgttgaacccacacattttttgctaatttgttaatatatgtttatttttaaaattttgaattataaaatatgacggaaaaaattaagatttttttaaaattctatatattatataatgatgttaaaaaattgtaatatatcgaactttttataagtttaaatattaataatgttttataaattttaaatatataaataataatatttaaaaaaattaatatttttgcttataaggtaatgacataataactctaaaagcaaggatttagaagatttaaatctttaattaaatattttcattaataaataattaatgtcagtgacatgacatattaaataagttcaaatacaaaatttatttatttaaacaaaaaacgttcagtaaaaataatatttatttaacaaaaaaatttgttttaaaatattgttagcaaatatgtttatgctaattttaaaggattgatttgaagtttggtgggattaaatttgattgataatgtgattgacaatttaaatcaaaaatttaaaataaaattaattatttttaaaaaaagatttaatgctaatgacattagattgtaaataagtccaagttcatgatttatttgctaaaatagctgtaaaaatgtatatatagatttgttcatctatttctttaatatttttgtaaagataagtgactcataaatcgcactagtagattacgttaattgagcaaatacaaatatttggcgatgtccatatactagcacctaagaagtaaagtccttgtattcgtattacgttaatatttcaatttttaatgttaatttgaaatcatcccgaagaatccagagatcttgaacgttgagtatgtggtttttaatttttaatcagtggtaaatatttgtgaaccacaaaaagtaaaaagtccatgtctagtttttgaattgttaactgttcatattacgaagttgtttatataaaataccaaaaaaaggagatattttagaatatctcatatggtttttgttcacatacattttctttgtttttgcttgttctatctctctgtctttaatgccgttctcgactctcgaaccgatcaagcgttgcactaacatgtgccttcgctgaccgatagagctacaagagttaggcaccacaatctcatcttttaacactaaactaacaatacaagataaagtaacatatatctgaataaagacaatttatatgtataataaactagtgtactggaaagaaacgtttaacataagtacataacatatgattatatttaatgatgctgagaacaaaagatacttaggaataaatctaatgttcatcgttataagttataacacaaagcattaaaaaaaaacgttatacttaagtcccaaattttggatctaaccattaaggttgctcttagaacacataatattctctgttgttaccttgttctctatctgctttgatcaagcttcgtcatcacgttgcgcactaatgtgcaatcgtagaccaacgggctacaaaagccaggtgcctcaattgctaaattagatgaatctgaacatttttgtcaaggaatttaggaaaagtgacaagaaaagcaatattaaatcctatccatatccattgaattgaatgcatttaaaaatttagaagttttaagatttcaattctccaatgacgaatctataaactatctcctttctttatatgtaatgtttataaactatcttctttattttattactttgtttttgttaaagatatattaccaattttagttattattgtctgcttctcagctacaaaattgttttcctaataaagaattaaagatcttatccaatgtccacacgtttagtatttttctccatctacacaaaaaaaagaaaagaaaagaaaaagatattttagaatatctcacatgtgaaatgatcatgatcaacttctctctctgtctcttccatgccttgctcgagcatcgaacctaccaagcgttgcacattaatgtgccttcgctggccaggagagctacaagagcttggcgctgtctctgcagcacatagctaatttaaagttgattcgtcaaatccagcaaacttagttatagaataaaacattttttggcgttttgccaaggaaaaaaaaggggattagttggcttcaaataaaccaaaattagctaaatgttcatagagtaaataagtgaatgatcaacagataatatcattatgcatggagtatgatcaagaatacagactgaaaatttatatttactcaaaatgaaacaataaataatactgtcgaaatgaaatttgatgctaaactaagaagtatataatgaagaaaacaagtattatcgctagttaatttttatatgattatggtgttaaaaaataaaaataaaagtatataaacacaaatattgtatattttcgtgaaaattttaaaagaaaaatgttctaaattctagatttcttaggttgtctgctaaaataatgttagcaggtttcttaaaaccaaaaaaaaattcataaaatttacttgaaagcatgatgatagctactaaaaaaaattcataaaaagatatttaaaaataccttaaatgtttatctttatataacaacaagacctctgctgctgctatgctttcactggctctctcttttctcttttcgcccagctcgagcttcgaactaatcacacgttgcacattaatgtaccatcgcagaccagtgcgctacaagagccgggcgccaaagttacaactttttactaacttaaaaacctttggtcacctatataataacttcaataattcttttctatttttgagtcaaaaacataattcactccaacagtagtagtaattactagagtttctttgagttttttttaataatacaacaattaactttaccattttatctttttgaaaaaaggtttaccattttttacttcttgtagagttgtagtagtattatcatagtatggtgcatgtgtgttactgtgttaggtgtgtattgttttgtatatacgaaataaatgtttggaggcttggaaaatttttcaaggaaaaaaaaatcacatccatatgaccatatctattaatgagcaacactcatttcatcatatagatgccgagtgatcatttaatacactgtaagaaaatttaaagctttctgattccaaaattctcaaatctttttattacagtgtctttcatattcactttcttacaaagattattattaccaaatttagttacatgtctgctgctgagtttcaaataaattattgtcttaataaagatcttatcctatctccacacacgtttcctcctttttatttctcactttcaagcttagaaagaatattcttgttcgattttttttctcccgaacatgatctttcaatctcaacgacgatttctcagtgactaatactacatttgtatacattcttcatcatcatcatcatcatcatctgtgtttttgttcatattcatttttcagttatcgttttcaatttttaaaactttttttcttgggtttcacaaaatttgtcgttaatcgatgaatttgattgttttcaagatcacccatctctcgaattcacgaaatctctcagcttttccgtgattcttggtaaaaattcacaaaatcgaaattggagaaagaaagaaaaaattagggtttgaggaaaagcttcgatttttcacacgatgagtcatcaccggcgagattccggcggagatgtagttcacgtgattcccacaaacaatcctccgccggataattggtttccgaatctcggcgatagtgctgtttgggcgacggaagatgattacaatagagcttgggctatgaatcccgataacacctccggcgacaacaatggtccaccgaacaagaagactcgaggctctccgtcgtcttcatcagccacgactacttctgctgcgagcaatcgtactaaagcgattgggaaaatgttcttcaagacgaagctttgttgcaagtttcgtgctgggacttgtccgtatataacgaattgtaactttgctcatacggtggaggagcttcgtcgtccaccgccgaattggcaggagattgtggcggctcatgaggaggagagatctggtggtatgggaactcctacagtttctgtggttgagattccacgggaggagtttcagatcccgtctttggtgtcatcgacggctgagagtgggagatcttttaaaggaagacattgtaagaagttttatactgaagaaggatgtccttatggagaaagttgtacgtttctgcatgatgaggcttcgaggaatagagagagtgttgctattagcttaggacctggtggttatggaagtggtggtggtggtggaagtggcggtggttctgttggtggtggtggtagtagtagcaatgtagtagtgcttggtggtggtggtggaagtggaagtggaagtgggattcagattttgaagccttcaaattggaagacaaggatttgcaacaaatgggagattactgggtattgtccatttggtgctaagtgtcattttgctcatggagctgcaggtaaagattctgccttttgttcgatttcgtttgctttatgaatggaatggttaggcctgaagataaggacgggattgagttcataggtctctagtggttagccaagtttttagtgacttctcgtatgttagtttaaactttaaaccaatgttgcttgatgaatgggttaaaggtgactagagattggacgctgaagctccaagctgagtaaaatggttattcgcttattcgctgaccctgtcgggttctgtatcttatgacaccgctatctttgggtttttgttggtctgtggttaccatttagtctgttaggttatttgttagaagttttagtcaacggtgcttcatggttagactagtgagaatggtactaaaggttatataggagactaactaatggattgagtgcttatatcagttgagctcgccgcaggagtactgataaacattcatttttggtctggtattgtaatgaatctgacgagttgttgaatcttaggatagagttataggtttctcgaattctcaaaattttgatagataatctgtcttacatttgtgaaaaatgttgaatctttgatagtttcttatgggaaacaatttcttagaattgttgaacgatatgaccttagaaagttccgtagtcgtgtagctttaaagttttgagtctttatgatttgcagagttacatagatttggcggaggactcgtggaagaagaaggcaaagatggagtatcacccaatccggacacaaagcaaacagtacaaaaccccaaaggactatcagacacaacaacacttctatctccaggagtacctcataatgcagatgccagttaccacactggagttgcattgcaacgagcgtctagtgcggttacacaaaagcctggaattagaactcatcagaagtggaaaggaccggcgaaaatcagtcggatatacggtgattggatcgacgatattgaatgatgttacctctttcttttttctacacatttagataactgctaagaaaattacaatctccctttttttgcatggtacattttgtagagtttgtatatgtgtaatccttgtatctgttgttgttgttgtttgttgttgtagattatgacttatgttatattatcatctttcttttgtatcttttccatatttgattttttaaaaatttcataatttgattataaagccacaattttttttaatcataactagaagatcgatcaccgtaaaactagaatgtagaattagattagagcaaattaattggccacgaagataacacgtagcttttgtcaccaaagactcgctcaaaactctaaaagctttggcatatgtatgaccttacctttctcctcatttctctcttccccattgacattacccttcccacacggcaacctcagaataaaccctttcttcttcctcaagctacctatgaaaccagtcacaatatttctgatccggccgtttcactgcacggtctcaaaatgtctatatccacgaccgagacagacaatttcaaaccagtccataccctcgtttcctccccggtcaccatagtcttgaccggtagtcttctcttcatcattttcacggggttcttctccttcttcttctgtggatgtttatttaggaaactcatgaggatttggaataaccatcgaaaccgaaaccgtcctagtaacctaatccaaccgtctaatccacctgaaaacctcggtctcgactccaagatcattgaatcattccctgagtatccttattcggtgaaagatcatgggacggatcaatgttccatttgtttaacagagtttatggatgatgacactattaggctcatttctacttgtaatcactccttccacacgatttgcattgatctttggtttgaaggacacaagacttgccctgtatgcaggcgtgagcttgatgtagaagaccggacatcgctagaaaagccgctagaagttcctgaaatcgatctagttagatctgaaatccacgacgagcctttgccccgtgacacagtgacaatcatcgttcacgaggagcatcctagtactactattggtagtttagagcatacagatgaaatcgaaagctatgaaagacgaatgaaagcatcgaatttgcggttttggaggtcacattctactggacactctatagtagttaagaccgaaaacgaacaagaagaagaagaagaagaagaaaaagatgagattaagatacgtattgagatctctggagaatgtcagtttgaagatcacaagatgactttaccaaacagaaagttgtattgcgttaggggaacttactctgtaggatagagcctgagaatgtgaattgtcttggttgatatatcatctataatagatccaagaccggaattagattctaggttttgatatattctttgtttcggccgttccatttttgtaattttttgacactataggttatagttatacatatagaagatgttgaagattgttgtaatgtttgtacttaaattctcattattcagtaccaatcatactttccttttttcatttgtggacttcataaaattctaaaaatatttttaaatatatgtcttatatatataacataaaaaattaagttgcattttatcgttccggtttgatatgggaggtgtcaatttgatagaaatagaaatattgggaataacgtgatataaatcaatagaataggggaacgactaagagtttataatattacaatgtaagacctatattttaccatttgttaaaaaaagagaaccaaccaaacttggagagagaaatggcgacggcatcggaaaattcaagaggaatcagcggcggtgatcgaacggcgaaagctgtcgtcgccgatcagatttcacaagccgtaaattccactgctaaccttcttcatctgatgcgtcaatcgtcttcttctcaggtatatcttcttcaaacccttttaacgcgtgctcatttagtcaccgttggattaaataggatctaggttgaataattagggtttggtttgattctgatgatagaaaatgtggatttggtgaattgtttcaaacataggtgcaacagtttcgtagttgtcctatttcattggaaactagttatctcctcctgtttcatgtaataagaccacaatgaaacacaatgtgaggttattaggatgagctttagatgttttttttttaatctctaattatgagtattcgctgtgtgtaggctcagttggcaaagctcccgaagaatctgttggcgaaagcttcactgactaaggccactggacaggtatgtatgttatggtgtagaatgtatgatgacataagtaagtactgtgtgtcttaagcatttttttttacattttgttaaggcgttggcgcagcttcctcaagtgatttcatctctagatgctcatatagaaagcggattgcacaggtttgatcttctttgacatgcactcatcatcaaatcttgtatcacttagagttgaattttaatagatagctttaagaacaatgaatgagaaatgtgataagagaatactactccctttgatgatgaagaatgtttgtagctgttgtgttctctaaccctaagtttcgttttctcgatacagcggtgttcatctaaacacagtaacccagttacttgaaaacatggaaagcacacagcttcgtgctcttcgacaatctaatatttcccctgtggtgtaaactctgatctcttattagcaattagatgtttctttcttctgttacatttttctagcaagcaattgagattatcataattgatttttgtccataggacaattgatctccagctcatttgaaaatttcagacaaatgacaagtagtgatctccaaagatagacacatacggcgttcatcttcttccaaggaacacgcttccctaatctcctccaccaaagagtcgtttccacaacagagagaaatatatggttgtgacttagtttttgatttccgtctgcgtacccattgtgcggaatctgattccataatagctctggttggttgctagctagatatctccgctggtcacttttgggatcagatttagttggcttgattcttcatgatgactgcatattcacgattaagaatgaatatgtgaatcttttctgcaattattgaaatagaaaggtttttcttttgtgttcaacttttgggaactcgtctttgagctatgtgaatctccactcttattcggccatgttttctttgctgtcataaaatttaacaatgtcataaccaccagtttagcaggcttattttgatgtggttttggttgaaaacacgatttatgggttattattttatttctagttgactttcaaaatcaagagaatccataacaattacaaaaaaaaatacattaacttggttctaagaggcttgttcgtttggcagcgactgtcaaacgaacaacagaacaagtcgctgatcgcagttgatggtcgctggtcgcagtcgctagtcactggcgactagtacacgaacagggcctaccaagcttgtgaacatcagtaggatttaaatttccaccaattcttctttttcacgaactttttaatatttgttttgggtaaaataaaagaagcgggaacgccacttattgaggtgactccaatggtcacatactcacatttcagtactctctctctttctgaatcaattagggttcctcttctccgttgagtgaaaaattccggtggggtttcaggtctttcattttttcttcctgtgaaattcttttggttcgtcttgcttatttgatttcgaagaagcgatttcatgaacaatctcgatgagtttggatatcgtttgcttctcttttgtatctctctagggttttgatttgaccttccatagttgcttgttggtgttttttttaaacttacttcacactgagaattttgcattccttgctgttttcaggcttatctgtttagttttaggttctgacctaaacctgtggaagctgttagctagtatggataagttaagtcagttgcctgaagcgctactagtgagaattttgtctttactgtctgctaaagatgttgtttcgacaatggttttgtcgaaacggtggcagtttctttggatgttggtgccaaagcttatatatgatgatagctatcaagctattgagtatggaagcttttcgcggtttgttgacaggtcattcactctgcacgatgcgcaagttctagatactttgcatttcaaactcggtaaaacctcatgtggtactggagatattagagtttggattaaaacagcagagaagagctgtttgcgtgagctgataattgagattgataagtctaatagtgataattcttcagtggtacttccaaggagcctgtatacgtgctgtagaatgctcgtgactttgaagcttaataacgcggttcttgtggatgctacgtcctcgttttcatttccatctctcaagactttgagtcttgtgtccatgaagtttccaggtgatgagctgatcaagatgcttttatcgaattgtcctgttcttgaagacttggttgtgaaacgctgtccctatgacaatgtgactactttcactgttagagtgtcttctctaaagtgtttagtcttgcatgaaacggaattagccagtataaatgctgattgcgggtttgtgatagatactccttctttggagtgcttagacattgaagatggtaggggtggtttttgtgtcattgagaataatatgactaaggttgtgaaggcaaatgtttgcaattcttatgtacatacgcagcagctcatgggttctatttcttccgtcaagcgtctctatgtatgtataccatcctctaaggtaatatgtttctatagttctgttatctacatatattattggtttctttgtgatcaaattacttatgtagtgtctcttatgcaggatgcttatcctgttggtagtgtcttccactgtcttgtacgtttaacgatatgcacatgtgagacagagtggctaaatctacttatgtgtgtactcagagattcccctaaattacgagaactcaaacttgttaaggtctgcagatctaaacctgaattattcagtctctatgatatatcagcatatattttcagtagaataacagtgtgatgatatcttacttttatcttagaaccatgtctatcgatctcatcaaccgcggccgtgctggaatgaaccgagtgcagttcctgaatgtctgttgacaagtcttgaaactctcgaatgggtaaaatatgaaggaacagaagaagagaaagaagtagcggcattcatcttaagaagtggaagctgtttaaagaaggtgactatctcctctaaatccactgacatcaacaagaaatttgagatgctcaaggagttgtcattgttgttcaggcgttcacctacatgtcagattgcattcgactgaagtttagttcagtcttcttcattagtcaagttggtctgtgtttgatccaatcttatagacttgtgttttctcttcttaaagaaactagttttccctagaaacttatgttgctcaagtttttattcttttgacgttgtgtattcttatgtcttataacccttttgagtttttatcttatttagctctgcttctcactgcatattcttcgacaagcgaagaatgacgttctaaaatggtcaatgaacttagagacattttggtctttttgtttagtgtaatccgttatgagcttggatttaggtagatggaaatatgaattgaccacgtgtaatcatttagagcaaaatgatattgcaaatggtctaatggactcggatacgcaagaggtcgtggcaatggctaatcacatctccttatatctttaatgtgttaaatatgacattgtggcttcttattattataacccgtttgccttttcagtttcacacaaatggcaacaaatccttatggctgcatatgttttcaatttggatctctttaaactcaaaacaagtattaaggcaatctctatgatgttttgtaagtaccttgaagaggtcttttgtaagttgtaaccttttttatgtaggagaagaatcacatcttcaccttttgagtttttgacttgttctttccaaaatttgcacttttcaattgttgcaatggccaatattaatgatgtgacccaatctatttgtatagccgaaagaacccaaaatacaaatggttttttttttaaaaaaagtttttttgctgaaaatatattctttttttagaaaatttatgttcataattagttattggaatcctaaagtggcatgaaaaatgcttagaaacaagtgggcattaggaatcagtatgagattctttagaatttgtgtttgaaaacaatttctcttttcgactccttcaatgttaagtcctacatgacacgtaagctgtgaaagctacgagcagagacgattttagccatcaaccaaacgacaccgtttctaaacaatatttatttttgtatgtttttagtgtaacaaaattacaattgaaaattccaaatttcgagaaagagagaagacccatcgccgcaccgcttgagtcactcttcttcccggagaagaaagaaacaacaacaaacatattcaccattaccttcttcttctcctccttctccttcgtttctcactccaaatttggaaccctaaatcctaatatccttcgattagttctcttctctatcggaattcttaacgttgagaggagtctgatatttgccgtgactcaagagattccaggtgtttccgacgtatatatttacatatggcgtcgttggctctgacttctcctccctccgttaagattccttcgtatctctcctcgtcgtcttcgtctctcttctcccgttcctcgatttctttcaggaccactgagtctcgctctcgaatctgcgtttctggttacgcggtgagcattgagcattttttttccttcatgttaatgaatgaattcgatattcacattgcgtttcatgtatttgttataagaaaattcaaattgtttttggatgaatctatgctttgatgatctgtgagatttttctggatttagtagatgctattagcagttcgtttacaggctaattttgtgagaatttgtgtgttgtcgtcgctcttggcttgactttgtccatgtatgtgactgtagaatttggaatttggaactttcagctttggaatcttgtgtgttgaatactgttcatgaatgtttggttattcttatgtttgtagagagatgtaagagagatcgtgtgttggttaaattttgtgtctaacattttgaatttggtttcacaattccttgtcattgtgtttgatagaaatgcaatttgcctaaggcactaaacgggaacgctcgtgttccaattattaatgagacgacaattcctaagttctttgattcttcacggttggagaaatcggttagtagaaacaatactaagctcaagttgttctctggtactgctaatccagctttatctcaggtagttttctcgagacctttggttgtcttttttaatcaagttttcttctggtgaagtatatgctaaactcttggaattttgtgaaggaaattgcttggtatatgggtctggagcttgggaaggttagcataaagagatttgctgatggagagatctatgttcagctcaaagaaagtgttagaggttgcgatgtctttttggtgcagcctacttgcactccaactaatgagaatctcatggagctattgatcatggtggatgcttgccgaagagcatcagctaagaaagtcacagctgtgattccgtattttggatacgcaagagctgatagaaaggtaggttctttttgtcttcttcaatggtagatacagtatgtcaagtaatttcatctgatgtatctattgatgttttcagacacaagggcgtgaatctattgctgccaaattggtagcaaaccttataacagaagccggtgcagatagggttctggcttgtgatcttcattcaggacaatccatgggttattttgacataccagtggatcatgtctattgccaggtatcttaagtttcaacctttttgatagacaagcctctactttttatgcaacctttaaaatcttacacaattgtgattacatttcagcctgtgatacttgattatcttgctagcaagtcaatttcctctgaggatttggtagtggtttctcctgatgttggtggagtagccagggcacgtgcatttgctaagaaattatctgatgcaccacttgccattgtcgataaaaggcgtcacggccacaatgtcgctgaggtaaaaatttaaatttaccttcattttatcctttctacacgcaagttctcatgtgttgataatactctttcccacaggtcatgaacctaatcggtgatgttaaagggaaggtggcagtaatggtggatgatattattgatacagctggttagtaaaaattgccagaaactcctctttccgttgatatgtttgttataaacaaaagcttccaaactctaggccataatcgagatattactaaatagagattattctgtgatttgcaggccatacattactaagaaccagttttttatcttcttatttacaggaaccattgtgaaaggagcagctcttttacacgaggagggtgcacgtgaggtttacgcttgctgtacacacgctgttttcaggtaaacccattagcttgagttttaccagttcttctccattttcgtttatgaaactaagagaccgttttcttgaatgaatcaatgtcacagtcctcctgcgatagagcggttatcaagcggtttgctgcaagaagtgatagtgacgaatactttaccagtagcggagaagaattacttcccgcagttaacgatattatcggtggctaatcttctgggtgagaccatttggcgtgtccatgatgatagctccgttagtagtattttcctttgatacttgttggtttttgttaatcggtttaggatcggtctaagttcctcttttttgttctacttcttctcgacagtttctagtctaaccatgtcttgcttctcttactcacctaaagtatgtcacagttctatcttttcttctttttagcataatagagttatgagatatcaatgacaataaaattttaatattttggtttattgaaaataattacattatggtgtaaacattatttctcaggatttattgagaatttctaaattaacaatttccccaacttgcatatttctggcaataaatagttttggcattttatgaaataagtgactaatttttatggtttagtgttctttcttcggttaaccaatttttattgcaaaaaaaaaggaacaaattagggttttatcaagcccgtcgttgcatataaatagtcttttcatcgccgcttgaaacagataagtgtttccttcgtctctctgtggtccgatatgtctccctataatctctgtttcatagtttaatcatattcttttgtggttttgaattcttatgttcgaaaatcttgagtagttgctgtgatgtaactaccgtgtgccagagatgaagttattcatcgttgacggcaaacataaccttagagttctaagcttttcttttgttctattttttggtgtgtggtcgaagtgacgataaagaattcacagtctgtcaatccactgacaacatttgagtgatgttattgtgatatctcgacaggttctgatctactcttaataaaaaccctcccaatgatttttttttattagatcattagttttgttgaaagtggggcagatgatgattatcataaaacaaatgggtaatttgcgactgataatattacattgatgtgtttttcaccttggagaactgatgtccccaatctcatattctaagttctattttttttggtattgataatgaattcgtgaagagttcgatttgtttcttcttgtcataaacattaagccaattagcagagcaagggcgtctagtttaaatgacgtgagttgccttgaaggttggcgataacaagttttgcgattctccgtgcctatcaaattttgtttttcgtattgataatggcctcgaacaagtcgctacattcgttttttttcttccaaagattttgtttcaaaagaagtctcttatgtaataattaaaattcagaataaaaatcaggttatttacgatcataactaaccaaacgcttagacaatatgcttatcagttgagattatagtcccgtaggtggagcaatggtcggatagttaatgtgcagctatgattaaagcatatttgtagactaaatgtttggatggttaaattaaagcccaattatgataagaacctttgtaaaccggggatgggttcaatgtacaaaagtgtatatgtctgaacattaattcaacaaattgatggccatgaatcccatattaggaaggaaaaaaaacaataaaatgaaggtaaagaccaccataatggggacaattttcgtcgcatttttttccaaaaaaaacacgttagtccttgactcatttgaagacaagctcaaagtgatatttgcgagttgtaacggtaaacgattggattccctaactaggcaaataccactatggactttatgtagaatatggaagagtcgaaatctcctgggtttatcaacgtcggtctagcgaatggagacgagatgcacaacaggcgatcactgaatagaaacgagtcgaattaaatggttgtcacgttaggagaaaattttgatgtggtagagttgattaatacaaattttgaaattttacaataaataaaagaaaatatatgcagttatttatgtatatctatggcaaaaaataattgattgttttttgttttaaacaatgtttgcgcctatatggttgtggtaagcttcaaatgtgttacaaactgaactctgacaaatttgtttcaatctctctatagcaagttagtcataaattccaatagcaaatcgttacgcttcaaatgtgttacaaactaaactttgataaatttgtttcaatctttctgtaacatttttcatctacctttgcatccgaagctgaatttcacgatcagaatattgtttttttagattattcatgtcgataaactcaagagttacattttgcatatctggataagccctcactaaatcttcaatagcaactctcacctctttttggatacgtcttttatccgaagccactccaataacaatggtgatcgaaaaaatgccatagtaagtatttttgtgtttttgtgtaagagataaaaaacgctcggaatgaaatattttatgtcgtaaaatccacctcgtggatctttagggaatcaacattcttcgagttcttattcaaaagttccaacaataatatcattcattcttagttacaattatataatatacacaaattgtacactagtatactgtaacaaaagagcaacaagtatctttgatttggttgtaagaaattgctactcttacccataactctatttcaatccacaattttgatacaaattatctgtttcttgatggaataattaccaagtaccattgttaacaataatgttttatagcttgaatacccataacaatagtgctcccctttggtgtctatgaaccttttcgatgcttcgtaatcattacaaaagttaagcagaaactattttgaatatgttgtgtattggtcatccataaggttccaaaatactgcatcacttatattctcagcaatcgcgagctttcaacaatacactaaaagtttgattataaatttattaatgtaatcaatagttgtttttctattaaaaaaaaggaatgaaactaaatattatttacttaataatgcaatcaatagagttgattattcgattttagaattcttcttataaagattgcaaaatttatttagaaacttttagaataattttacagattcacatagattttatggggaatatcacctttaccctaggattttgaaagtcttattggttcaattttttttaaaagttaatcaaccaataacactaaactttattataatctgaaaagtcagtaactcaagattttgattttttttgtttgttcaaacattttgaatgaatttctaaaattattaattcaataactcataacttttaatgtacgtaaactttttataaatattgaaccagtaacacttacttttgataaaacatttataattcaagatttaagttataaatgcttcatagttaacagaattataacttaagcatttcatgtacaactctttaagttataaaaccttcacagttgacagtgtcaaaagagatttgtgtgacgtgtgaaattgtgtgaaagttgacacgtggttaaaatagtttcagcctatattgttctcgtttaattttttacaaaactgttcaacctcaaactttgttcgaactcactaagatgtgcttataaacataaaactctttctaacctttcttggtaagaacgttgagtgtttatccttttataatcgtatgtttcccacatttacggaaaaagtgagtaatttgccaattggatcagcaagagaggttactactttatgtaatcaattacttgtaacccacacaatatacacaagaactcttgatttgccgcaatcaaatatcaactgctgcacaaaacataagttctacataactgctgcataaaaatctcatatacacaaaagtcaataacccaataacattctacataaacaaattcatagcttctatcacagtatcatcaaataggatcgagaaaaataaacgcataaccgagagggatagcgaagatttataagcaggacagtgaggtgatgaaattgcagagaagctgctatgtaaggattctaaacgagtttgaggagattctgcttcagaaataccagcagcggaacatagagcgagaggaagccatcctctggagggggaaagcggacgtctttaaggctaccttctccacgaaagacacatggaatcatatccgaacatcatcaaatcagagggcgtggcatacaggagtttggttcgctcacgcaacgccaaaattctctttttgtgcttggctcgcagttaggaatcgactttccatggttgatcgtatgatgacatggaacaatgggacacccacgacctgtgttttttgctctagccctatggaaacacgagaccatctgtttttccaatgccactattcttctgaaatctggacttcaatcgcaaagaatgtgtacaaagatggtttttccacagattggtctgctgtggtgaattacatatctgattctcagcctgattgcatccagaatttcttatctaggtacacattccaagtctccattcattcaatcacggtgaggcgtcacgttcagcttcaaacctcatgcgacagatagacaagacaattagaaaccagctatcgacaatccaaaagaaaggggaacttcgactcgaaaaggggctgcaagtatggttcgccatgcgtccttagcatcctccaagaaagaagactctgtttttgctctctccattctatttactctgtttttgttctagttctgttttcttttattatcaaaatctcaaaaaagctgatgtaaaaagtatatttttcttttgaatataatttgacattttattcaaaaaaaaaaaaaaggatctatgagcagagcaaaccttatgcatcttcttcatacccaactttctcatatggatgttaaagtttctaaaatagcacttaatctgcattattattggctaaaatgtagagcacgcgaaaattctgggcgtgtaacatgaagaaagtgaattttttatatataataagaaacataggactggatcagactgggaaccaagatgaatattcataatggtgaatccttacaaaagactacacagacacaacaaatgagttttgagaccgtgactaggttgattagagatctcaaatgctagagtcatcatcaacccagaaacaagaatcctacttttactgacactcttgattgttacacgcagaaataataaagacacaggaaaagagaattaactgaactcttcaagacttttaaaatggactcacatgatggtgcatcggcccttttcttcgtttggttgcgctggcatttgctggaaccggtgtgactctgagggattgtatgtgaactcagatgtgtcaagcccatactgtttcaaaaaaaaaagcaatcagtgaatctcggtatcgcactaatgcttttttttaatttcagcacgttataatcttgttaccttttccctcatacgtgcactccaagggtcactgcggcttgggcgttggtccaaagtaggagcaactgggacaccagtgacaggggcggcttggcggttgatgaatggctgcctgatttgttgccttggagcaagatattcatcatcactgtcatactctgctggtgtattagctgccctgaccataagggcaagcaagaagagtaaagcctgcgagtaaacaagacatcattaagagtttttaaagatgacatgtttctattgccatacaacagtctacaaacacttccgcagggatatttatctttcaaagatagtttgttcttgattttcaatgatagtctgaacttgtgcttgctattacctcgaaaacaactgctcctagagctacccatcttacaatcttccagttctctctaaggaaattatatatcgtatcgaagtttccagtcctgtcagaaggaagttcctagagaacaataatacaaaacggttagctaagtacttgtgcagtcctgtctgcagatcatgtcaagttataaggcaacatgaagtctaacccaagagggaaacagacaaaaaaagaagataactcacatctctccagctgttatcgaagaaaataaatgctgcgaatccaagctccaccaagatcaacaagatcagaagaagagagtactattctcaattaaggaaatgaaaggttaagacttttagtttgcttaaggatcctatcataactaagcaaagataccaataacctgagcatataactaaaggtcaaggcagtatttatctaacaggaaatgttggataagaaaagcaagttaagtaattaggatacgcaagataagcagcagacactcctcgaacaagtaccaacacagccacagcaagaaataacaaagagagccacaccaataccaatgaacaagtatatgaacctgcatgataaaacaaaatcaaagaacataagaactaaagaagtgcaacaaaccaagactctgtttttgaacccaatatataaagtaaaagacgataatcacataccacgctttgggaagattgtcaaagatattagaagacagtgacacagccataagaataggcctcccaaacgaaacgtaactttgatctccattagtcaaatcgaatgtaacagaattatcggtaactctcttgtactcaacgaataaatagataccataaccaatcatgccaagtccagcaacagccaggagaaagttgagtaacttcaacaaacactccaaacaacctctacaagccatcttttttttgttttcacgacttagaactgttgtatgatttacactcagcgtttccctttaattcatcagtccaaagaattatcctaaaagaacaaaaaactaaatttcaatgagttcataataacaatcccaaagatagatcaatgataaagattctatctaaaatatcatcaaaactaagaaatgaattttgactaaaaatcaaacttcaatgaaattgtgatgtcctgcccaaattcaattgctatacacacgaatcaagcctctcatagagctgagaatgagagatacaccaattaattttctctaatcgacataaaaaacgaccaaatcacagagatatctcgtaatctaagagaaatgattccaccaatttttttttccgtgaacaaaattacgaacgaataagttcagatcgggagaacaaaatcgaaattacgcaatcgaagcacgagattgagagagtggaagaagaagatgatggaaacttacggagaattgttgagagatgattcttcgatgttcgcgatggttttgagtttttttgtgttgttgttgttcttgtcgccgagaggaaggggatgaaaaatccaaggatgggaaaatatttgtttggaattttgctgtgtcatacaaatgccagctggcaatttaaatttgaagatgaagtgacaagtccaatgggtagataggccattttagtttttcaggagcccaactacgaatacgtgtgtcgttgaataatttcagtttacagattctttatcctttctgatttctgtcggcaattaaaattagttttgtgtggaatggaatgtactacacatgtctatatgtcctaaagactccaagacattacaaaatacaaagctttagttttatttttttgaagttaaatttacaagcacttttaatatttacgtataaaatcttttctgaaaataattgaagatttgtgtagtccgttcgatttgtttacaaaaggaagctatgatagagcgaaattaacacgaaaatgaaaatgctttgttcatcgcctaaaaggcagcttaaaggatttgtctatcctacgaaattgtcacgagctttcacgaaccaagactgttctgtgggttaaacaatatttttatcgagaaaacgtattttgtatgtttatgatctgcgttaaatatcttatcaattttttattaccttgtccgtcaaaatatccaaaaaataatttagaaattcggtttataaaaatgttgttttcaaagtttaattgttagaattgataatctcataatgatcatttcgaaaaaccaaaaaaattatcacattgtatgaaggattttgacaaaattttattcggaaaatcactctcaacaacataaataaacaaaaaaagtttgttttatataaaaaaaatcagtataaataggtaaatgggattactttacacactaaaaagtaccaatttgagttaatactaagattttgggttggacattaatacatcaaagtcaccgattctcatttgaacaacttcacttctccgatcaacgatcaataaacgtaacaatcactccgatgttcctaaaacaccaaaatgataaagcgttagctctcgagatgagagaacttagttatgaattgtttttgggtttttagatttttacaaaaaattagtagtcagattagtagtcggaaaatcactctcaacaacataaataaacaaaaaaagtttgttttatataaaaaaaatcagtagtcagattactttacacgcagtcagattagtagtcggaaaatcactctcaacaacataaataaacaaaaaaagtttgttttatataaaaaaaatcagtagtcagattactttacacgcagtcagattagtagtcggaaaatcactctcaacaacataaataaacaaaaaaagtttgttttatataaaaaaaatcagtataaataggtaaatgggattactttacacactaaaaagtaccaatttgagttaatactaagattttgggttggacattaatacatcaaagtcaccgattctcatttgaacaacttcacttctccgatcaacgatcaataaacgtaacaatcactccgatgttcctaaaacaccaaaatgataaagcgttagctctcgagatgagagaacttagttatgaattgtttttgggtttttagatttttacaaaaaattagtagtcagattagtagtcggaaaatcactctcaacaacataaataaacaaaaaaagtttgttttatataaaaaaaatcagtagtcagattactttacacgcagtcagattagtagtcggaaaatcactctcaacaacataaataaacaaaaaaagtttgttttatataaaaaaaatcagtataaataggtaaatgggattactttacacactaaaaagtaccaatttgagttaatactaagattttgggttggacattaatacatcaaagtcaccgattctcatttgaacaacttcacttctccgatcaacgatcaataaacgtaacaatcactccgatgttcctaaaacaccaaaatgataaagcgttagctctcgagatgagagaacttagttatgaattgtttttgggtttttagatttttacaaatgattcttgatgatgatggaaataatctgctcatgactcttagtctcttatagcttctaacggccttctcacatctgcccgttattagcctccatgcgtcatttctaaatcttttttattggtcacttgattccacacttgccaactcacacctgctgtggttctgcaacagacatgactggaccggactaaataaggtcaaaccgtatcgggtttggtacacacgtggccgatcatcatcaaagggcttaccaatattacgatggactcgaccacagctgatagaagttccgatattacaaaaacagaaagacagaagggtttacctatgattaatgtctgaaaaatttgatatttgaagcgaatcaacaacaacagtcgggttcgtgaaaaaaaaagatttgatcggctaaacttggtcggtatgattctcatctatctggttgaaattcttcaaattgttgctattgttgtgtgattttcccctttttctttgaactttggatccgtgtgaaatcaattctggcgattgggattggtatcactgtatcagtaatatcagattttcttcgaatttcttggaagtagttgagctttgtcgaattcaaaccttcttcaaaaaagaaaagaatagaagaatgagaagttttctcaaatttttggaaaataattatttttgtcacagttagttagcgaatggagaagtagaaaaatcagatatttagtgatactttcttggggattcttttgatgtttaattgaagattggctcactgattttatctttgaaggtcttagtaaacgttaatagcttgacgttatcattagaaactcaaaaaacttaagtctctctctaattattagctttcaggtttatcgtggaaggacttgtcaatggcagacgtacctggatacctgcgcacttgtttggatatggggaagatagctttcttagcaatccttgtatctacagggattgtgttgcagattctggtatcccccaagagattctttcaagttttgatcctgcctgtttatgcttctcctgccaatagtagattcatacttgtgtttaaaccctttgttgctaattttgttccaggcttgtgctctgttcaataactggtggccaatgctaagtggtgagttgtttcgctcgacctccaatatctctttgttggttcgatctttagtcttgcaaactgcattttatatcgatgaaagtagtctgttttaaatcttgtttggttacataaaaagtgtcagggaacttggaaaaaccattattatatcaatggtgatggattttaaactctttcttgcggttaatcagaatctgatattgctttgcagttataatgtatgtgctcctcccaatgcctttgctcttctttggtggatcagacagtacatctctattcaacgagtcagataataggtaagcaatttatatacaggcctccattgtttgtttaggtttgcatttgcatttacgttacattccaagtgaacccacaactacaattatcgactttctaagtctaggtatatcaaagaaactcgctgagcttacatgaacattttcttttatgcagttggatcaatgcagccaagttcttgactggtgcatcagcagttggaagcgtcgcgataccatcgattctaaaacacgccggactcatcggttggggcgcattagcccttgatctctcatcctacgttgtcttcctcgtggctattttgggttacatttgcataggagatgccagtgacaactattacagctacatttaaaaagacacacacaaattcatcatcatttgtttaaacctcaacaaagtctcagccttttatcacttccccgttcgattgatgcttcgaaacgaaaacatcttgtttctatggaatgactcactgattggattttcacaagtttaagagtttgtgtgtcaagtgtatgtatgaatgattttttttttgggtggttttgttacgttttgatgtatagaacatatttattatttggtggaatatatataaattttctttacaaaagcatattgaaaaactgagtcttttagataaagaagctgtgaaaagtgtttgaatgcgagctctctgtgtaaagaaagtttgtggctttctctcaaaattatctctcagatcttcaatatcttgtcgtcgatactatggagataagataccgaattacggaagctatcgtcgaggtttctctaatgaagaagctcttatacttcgtcgtttatctgagggaggtcttgtacatgcacgccacttgctcgacaaaattcctcagagaggaagtatcaaccgtgttgtttactggacttcgcttcttagtaagtacgcgaaaactggatacttggatgaagcaagggttttgtttgaagtaatgcctgagaggaatatcgttacttgtaatgcgatgttgacgggttatgttaaatgtaggagaatgaatgaggcttggacattgtttagggaaatgccgaagaatgttgtttcttggactgtgatgcttactgcgctatgtgacgacggaaggagtgaagatgcagttgagttgttcgatgaaatgcctgagagaaatgtggtttcgtggaacactttggtaacgggtttgattaggaatggtgatatggagaaggcaaaacaggtgtttgatgctatgcctagtagagatgttgtgtcgtggaacgctatgattaaagggtatattgagaatgatgggatggaggaagcgaaactattgtttggggatatgagtgagaagaatgtagttacttggacgagtatggtatatggttattgtaggtatggagatgttcgtgaagcttatagattgttctgtgaaatgccggagagaaatatcgtttcttggaccgctatgattagtgggtttgcttggaatgagttgtatagagaagcgttgatgctttttcttgaaatgaagaaggatgttgatgcagtatcaccaaatggtgagactctcatttctcttgcttatgcttgtggtggtcttggtgttgaatttcgtcgtcttggtgagcaattgcacgcacaagttatatctaacggttgggaaactgtggatcacgatggaaggttggcgaaaagtcttgttcatatgtatgcatcatctggcttgattgcttcagctcaatctctgcttaatgaaagctttgatttgcagtcttgtaacattattatcaaccgttatctaaagaacggggatttggagcgagctgaaactctgttcgagagagtcaagagcttacatgacaaagtatcttggacatcgatgatcgatggatatctagaagcgggtgatgtatccagggcctttggtctgtttcagaaacttcacgacaaagacggggttacatggacggttatgatctcaggtcttgtccaaaacgaactttttgcagaagctgcatccttactgtcagatatggtgagatgtggtctgaaaccgttgaactcgacttactctgttcttcttagttctgcgggagccacatcgaatctcgatcaagggaagcatatacactgcgtgattgcaaaaaccacggcttgctatgatcctgatctcatccttcaaaactctcttgtctctatgtacgccaaatgcggagccatagaggatgcttatgagatattcgcaaagatggttcagaaagatacagtttcatggaactctatgatcatggggttatcgcatcacggcttagcggataaagccttaaatctgttcaaagagatgcttgattcggggaagaaaccgaactctgtaacgtttctcggagtcctctctgcttgtagtcactctggactcatcaccagaggtttagaactattcaaagcgatgaaagaaacctattcgatccagcccggaatcgaccattacatctcgatgatagaccttttaggcagagccggaaaactaaaagaagcagaggaattcatctcagctctgcctttcactccagaccatacagtctacggcgcattgttaggcttatgcggactcaactggagagataaagatgcagaaggcatagcggaacgagctgcaatgcggttgctagagcttgacccagtcaatgcaccaggacatgtggcgctatgcaacgtgtatgcgggactagggaggcatgatatggagaaggaaatgagaaaagagatgggaataaaaggagtgaagaagacaccaggatgtagttgggttgtggttaatggaagagctaatgtgtttctctctggtgataagtctgcaagtgaagctgctcagatggttttgccaatcttttgtggtaatgaaatgcttgaggaggaagaagagaaaccgttgagtctatgccattgctgagagttaagcacatatgttcgctatagtttgtgtatgctcacaacaactttgtttacaaaaaataagaaaacgtaaaaaatacaaattcacttgtaattctgcttcttcactttgacctccaggaaccatgaccaaacttggaaaataggtacaatgcaaaggccaaggatcaaccacagaatccaattgggttttactgatcaacttattctcctccacaacatagatccaagctcgtccagtttcatcacaagaacaaatgacgagccttttaccatcaatgaagtaacttggctgagagtaggttttggtctgtactaaatccggcatgttaggaattgacacctccatgaaactcatccagttcacatccccagcataccaagatgacgtttcaattcattttaacaactagatccaagatttattcggttagcgtcaatcccaaggtagtggtgcgtgagttaaccaggtttaacagctcagatacctataagcttggttgataccagtggattcttgctttgtagcatgggtgaaggagccgttgtttggaacccctggttaagacagactagatgcatcgagccccgaggttaacgaacctagtttggattttcttggcataggttatgataataataagagtcagagggttgaggaaattgattacaagaccctttcggtttatatggaggacttagactctaccgatacgtggaaagatgaagatttagacgaaacaaaatatagtgaacttgtgaccattaactattacttaagggttgtatcgttgaatggaagtttgtattgggttactcgagagaacgattctttaagttttgtgacctaccaagtggggagaaccatgctcgcgatgctcttgtccttagggtttttagggatcggaagatcggttttcgttgttgaagcagtgccatgtaacaacgaagattaagatttgggtgaccaagaacaaaattgataaaggcccggcccagagctggaagcttctccttgttcgccattgggtatattgttttcaagtcacttactactcacttacgttttcaaaatgactataaagttttcccagttggggtatatattattaacctattgttgttcatgaaaatctccaaaatccctcattttagtcttttttagtcataaagtctggatttttcttttccgtgagaatctggattttataaaatgttaactagttaatatatttatgagacccatattctctccattctttattagatttttttttggcagatcgatggttctttcattattagccatatacatgtaattcttatgttatttaattttatgatatagcaattaaaaaaaatctcatataataaacccggagatgtcaaacctatattatgtaaatgcaggctaagatattttaaatttaaataatgttttataaataccttacaattaataacataactttttcatctataaataaagttacaacttaaatttattttgtaatctctttctccatagcttatactaccaatcatggaatggtatcttaattattgtttgattgacacaaaaaaagcttttcaattaaaatttaacaattgtaatgatttatattatatacaaataaagttgcatttatgttatttataaatttagccttacatatttgctggtttcaatttaaatatttatatatgacaaaatttactggtgttaaaatacatttattatatatgtttatatatatatatatttgtttcaattgtaaaacaaaatgcattgaatataaatcctactatattatttgggaagtacatcttaaatgtaaccttaatttttgtaagtaattacataggtacgccattagaaataaaattttaaagagtaaattaatttatctctttaaggattaaaaagtcaaatactaatttaattaattaaatttaattaaaaaaaaatacattattaatttctaaaaataataaccaatcaaaatcaacatataagatttgatatctaaattttaattaatttaatttaattagaaaaacgaaatacattattaatttccaaaaaagtaaccaattaaaatcaacaaattatatttgatatctaaattatcatattaattttttattaattattatagttcacttctcatctttatatgattctatttttgcggaaaaataatatcatcattataaaaaaataattagagtcttttcgcatatgccataatttgaatttttaaaaacgaatataaactgttcaatacatgaaaaaatattataacgggtgaaaaatagatttaagaaaactttctactgagtaacgagtcataatttgaaatatttatattcaatttcatacatattatattgaaaatttataatcttatatactacaataattaataacatattacatgtgatttaatttttaatacaagctagaaaatcctagaattgacgggtttagatcaatattaatacaagttggtatactacaggtgaaactcttaaattaacaatcaaactacaagtgtataatcttaaacactaaacaatatatataatatcaacaaaacatatacaactcacagtttactatacatttaaaatcaaataaaataatatcatatatttttaaatcatctttacaataaaagtttttagtttaactaaaatataaggctttttggatctaaagacgggtcatcaaagatttcctaaactgaagcaaaatatactgaatattcaaatatctatctgttaccaaattataaacaaataagttaatttaatattttatatacaaaatcaattaaatcttaatcacataaaaattagcacacaaaaaaaagtattcaacaattaaaaaattatcaaatctctgtgttatataagttttgatactatattcgaataaagtgtaatataccttttcaatttgtattctttaactaatttaagctaactaatatatttgctaatcttatacctatcaaaaccgactatagtttcttatctctatagtatttttgcaagacttttttggtggatttggataaaagtgcattcggatcatatggtacatttccctattaaataaatatggtgcactcctatgttattagctaaaatatttagaatataattcagagtcatatcattaataaaattaatattaataaaataaatggctttttggcaagacggatttggagggacgggtttttgaatcaacattaataaaaaagtaaaatataattaatccatagtttcaatacgggttaaatctttaatttattattttctaagaccactaatattaaacatatcaaatcatcctaatttagaaaagattatataaaaccaaaaatgttatgtggtatgtataatgttaatatatataaaattaaacaataaaatataaatgtattagagaatgatacaatttgcaaaatttttatatataaaaaataaatcttaaattttaaaattactacgttaaaaaaaaaatcacgggacgggtaaagaaattacagaacgggttttattttggaattgggttatatggtggatgtattggaattaatatttataaaatattaaaatattattaatatgctgttttaataggggttaaaacttcagttttttaacaattgtctcatggattcgtggtatagcgttacttaatatcaattataaactgtaaaatataaatattttataaaaataaaatttgtaagttttaatatattacttttaaaaaataaatcgttccgcggtataccgcgggttaaaatctagtaaaatctttatatgaatactacgtgatttcgaaaaaggttttaaaattgaaaatacaatcacacatgattttactttggatttctaaatcagttaaaatccatttgttgtttatttactcaaaatcataaaattggaaaatatcaaattcactaagatatatactttttggacaacttaaatataaataatgtatataaaacaaaaggaactatacatattattcttccaaatttagggcaaggctttacaaaaaaacagagacctgatgaagagaggaaacgaagagaacaaccacaagacctcctcatcatcgtctacacaacgtcttagccgccgtaaaatctcagccggagaaaagtccggcaacgtcaatatccctctggatctaacggtggagatactcaagaaactaccggcaaaatctctcttgaggtttcaatgcgtctcgaagcaatggttatcaatcatcagcagccgtagagacttcatagactcgatcgtgactcgatctttgactcagccaccaccgcgtgatatcaaactcatctttcaccaccaagttctttatccgggacctcacttcttcatcttctcgtctacttaccctcaaaatacagacaaagaatcattaacaaccagagccagctcgtatcactatgtccgtggcttgatttgttgttggtcacactgtcctactacggtagacatatataaccctaccacgaggcagtactataccgtaccggatactaaccggtaccaatacatagaaacttgcttctttggatacgaccctgtcgaaaatcaatacaaagtaatggtcttaccaaaatactatatggaggagtcgccttgtcaagtattcacagtgggagatcccatagagaagccttggagagacatccaaggcattggagttcactttcttttgaaagatgctgtttgcatcaacggtgttatctattaccaggcaactaatgaatatggttccacatatttcttggtgagttttgatgttaggtccgagaaatttaatcatgtcaaggcaccgaaaatactgacggatcatccttgcactttgataaactatcaagggaagttaggacttataatgtgttgcaagaagggcttggaaatttgggttatggaggatgctgagaaaaaacaagattaatggtccaagattatcttttatgagatggagggtttagaaaaatggtatattgacggtgtcactcatggtggtgagattgtttttgtccattgggggttaaaatgttacaatgcattatatgttatctattttaatccaaagcgaaacagtatgagatacgttgaagtcgaaggtgcaatggtggagaatatagaggatggacataaatgttatcttcgtacatgggctgttccgaatcctgtcgagaatacaatgcgtttgtaacttcttttcacaaggtgtactttcttatacaaattaaacttatgttatttttttagtcacgattaataaagcaatgtagctcgtgatacaataaagcggctggtaatcatgtcgagaatataaatatcattgtaggattcgttgatattttctcatattgtcaaattgggttatgatctatacaatatataagaagttaagatgcaattttgaacatactcagccttttctcacttcccaacgtactcggttactacgaaacaccgataaagaactcacatctccaggcaaagatggttatacatcagttggtctgtaggtgcggattaagttactaggtggtgtatcatacgtctgcggattgaccatttgtagtctttcagcctccttgcattgaaaccctatatgttttatagcctatatgtgaactgtagaaagatggttcaattcaatataatttattcatgttgggaaatacaactcctcaaacagggaacacaggatgataacatgtgaaacataaaacatgtacaaaactcttttgttgccgaataacaggataaagcgttatgttttatttccgaatcggattcaggacaactagattttaaccgagtccactaaacattcttcaatctagtctgctctaaacaatcaaaaataatttatttttgaaataattactagaatagaacacaattgtatgtttattcctagaatagaacacatcttttttttattattcacatgttttcagtacttgtgtaattacaattaacacccttgattagttttaattaaatattattattaaattcgtttttaattaaaaaataaataagaaaacagtgattatccatgtcaccaatccatgtcatttaccctaatccacgtcatccgaaaccaaaaattctcttaaaactttcagtttctcattttttcagcatatctcactgttcatccgcgcaaaaagaaaaaaaaaaaaaagaaattgtcgctctcttctctcgttcagtcgacggaaccctaattttgtcgccgttctttacttatctcgtctctttcggccaaaactctttcggtggtgtcaaatttcaagtcatcaaaaatcaaaacccaaatcaaagaagatgtatggaattttatatgatttgttacaagtttgagttgaatcaagaataactactcttttactttgattttatatgtctctcgtttagttttcctctcaatcgatctatttagagatatttctacttctatcaatgttttgattcatatggtttcgtcttcctcctatgtatctctcaaacatattcttacgtttcttaatttgattgttgttatttggccaataaatttcatattgtcttccccagaaaaatgttgcttttcgatttgtattataaatcagccgtaaagtgatgtaactcagccgtaacgtgatgtaactcagccgtaacatataatttacacaacctttcgtcttccctgaataataactcagccgtgacatataatttaccgaacctttcgtctttcctgaagcatataactcagccgtaacatataatttacactcatctttcatttgcccttgaacatataactcagccgtgacatgtaaatttatagatgtcttcccttaaacatataattcagccgtaatgtaattttacagaacctttcgtcttccctgtaacatataactcagccgtgacatgtaaattgactgaacgtttcgttctcccttaaacatataactcaaccgtaatgtaattttatcgaacttttcgtctttcctggaacgtataactcagtcgtgacatgtaaatttttagcttcctaaaaaaccagacaagaatctcgtaaccatttatttttcgaggccgagagagattataggctaaaggtttagaacttccttataatttcaaccaaaaacgaaaaatatataaaaaacggataaccatataagaaaaacacaagtaaggaaattgaaattgaacttgtaactctgcttcttctctttgacctccaggaaccaggaccaaacttggaaaataggtacaatgcaaaggccaaggatcaaccacagaatccaattgggttttactgaccaacttatttccccccacaacatagatccaagcccgaccagtttcatcacaagaacaaatgacgagccttttatcatcaatgaagtaacttggctgagagttaaatttgggatgttctaaatccggcatggtaggaattgacacctccatgaaactcatccatttcacatccccaccataccgattatcaatcttgttctttgtcacccaaatcttaatcttctttgttacatgacactgcctcaacaacgaaaacctatcttccctaaaaaccctaagggcaagagcatcacgacgacggttcttcccgcttggtagatcacaaaacttgaagaattcttcttacgaaaaattgaagctaagtaagaagaacaacaagggataattgacatgagtcttgtgataatgagcaagccaatacaaacttccattcaacgataccacacttaagtttgttaagcgaatggtaacacttccctcagtaattcgtctactatattttgtcttttcaatctcttggtctatccacgtatcggaggcaaagtcatggattttccacgtatattgagagcctaagtctttcatataaaccgaaagtgttttgtaaacaatttcctcaactctcttattattatcataacctatgccaagaaaatccaaactaggttcgttaacctcgagcttgatgcatctagactgttttaaccaagggttccaaaccacggctccattacccacgtcacaaagcaataatccactggtagcaaacaaatttttatgtctttgagcttttaaaccgggattatttaaggttaactcacgcacctctaccttgggattgacgcttactgaataaatcttggatctagttgataaaacgaattgaaacgtcatcttgtgattgttgatgaacgtcttgtcgttgaagagagcgttccatcgtttgcaaacggttttgaatcggtcaagagaagtaggagggacacgagataggatctcttcctccaaatcccatggaagcttctccttattcgccattaattagtttgtgtaagactgtaagtcacaatactttttcatatatatagacgactctttaatgataagttttcttaactagggtttccaactgatttgttcacatataaatctccaagaataattctatatatacatttttggaggggatttttgaagataatgttgaagatttgaggtataattcaacaattaattcaaatgggtgggttttacccagtttaactctgttcggatcatggataacatgtttaattctgttctgatcttggataacattaatttttggaaaagttacctaaaaactaataattaaaaacgaaaattaatgatttaattaccaaatttaatataacaatatctctaaactaaccatatttcttatttaccttaactaatttcctaaaatatttctacctaatttaaacataaatatataattcttctttcatttttatttgatcttatactttatttatttgaattttatataaaatatatatagttaataaaatattatattttttctgaatatgatgtaattcaatttttttaaaacggacatatattattcaacctatgaagaaataatatgtgtacaatgtcctacatcgcttagaaaaattgaacaatggttcagacccatattataaaaggaccaaaatgattctgattacgaatgagcaggaagcttgatttatcaggcgtacaaaattaaaatagttatccgattttactcggattttttattttaaagaattgaaactttaaaatgtttcaagaaattataaatattattactttatcaaaagttaaatattttaattttaaaaactttttataaagtttatctttaaaaatgctttaaatatttataattttaaaacttataaagttttaaaaattataaattgaattttacaagaaatttaaacattataaatatatataaaatatattaatacgagacgatatattacaggaaaaatcttaaatataacaatcaaaattcaatgatgaattttgggtcgatattgtatttttttaagtttcaaattttataatattaaaattgataagaaaatgacaaaattatgtttaatttcacgggactgggttatatggtaggacgggtttgggtggataataattacgattttacaatgtcccacatcgcttaaaaaaattggaaaatggtcaagagccatactataaaaaggaccaaaatgatttcgattacgaatgagtatgaaacttgatttatgaggtgtccaaaattaaaatggtttgtttactagggttatttattttaaaaaattgaaactttaaaaagtttaaaaaattataaattaaattttacaagaaatttaaacaatataaaagatattaatacgtgacgatatactgcgagagaaatcttagatataacactcaaaattcaatgatgaagtttgggtcaatattaatcttttttgaagtttctaattttataaatatttgaaatttataataaaatgacaaatttgtgtttaatttcacgggacggggttatatggtgtgacgggtttgattggataataacatgggatagtatgctatggaaaaaaacatataataataatcataatataattatataatcttaaacactaaacaaaattaacaatattaaaaaaaaaaaacttaaaactttaatttttttaaaacacattttgattcttttataagaaatttaaacattataaatatttaaactttatactacgggtgaaattttagaattgactgtttgggttgataagaatttgcgatataactaggagttaaattctagaatgacaatcaaaatataattatataattaaatactactacgagtgaaattctagaattgacgagtttgaatcgatataaatatgggatggtgtactacgggtgatattttagaattgactggtttgggttgataataatttgcgatagaattaggagtgaaatcttagaatgacaattaaaatataattatataattaaatactaccacgggtaaaatcgtagaattgacgggcttgattcgatattaatatgggatggtgtactacgggtgatattttagaattgactggtttgggttgataataatttgcgatagaattaggagtgaaatcctagaatgacaattaaaatataattatacaattaaatactaccacgggtgaaatcctagaattgacgggtttgattcgatattaatatgggatggtgtactacgggtgaaatccgagaaacaacaatcaaaatacaattatacaatattaaacatttaacaaaataaacaaatacaacttaaaactttaaaatttgagttataaaatttcgtctcgcggtgaattatacatttaaatcaaacaatagcataaatttattaaatcatcctaaaaaatattcaattattttttatttaataaaaatataggcccgcggtataccgcgggttaatatctagtattttacattcttttttgttttacttcataatatctgaattttacaaatctagagatattcatgagatctatattctctccattcgtttttattatttgttttattttttattttttatattgtcagtaaatctatatttttgtttaaaaaaaaatataattcttaaactaatttctacatgcattaatttaaaccgatgaaggaactatacaattattaatcagggatcgagcattacattacatctagatagtagaccatcgaggttcgaaactctgcctttcactctacagtctatagcgcattgcgaggcttataatcttatatatgcgggctcaactggagagatagagatgcaaaaggcatagcggaacagcatgtgatgcttttgctgacgctcgaccttgttgatgaaccgggacacgtctgtgcgacatgtatgcgagtttagagcatctcctatggtattcaatatcttgttccaaactttatatttggtgaaaaatcactccaatgatgctctatattttgttctaaaaacatatatgaacaataatttggagcaacactaatcatatcatacgaacggttcatatcactatttttatagcacaatttttgtttcacaaagtacacctcaattttatatattactttttatacattaaaaattatatatttaaatcagtatctacttatttttataaaatgtcaattttcacactaattatatctacaaagtaaacaccactctttcacattgtttgatgtatgcatgttaaatttcgtatagccttttcaatagtttatattgttttgaacgttctctccaaaatggactttcttatagccttctcaatagtttgctctaagatgatgatacttaaataaaaatgtattaatcatttgatctctgatttatgtattgtaatgaaattttattagatatttgttttaaaataaactatctatgtagaatttgtaaacttcaaaaataaaggactatgtgaaaaatttaaatataatatacttagaatatttgttttagagcaaaaaaaataaagcgaactaacaaactatatatagagatctctagatttagagttaaaaataaagtcagccataggaaatggtattaaggaggtatatataagatggagacggagatgaggaacgagatggggttaggagtgaagaagagaccaggattttagttggatcgtggttatgatggaagctcatgtgtttctatctggtaataagtcagcttgtgaaattgctcggttgattttgccaatcttttgtggtagtgaaattaggaagatgtgaaaccgttgactatctgtcatcattgctgaactgaagtgaagcacatattttttttctctttatttttttttgtggagaactgaagcacaacgttacatttgtctagttgtatttgtttactaatttttttttatagcattcaaatacaaattatttttattattcttgtttttgtttggaaaattgccgacaagaaaaagtttaaattatcaccacaattgcattttttcttttaatctgggtagagaattggagttgtatgtaaaaactaatttcagttaccctatttcttactaataagattaaaaatatactaatcgatagattaataattgttaattatcgatttcgttaggaaatcacaaattcaatcaaataacaaaggaactaataaaatctgttatagaagggacatattttcttggtttaacaccaaatgggcttataaacaaagtagacattttttcaaaaataatttgagaaataggtagtttttttagaaatttgtgaaataaacattctttttactttttgtgagatagagtttatgtgtaataagctaaaagacaaaaattttgtcaaataccactttaccctttactttatatgagaaagttttattgtgtttccaattttatagtatttaaatatttagactaattattatattatagttaaaaaaaaatttcatctttatttttttgtattaatatttgttaacttccaaaacaagatgatttctatatattcaattatcaatctcgtacactagcattaaacatagttttgtacactaacacttgtataccaaattattttatccaacaatatttatataatatatcctaaatcgttaaatgcaccgactttgactcatatttattaattaaagtaatgattgttcataaatttatattaatatgatgttgtacaccatcatgtacatcattaaataaccatgatagtgtactaatatttgtatacttttatgtacactaatctcgtatactattatttaaactttgttttgtacattatcacttgacaaaaatggttctattttttgtatatggggtgtacaaagtaggtgaaggtatacggtattgtagatggtgtacgaggtgatatatggtatgactcattatctcatcatttcatatatactattaatattatgtacaccatattttatatcatctccgtataccattgtattatatagttgtacaccgctatatattgtcgtttgtacaccactttatacattgtcatatatcgtattacgtgtattacttcttagatcaatattattcattttctacatacactattatttgtacaccacttttttataatatcgcgtacaccacgaggttgagattaaataaaagaaaatgttacatatttatgatagataacaaaattagattttttagattcatataaatcttttaaagattatatgtttttatggtaattattttaaaaaaaaattatagcaaaacaaactaaatatgtataagtaaaaataagaaaaagaaaaagtaagttttgtctttatttgattacatgacaaaacaagagaaggttataaaggtcatttacaaattagagaagaaaaagaaatgtgtctattctccatatttataaaaaaaactacctactttacaaattatttttgtaaaaagtatctacttcacaaaatatctcaatcatttaatctgattttagaccgacattataatcttacctttcacacaacaaattcgttcatttgttgaaattttgtacatttccatttcattaaaactttatagtatatactataaacagacaaaagaagatataatataaacttttgtatatgcgaatttaggtgagaaaatattcactggttctctctgactcagagggttcagtgtaactgtctaccaaacaaacaaaccaatagaagaaaccaaaaccctctctctctctctttctccgcccctccttctctgtctctcctctgcatctcctctgttcctcaggtttctctgctcatggctgcttatggtcaaatctcctcgggaatgactgtagatcctcaggttctctcttcctccagaaacattggagtttccctatcacctctccggagaacactaatcggcgccggagttaggtctactagtatctctctccgtcaatgttctctctccgttagatcgattaaaatctccgaagatagccgcaaacctaaagcttatgcagagaacggtgcttttgatgtggtgagtgaattcgtctctttttcttctttccccttaattgctaatttttgttttcgtgttagtcacgttctgtttgattctctttatagaaaatgtcttattaggattcaatctgatttgttactattttgaatttggggtttattgtgtatagggagttttggattcttcatcatatagattggctgattcaagaacaagtagtaatgattcaaggaggaagactaagattgtgtgtacgattggaccgtcttcgagttctagggaaatgatttggaaactcgcggaagctggaatgaatgtggctcgtttgaatatgtctcatggtgatcatgcttctcatcagataactattgatttagttaaggagtataattctttgtttgttgacaaagctattgctattatgttggatacaaaggtatgctctttttgtctcttgtgatggaattgttatgaaagttttgagttttaatgtatttgtgtggtattgttttgtgaagggtcctgaggttcgaagcggggatgtaccgcagccgatatttcttgaagagggtcaagagtttaactttactatcaagagaggtgtttcgcttaaagacactgttagtgtaaattatgatgattttgtgaacgatgttgaagttggggatatacttttggtggatggtaagagtacttgtatctttgtggtttgttggagtctttgttttagttcattttgtaatgagagatggcttcttgtgttttttatattaggtggaatgatgtcgttagctgttaaatcaaagacgagtgatttggtgaagtgtgtggttattgatggtggagagcttcaatctagacgtcacttgaatgttcgaggaaagagtgcgactcttccatccattacaggttgataccagctgatgtttttccaatatcttgcatcaaggagcttttctaataaaatgtttttgagtggttatattctggttttaactccacgcagacaaagattgggaagacataaaatttggagtggacaaccaagtcgatttctacgccgtctcctttgttaaggatgctaaagttgtccatgagttgaagaactatctcaaaagtaagcctggtcccttttcttcactctcctattatctttggtgaaatttctgtgaaactaatagaagatttccaaaaacatttatagcctgcagtgcagacatatcggtgattgtgaaaattgaaagtgcagactctataaagaatcttccttctatcatatctgcttgtgatggggttggtttcaaagtcttttctgtcagagtttatatgttgatacttagcgcagagccttagcttatataattatcaatgctttttcaggcaatggttgctcgtggagatcttggagctgaacttcccattgaagaggtcccgttgttacaggtaaatccaagacttggtttctgaaacattactttagactctgttggtatttatgcatttgctattgtgtcttaattttaggaagaaataatcagaaggtgtagaagcattcataaaccagtgattgttgccacaaacatgctagagagtatgattaatcatccaacgcctacaagagctgaagtctctgacattgcaattgcagtacgtgaaggcgcagatgctatcatgctttctggtgaaaccgcacatggaaagttcgtatttctaattaaagccttaccttttgacgtcaatataacttaccatgtcatgtgatcttgaatgttctttggttttaattctcggatgtcaggtttccgctgaaagctgttaacgtaatgcatactgtggcgttgagaaccgaggcaagtctacctgtcagaacctcggcatcccgtaccactgcttacaaggtactcacacattcctcatatcagaaatattatatatgatatgttaggcaaatgtgaatgtgttaataatgatatttttgttacagggtcacatgggccaaatgtttgcttttcatgcttctataatggcaaatacactgagctcaccgctaattgtatttacgagaaccggatccatggcagtgcttctaagccactaccgcccatctgcaacaattttcgccttcacaaaccagtaagtgtttgttcatctgtcaatcaggaaatgtcctatgtatgcaacttttaatcgatgaaatgggttttgatcgatcttttggtttatttcctttaggagaagaataatgcaaaggcttgctctttatcaaggtgtcatgcctatatatatggagttctcggatgatgcagaagatacatatgcccggtctctcaaactcttacaggtacgttaaccatgtaccttctcatctatcaaacattacattttcggcagttttgcttacacttaacttatacatcactcaggacgagaatatgctcaaggaaggacaacatgtaactcttgtccaaagtggctcgcaacccatttggcgtgaagaatcaacacatctcatacaagtccgtaagataaagataggtggatgatgtttttacttcttgagctacacaacatcttgcttttactcagctttctttctcttacacagttcgatccatatttttttgaatcactcacagtgaatcaaacaaccatataaaattttaagttattgaagctttttttctggttatagtttagtacctaaatgtttgatatgtcatggaggatttctgtctatctcatctgattacttattggtaagagtaacccatataacacattacagttaagtctttagagcttaggagtttaaagaagaagtcttttcgacgaaaaagactgatccgatttagccttttatttatgaatcagtttgctgttacatcaccggaaaactgaaaaccaaacacacatttgttagactttagaatccttctctcgttcctcttcactctcggtgtcatagtcatcatcactcatgtcttgcatctcatcttttccttctagttgtataggtttgtaccattttgcacatgcaatgtataccaccaggtcaatgctcgtcaacgcagccaggaggaaatagaatctgtctaagtgacctttgttgagattccttggaatccaaccaggcatgtgatcctctgttgagatcttcaccaccattgttaccaacaagctactaacaaagttccccattgacattgacatcatacacagagcgctcccgaagctctttagtccgtctggtgtttgcgcgttgaagaactcaagctgacccacgtacatgaacacttctgatgccccgatgagtgagtattgtggagcctgcaaagagtagaagagtgtcaatactcggaagtttcttttgtaagttgttgattttaggaccaaagtgagttttaaggtctgtgttcattacctgccagaagatgcttaaggagcttgagccatcacagtgagtacaactcttgtctgcatacttaagcctatagcattccacaatcccggctgcaatcatagctatgacagcaatcacaagtccgattcccatcctgtgaagctcggtgattccttttgatccattctttttgaatctgttggctactggctcgagaactctgcggtacaggaatatgaacaaagcgacgctaaggatgtcgaagctggacatacttgccggggggattttgaaatctgagacagaggtattcattgcagcgccttgctccacaaagagagaggccatttgagtgaagacgactgagtagattatagtgcagagccaaattggcatcagtctaagaatacacttgacttcctcgacttgtgtcactggacagagcctccatgggttcactgagtcttgtttcttgtcatctagatctctagctgtgatgtacgctgctttgtccaagaacctgaaattccaaaaggaacatgttagaacacttcatggcattgaagtatatggtgaaactgcaatttttggtgacttacttgaattcatcggtatgcactatccttctccctgtgttaactgaagcatttttcccttcgctgtctccgtcatacatctcctctctccctcttaatggtgcctccaccgatgatttcttcgttgcagcgaccaaaacttggcaaaacctcgaaagaggattccccgtgggcttgaaatatcggtatctcggtgttccaacaaggaaaagaatcaacccaatgatagcagagccagtggatgcccaaaacccgagtgcccacattccctcatcctcaaaataccccaagatggtgttcgaaaagagcgatccgaggtttaaagcaaggtaaaagtagctgaaaaacgcaatcttcgagtacccttctttaggatgctcctcatcgaactgatccgctccaagcgttgcaatgtttggttggtaaccgccatatcccaatgcgatcaagtagatcgagaagtagaacattgtgatctccatcatggaatgtgaaccacaaggcgtgacttcgtccccacaacctcttggtctaatcaagaacatgtatgatgatagcgatagcgatgaaagtccctgcgttttcacatccaaaaaagcgttcttatgagcttaaaacgttccaacttaaaaaagatgaatcacattttgatagttgctattacttacaatgacaaaaatgacttggaagatagcacaagtcttgtaacgaccccaatacgaatcgctgagaaacgctccaaccaatgagaagatataaacagtccctgtccatttgctaacgttgttagctgcgtctgcgttgttctgctgcaaaacgcgagttaggaagagcaccaagttcactccaactccaaagaaggctagtgtagccagcccctggttcactgttaaccggaaaattagattagaacccggtttagagagagttaaccaaattattattgatttgaaagaaaccagaatagatgaaagaattgaatgaatgattgttaataattgttccgtgttcgtcaagatgatgttaacatttctttggttggattgtatttaatgactacttcattattgttccaccttctaacgaaatcaaataaaaaaatgataatgaaatctacaaataactacaattttagcaaattaaattcttcatgcgaaatacaaatcgttaactaataataattattaaaactattacgtggactctactaataaatcatcaaaccaaaaagaaaacccactagaatctcttaaattgtactttgtataaaaataaatgctttgtgtaatattcttaaaatataatttaatagtaacataattttgtaaagcaaaatttgaaaatgttaggagaaaaatgtgaagaagtggacgtggcaaaagccaacgtcatgggacgacgagatgggtaattacgtgtaaggcaacgtaattccactaacacatgctttccttgcacttattttaatttattagtgtcgactttctcaaaataactttttttcctttttttggttaaattccataaaagtatctttaaaaaacctaaatatctatctccatatatagaatcacttacaaatctgaatgttttcactttcagttattttctaaatgacaaactagatccattaattttaacaaaaacactcaatcattcagatctcttacatcacattagttgcgtttgaattattagtattttgttttttggagaaaatgattgaaaagtacacatatgtttattatataataactatttttcatcataagtattctttttgctttacataagtactataattgttgggatccctataattaataaataaaaaatagcaagaatttatgggaaatttactagataagtctggaaattcattaatgatgcgtccgttatacaacaaaaaattatatgcatttgtcatgtggttggggtttttctaccaaaacatgcagcgtacgttcgaacacatggatatgtcttgacacgttcacgtaaaattcgaagttaattctagttattaatgttggttctattgtcactttcctagtttctgataacttattacctcaaagataagtatgcatatcaatcaatctacacacttttagatatacatcatatcggtatctagtttttttcccttgtcagttcaattcatacgtttttttgtcgggatatatatctcaatttatacgctacacataattttatatacaaaataatgtaaacatgtgtgtagaaatatacaaatcatgtattaagccatactaatgatttgaatccatgaattatatagggaccggcactgaatataccttatgcaaagatgctatgagtttgcatgtggtatctttgagaaaaggacgtgaagaacaaaataaaataaaataaaagattctatgttttaaggtgtcgatcatatattttcctccgctttggtttatattctagagttgatttcttagcaaaactatatatttatttcaatttgatatatagttaaattgtaattttgattagggaagagagacatacgaagaatgacgatgccagcaacccattggcctgagttagaacgaatagagggacgaccatagtaatccactgtcccatctcttgtttcttcttctccttctttcttcttcatcgtctgcattttcatttagttaaatttaattaactgatacacacacatcaatttatctataaatatatagaaagatgctttatatgcctaattatctactagtctctacaaccttttgtgctcttgatatggagaagattcatgagttcgatagttttgtattttccggaacttaaccaaaaactaaaaacgttttttttttttaactcttactttttgtattggcacgtaattctcgtttcgtatacacaattttcaagatcatttggaatcattctcaactttcaatgacagcactaaacggaaaaatacttacatctatatatttaaattaagaagattagatataatagagctaattaattaaaaagtatggtgtattaaaaagaaatttgaagaaaaagaaaagatgttgagctaagtttttgcacataaagatcgtgactttccattgcactaagcatgtccttttgatcatgctcttcttgagccaccaaaagcttagaaagtttttactataacaatgagtaacttaaaaagaaaatatttccttttgtagtcacatatgaaattcaagaaacaagagccttaatcagataatcaaaatcttataaggaagaaaagcaaaggtccattacttcaaactctgattaatatatcaaagaaaataaagaaacaattgaagggacaagcttaaatattacttacgtctttgttataaatctctaggcaagacattttgcgatgatatatgattatatgtatgtgagttttggcaagagagtgataacgaaatttctctttagttttggtgttttttttctttcttcttttcgtaagtgatatgagagaattaaaacaaaggacgaagaaggaagaagcagaaagcaagttcaagcttgggtgttgtagagaagagaatgttgagaataaatagaagtttggaagatgatttgaacggttctgattttacatgggacactcacatgcccaatatctatttttaattgttttgtttctgaaaaaatactttagcacgatgaaaaaaaaagctcaaaagcacaattttaattatttaggaaatcaatatttgcattttccacccaataattttgttttctctggcgctgaaaggcttcttgtgctttcgaaacttggggatgtggctgaggctgatggtcggaggatatttatttatttattttcgtagcaaaacttaaacgtttggtagaaatagatttaattaatgattctataaatttcactacaacggaaaatcccaaaatatttgttgttagaaaaaagaggtaccacattaaattaaataagtacgtatagactgaaaaaattgaaggttcgaataatttcttatatccaatttagatttcaaattctaaaagaaaaaagaatatctttctattcctgaagttacattatattttatgttgaacactcgtgatcacacatgtatactattaattgggaagcattgtgtgaactacaacattgtaagggtagtttaaaactaactaaatgaatatttttgcatgggtaatttagtaaattaacaactactccaactaaataaatatcttcaatttttcttttttaaaaaatgatttaaatcaataaattaagaaaatttttggattttagatttgtaattatctagaaaatggtttcagtatatatttaatattttaattagaatttaaatgatataaacgtttaaagtactttttttttaaaacaagtaattttcattattttaaaaatatatcactaagctaaatttgaattatataaaagaaaatatatttttaaacgtattataatagttacaagcttttgaaatattcattatactagattaaattatttatttatttttaaatagtaaaacaaagtttaaataccaatatttaaaaattttaatgcaaatattcaaaatgagaaccatcactaatatgatttttttggcagatcattaattgtattcgaacaataatgactaccatatttgcgataatgtataaggataagtttaatttaaaaacataccaaaatcgttgagatctaattttagctttaaaaaaaaatattttcgttatcctaaatttaaaatatgtaattcagattagtttttttccagtaaagctaaaattgaatccaaattaaaatctaattttatgtacaatctatctcttataaatgttatgcatacattcatattgcctcacaatcaatctagaatattgattccttaaaaaaatagatagagattcatatgtaaattacttcatgttctaatgatatttatctcctaattttactatccatttatgcgtatgcttatagatttttctttcagggtcaacattagattacaaaaaactagccgggtgttggtcaatattatacaacagataaaattatggaattaacaatcaaaatatagttatacaatctgaaacaataaacaaaacaaatataacttaatttatgttttaattttaactaaaatcaacaaatttatcagtttattaaaaataaaataaaaattagcttgtggtaccctacgtgtaaatcactacgatttcatgaggttgcaatatcaatttatacaaattttgacttttaaaatatactttatataattattgaaaggtatacattaaatatcggttttatatacttcaatatcataaatttataaatcacaaattatttttaaatatattaatccaagatctaccacaggtcaatcccttgatttttaatatattacaataagaatatttaaaataataaaaatattatttaattttacgaaatgaagttatctggtggaacgagtttgggttgatactcatacgggatgataatctacgagtgtaatcttagaattaacaattttaacacaattatacaatcttaaacactaaacaaaagaaacaatatttacaaaacaactataacttaaaattcgaatttttagttacaaaaaaatcgaacaacggtgtaccgcggagtaaagtttacattatatcatctaattgatcaaatttcaaacaaaatcaattaatttgtatatacatcaaactaacaaaaatacacagattttccaaatatctctatattattccgcaaatagaaacaaatctaacattcgatttactatgcaaaacacaaatgaaatataaataatataaattaataaaaaatttagttattgtatcataaataacactatacaatttttctatgcatattataatttacacactacaatatctttcactaaaaatatattccaatacattttttaaaatataaaacccgcacatatgcggggtcagaatctagtttatgttaaattagaacgtttatttatttttattgttttgaacacagaacatatatttatttaaatgataaatcccatgattaaaaacaactaactttttattattagaaaactatagcataacagacagtttaaaaacagaactatttatgtcatagtggcgtggcttaaattttaagttcatttgtaaaacaatagttgcatttggtaacacacaccttgtttctggaaacgcatagttttcatttcgagagaggacattattaaactcttaatatttttgggcaaaggcatatatataaaccattactatacttataaattacagcactaccagttcttcatcactcaaacttaaaatcatattactaattgtaaagaatctctatcatttttgtaaaagttaattttcaaaacacaaatgtataacaagctaggtcatgactagaatatcacaaggacgataatatacaaatatatatatgatcagtggttttttgggatcaacatgtagagatttctaccgacaatatatcgtctatgtacaacctaactaaacgcaagcatgccttcaactttctatactttctctttgtttaattcatgtctctggtgaatatatatatatatatatatatatatatatattttttttttttttgttcaaatgaattttgttctgttaatgttactttaaatcaatgacgttgacattactttctcttccttttttcctttcctaagatttcgatttttcagcttttgttttcaattttccctagtgtggaccagaaaaacgaaatatcaaaatcattaagaattaatatcgaattgaaaacagacaaaaaaacagacttgaacaggatggtacatatgcatttatacgtgtaaattctgcaaccaagtagtttttcaattatttagttatcagtgtcttggttcttaaatatgcgagtcgatcgacatttacttttttatttagtacattgcacaaaaaaagaaatgaaaagagagtttcactttcaccacaactattctatgactttcgtttattcaaaacaagtaaaatactagtacatgattatgagttaagcaagccggtaaaaaatataatcgactagtaatcgacatgagtgaccagtcagtaaccttttagttgataaattaggtcgtttagacattaattaactagtaaatattcgattagccagtgaattagtttactgctttatagaactactatatatttttgttttgatcaaatagaactactatattataaatgggcatttcgttgggggaaaaagattcccaagattttttttccttaaacagaatttctgttagatttatacaaaaattccaaacaatacaaagtataactaaattgagtaaacaatatttagtgggttcttaacatgccgagcttaagggttacagataccaaaaacactgttttcaatttttaattcgtataaaataagtttctaataaatacgcttcgaaattcattttcgttttgattatatagatggtgaaatcaatttcagggtagtttttattgccattgatcagatttgtggggaaaaagagtgtatggatccacataaagacacatactacaaaaagattataggtgcatgttcttggtcgaaatgatagagttagacaatgacatttgatttctaaaaattatgtttttaacttttaaaagaagccaaatggaaaatgtgtcatgttactatgatcagttgatcttacctatcataggaaaaaataaaggaagttctttaaaagcaatcatcttctccattacaattgtggaataaaatgagcactgtttgggaacacacacaaaaaattccatgtaaagttttttttttttttttttcttttttaactttaatattccatgtaaagttaattatgcccattgttttttgttttccatatagtattgtaagtttttttaaatatatattgtaatttagtttcattggactttggggtatttaaaagtattcttcactagaatgatacgtaattaacaaaatttgaaaaaagtataactctaaagcgatcgagttatttttagactcaaacgccaactttaaactacaatggttaaaagaaaactataaatggaaacgcactaaaagtggttccaaaccgccaccaagtttttctaaaaatattggataattttagggttaatctatactagctagttttatattagtgctaaaattcgaaatttaccaaatatttgatattctgagcactttcaaaatctaaagatgttgattagataataattaatttgaaatcaattttactgtcattgtttgttttatggaggatgatatgtttccggtcaaaaacttgtcatgcttcttatcggaagagaagtatacgtcaacacctcataatttctaagtttaagaaaccattaacgatgatatgcacatatatttgcaggtgaaagtgaaacctttcatatcgaaactaatcaactagttaaattatggagtaatcaagtacaagagaactgtacaaaacattaaatgacgataaacagccaaaatcaatttcatctatttctatggggtattctttttatccacactcctactttatacatttgtttatccgaaccaaagcaatttttacataacaaacctaaactatgtaactgctagataatttcgacattattattattaaataatctaataaacttgaactgtataatcgttagccaattaaataaaaataataacaaatacaaaaagctctattaaattggctaatagttatatagtttaaatttgttatttaaaaattatataaatttaagctaaaaaatacaaaaaattataatttaaattgaaaaaatggcatgaaaataattaaggtcgattttaacagcatatgtacaaactgaaaagcaattgctcgtattacgtccacccacttacttatcaaatttttctctcttacgtaaccaaatcacctttttggtttttaaataaaacaacatccattcaaaaaaatctgcttttgataagaaaaaataataaattaaagctgtagagaatcaagaacaaatcacttatcatgaggctttaccaatgtccccatatgcacaatagagcaattaattgataaaaatgttcttacaaaacttaatataaatatgtaaaaagtccgcatgagctcgagttggatcccacttcacttgtttgtgtatatagctattggtttattttgttttatttttattttattttattaagacatcaacatccataccagattaattttaaaaactaatttatttttagaagaagaagataataggttaacaaattgtggtgaaattcggtcataatcactctatttgcctctgaaggagacaataacctgaattagcacattgcttagctccactttaaatttatttcattggtccaagtcatatatattcacagctcataatagagctgggtagatttcattttttttttctatcgtgtgagtgctttttaaataatgttttctcgcttgatttcattcttaatgcctaagttcggttcacttgtttgtaacaaactaggtgattatgttgcttttatttatttatttgagattatgttgcttttttctttcttttttattaccaatgttttcaaattaaaccacaccagagaggaagttaaaccatacaggtttatgagttatagagagtagatgcgatggtgcaaaatattggtttaagtaccattttgattattttctacagttaaatatttgattttgttagaactatttgttccgcatataaatttggaagatttgtgtactagtatatgagtgtgtgacaatcctacacttttgagataacttttggatatgagatcaactcacacttattagtagatttgattgcatataacatcaagatgcacatgtttcaaaatatttcaagcaatatttttgtagttaaatcatattaatgtatagatattctatgacggataaataatcttaagaatgaatttcaatgcacgtacaaaaaaaattcatgttgaaaaataactcgtataatgcatgtcgagtagctttggagctttctagagtaaaatatcgtcttggaaacaaaacgaaaactacaaactaattgtaaatgaaaaatgtggatggttcatagacaaaaacactaaagaacgcacacaaaaaaaaatacttctcctttcaaagttaatataataatggcatgagaatgtatccatcggataccgccaagaagattaactgagtcaagttctcaataaatatatctatacgaggaaaaaattgtgatagaaattttaatttgaaagcataatgattgtataaaagataggacaatagtgaattttgggccaatagaaaccctagaaataaaaaaggacacagtcccgtccactatatatacttactccatcatccacaaagcctcaggtccacacatactgttcattgtgtgataaattacatcatcggcttcacttatcactatagtggactgtggactaaaaattaagaattggactagattaggttacaaacagacggaactggtctaatctacagataattgaaccctaagccatacgagaatttgctgttttattcatttatttataaacttaaattaaatgacgctattatactttcgtaacaacgagcaaaacgacgtggtaagggtacaatataacttttaaagagattgtttgtagatccatagatttggtgtggccaaaattgtttggttcagacaaataatagacggtgcaagctgattaagatagatttggaagatttcaattatactaaagactagaagacacgaaaggtcttcttttcatgtatattccttttcttttttagttagtttaatcaaagactccatcctcaatattttgtgagccttcattttcatcataaaaaatacatagcaatttatcaaatttggcatggtatcaaagcttccttttgatctgagattgctcgattagtttttattcaacccaaaattcaaattgttaaagaaaatgttaatccatactttcaaaaccttttttttccttttgatgaagatcattaaaacttattagtctgtaagtttaatacattcatcaatattagaataatgttaaatatctataatgtatatatgtatgactaattatccactaacaaatcattagaatccagagcttaggatgtgtgtgactcaaacagattaatcatatttaaggaaacaattaattgtttatcttgtatagatatgattacgttttactattaatgacatttgttcatcattacgtattacgttatcgactatagtattttggaaaataattaaaatagaaagcaaatcatgacctaattcttccatattacaatgcttttttgtttcaattttagagttctcgttgttttcaattagtacacttggctcttttgtctacgccactagacactagttttacttttcacatttaaataaattacgtactaatcattagccaagttttcaacttatgcatatgcaacatccattatcttataaccgtagattattttatatagtaactttagtttatcaaacttttgcctcgccaaaatttggtaagtttgcaccacttataatatttttgtgttattttatcaatccatatatatgtagcgtgacatgtctcgttgcggtcgacaactattgatgagctgtatataaagttcataaataatactagtaattcattggtctgtataatcgcaattatggctctttaatgacaccattgggaaatagattatccttctttaaatgtctaaaatgactcttcacgtacggctctattcatcttaatggttaatgaaaggtcatttacttttcaaatgataggtttattggttcaccaagcacggaaccggtagttttaagtcaaatttccaaatctggtacgttcaaccaattgcatacggctgtcaaactattttgttttggataaactaattatccactcaaatcataagagtttacttttactaagagaggatacaattaatatagttacaagaagccaaacaatccaagacatcaaccaatatattggtcgagtaaattaatggtaaagctaaaaaaacaacaacaatactcaaatagagacttttggataaagatgaactcacaattcatccaaattaaaatagcatacaaaacaagtgaaatcgataaaaaaaaaaacaacgtctttagcttggtagtcctagtggaaaccaaaatagaaggaaataaagcctccaagatcgttaaggccaaacatttagcatcaataattgttgaacgataaatgattggcatcctcgcttctgttccaagcagaatagccttaaacaaaatgttccacttaacaataataagcccgtaaaggagaatttcagaaccatgaaaatccaaacaaacgagactaagggtgcaaataaacatataactaagttgtattattttaaaaatgctttcgattttaggttgttataaactataattatcgtaaattaaattaattaatttggtacaggtctaaataatattatgttatagttcaatatcatatatatgattattttcatgtatatatattagttaaaaagacataaactctgcataacatttaattcattattcggttctatatgtttcaattgcactaaattcagttgtgatcttgtttgtttggaataaaagacaatgagtcaatcagattgtaaacaaattaacttggatactgtttgggtcgattcaactcttaagatcagccacgagttagtacttagtaggctacttgtcaacttggcttgtgtgtatgtggttgttattaagtacggccatgcaatcgcagttttcaattcttataattttcctttaaagcttttcaaatagataggatttttagtgacattctgaaacattgttgtcaatgtcgtcttattgtaaattcttgcctatttttggttggtctctcgaaagtatgtctattactgttcatgttattcattgttctttgtacaaatgtgatgtcattttgcataaaacctcgcattctcatattaattacttttaaattaaaacaagttaaagtgaagacaaatagaaatttaggtcttgatttgacagcaaacctttaaagctattactggtaacatcgaatctggaaatatgtggagtaaaacgtacgtattgataataaaaatcctttaatttaagttgattctatagaaaaaatcgtctattcgataatttattctgtagtggctagctaactgctataaatctcaatgctaaaacaaaattatgtgtatttcaatgttttctttcgcactgtgttctatagtacttatgtaacatatttgctaaaaacatttacgtatatgatattactgatgacttacctagttatatataatctataattctacgaatgatcaaccaaaatcagaacgtttttttttttttgtaagcacatcaatattcattaggcatttgaaattctgcatattctagagtttaaactttatctctgacatcatttttttttggagcaaatatcgctgacataacgaagttcatgatctcttagccaacgccaaaaacacttcttagtgttccaatttataacaatactcataattaggatcgttttagcattatcctttagattccgtatctcatatttaatatccaaaagcatatttaagattgatttgtttttaggtagaaacaaaaaaaaatgatttaacaagcataatttggcttagaagtgagaggaaatctatattttctagactccatgtttcatcaagcactaaacttgcgagtctttaatatatactgtatcctttctatatttgtatgttttgtattataattaattatttttatcatcagtcgacactcaaactaatctcaataatctaaaaaaaaaactgaatatattgtccatttaacgcatataaaataatcaattatgattgaacttgctagggaaacactcgaattctagctcttcaacttccagaatagacccttcaaccaaggtatcaaaattatagcaaattatttttgacttgttaataaatatttagtggccattccaaccaagtagtgtgtattgtggtctaatggttctgagagtgagagtaggtcacttgttctattccatttaggataagtgatttacgtcttaaacgtagtattattatctacagttggccatgaacaccagaagaaattatgggacaaaggttcaaactcctatacacagtttatattaaaaaaaaaagaaaaaaaaaagtgaatggcttatgtaatcaacaatacgtggatatagaattatatttctccaatacaatgcacactataagaaactatattaccataagaaacaaaaaaaagcactataagatgtcatatattacttgataaggaatcgtaatcgatgcaactttacgttaatatatatgtatgcgtacactattatatactatatgcgacgagctgtttaccaaaaacccgttagtggcttttgattcgcttatgtaagctcatacatcaatggggttcgtccttactttagcacgttacaaatattgattagattatgtcttctttcctaatttatcaaatatgtcctcaaacgtggatgtagaacaaaaagtgtcttcattgttcgtgagaaaactcgaaaatatagtcaggactcaggatcattcatgagtaagaagattcaggattagaaatttagaatagcgaagaagtgaacctcgctcaagaagtttttatcctctaaagggttaggatatgttcaagttttcaccgatattcatactccatcctcttgagtcttgatacccgatcactctgggttcttacaaaacaaaaattggcgggagcaaaaagtcacaaatgctagctaagattttctaggaagcattttctatataatagctagaatctctatattcagttgcagcaaaaaaaatctgtatattggatcgagttttaaattcattcatttttttttgttctttttttcaattcgtgtctgtcaatttacattttctattttcctcaagttcgagcagacaaatcacttacgagatcatttttgagagaactttgcaagtttgctacgtcacgcaacgcaacaaagatgcaaaacctaacaatgtagttaatttataagagttttatcattttgttagacccgtggactatataattataaatgtaatagcttgtatagatctaaatcggtattatattgatatatgggtttgtaaaaaatgtatttagataaatctttcttatgccctcagtgagtttatataatattaagaaatatgacacgagaaaaatatgtattttgtacggtactaattatccattttactaccatactaaaattaaaacaaaaatatatactgtttagttggaaattaaaacagtgtgacccgaattctcatgttcccccttaatctaaattaaaacaaatcatttcaaagttgaagatgttatctatatattttgtcgtgtgaaacagctaataatttttttttggtagaaagacacagttattaatgatatatgaacttccacgttttatttagaaaataaaattgtccataaaacaaatatagataataacataaaatgcaattcaaattagaatttttataatttatggccacaacaagataatttcagccaattcgataatattttatttttattcaactgttacgtgatatgtgatttattctaacaatatattaattttttaactgaaattttggaatgcatttatttacatatacatttttacagccaatttgtgaaataaatcatgtagttgagacttatttacaatgggtgccactggattttaatgtttatttttgataattagaaagaaaatcttcaaattaaatatttgttatttaacaatcttcccaaaatctctctacattaactacacgattagttactaaaataaaaattccaaaatatttaatatcattttaatcactacaaaattatcatttttgatattgcttttttgcataactataacaattcgattataatcatcaaaccgcagagatatttgatagcatttaattagtacaaaattacaaaatatttagacaatgattcataaatttatcataaataagatcaattttaataaaataaatgatttttttttacgacacgagttggtggaacgggtttggcagaacgttacttaataacaattgtaaactataaaatatatagatacaatttgcaaacttttatatatgctaaattttaaaaataaattgttctcacgatatactgcgggttaaaatctagtattatatctatatgcttaatctatcatcatgtgatctatattggattattatttggaacgttaaatattggtatatctaagtatggtgatacaaaacaaatatatttttacatatgtattcagaaaataagacgttacattttcgaccacattcttatatgtacttatgtagcattttatcattttttaattgaagcacttgctatttatctaaatacaccgtcactttttattatgggacttcgtctcacagttccttagcaaatcacctggaggacatccgtttttgggcgaataaattggcaagcattcagtttggttttattagaagaaagagaaacaaattagcacatgtcttagcgaaatatgattgtacctattcttatttttattttggttctggttctttacctatttggcttgatcgatacttttgtaatgactctaattgattaatataattattttgacgtaaaaaaaaaatcaaaggccgctttgtgcacaactaaggaaagcttgggctttaaggctacatacatagtttaaaggccctatagacgacatatgctttaaagttcaaaccaactaattaatcaaatgtctattttcacacacaaaaaaaaaataactaatcaatcaaatgcacattaattttttcttttattattatattaattttcgtttaaatggacaaatacaatgataggtttacacggtcaaacgacccataaaatggaaaaaaccctaatcaacatatataagaaatctgaaaagggtgatattcggcagcaccgacaccaattccaaatttggcgataacaagaggtttttcgttgctactccaatccgactcgagcgacatgactagagttattgattcccatcacaaacccaaagccatggagtatcatcaatgatctctaggttttgttggacttctatggtattccaatatttggtcttatagtggcctacacattgttggtatcagatcccgcatcacgggttcgggacctaccaaagattgccatgtaggtaggagaggcccaaaggaggaagggcccacggtcttcgctgagcgaggaggagaatacgagcgaagtggtcacaccgcgaggtggatgtgacgacgagatcaaagttgttcggattgaagagccaagtgggccggaagataaggttcagggagcccggagtcaattcaaatttgaacgtttgaatagttaattcgaaaactaaaaaggatacatttaagatggaataattgtgtgtaaatgagaattaaatgtattccttgagtataaattatgggtcaaaggtcatgtaaagacacacgcatttttgggcaaacatactatacacattttcttacaaaactcatagttttctctataatcattaattcatttttctcatacatttgtcatcaagaataatccttctcactaaataaataaatacttgagtgtgtgaatccgacatccacagacatattggccggaagaaattgctctcaactttcgatgagttaaatgaccacggtcttcatcataaccttgcataggcgtgtgtagaaacgatgggaaagtatatccatatttttttagttattttagtttaactttcacattaatttagagcatgttttgaaattgtaaaaacaacgaactaagaaaaactgtttatatctctagttttgttatcgtagcttttatggtcaccaccgaaactatcatgaccattatagttcccactggctattaccatgactagtttaaccgccagattttatctggccaccactaaaactacaacgactagttttctgattgtagctctcttaacgtctaccgagactagtttgaccaccatagtatccttggccattaccaaaactaatattatcgttataatatgcatatgtaaaacagtttatgaatgatgtgatcaatagttgtgtaaagattgtacaattgttcttacaatgcatattagttgtgacttagaatacataattttatatgtatttatctcaaatccttatatatagattcaactgcctcccataaccggtctcaactatctgctaaaattactctcataatttttttaattgcatttacttcttttttttattgcatttacttttaactaatcgttttgaatcttttacaaaataaaatcattttgcaaaaatctaattcaaaagcaaaactcaaacgatctaatgcgacctaacgaagaactcaagaaattataattcactgcttacttactctgattagcatttaatatatatatatatatatatatataaatatttaattaatgttataaatcataggtgatttgatttgctgcaaagaaaaacaaattaataaaaaatgacttgtggaaacgagagagagagtgtttctcatgatttcaaatgaaacgtatataagcataattgagtaaaaactaccaatgtagattctctactaatatgggtaagttttctccaaacgaatgtattttgacaaatgttaattcaaataatctgcggataataaagaagaaaacaaaatatggtagttcattagtttttgatatcgtttcacccgagaaccgagaaaggtaaaagtttgctctcaagtctgttttttaacagaaaattataatgataagtgattaattagtagaactcgttctgtaatttttttaccgtcccgtgattttttttaaaaatagtaattttaacatttaagaataattttttatatagaaaagctttgcaaattgtatcattctctaatacatttatatctatagtttaattttatatatagtaatattatacataccacataacatttttggttttatataatcttttctaaattaggatgatttgatatgtttaatattagtggtcttaaaaaataataaattaaagatttaacccgtattgaaacggtggattaattatattttacttttttattaatgttgattcaaaaacccgtccctccaaatctgtcttgccaaaaagctatttattttgttaatattaattttattaatattaaatttattaatgatatcactctgaattagaatctaaacattttagctaataacataggagtgcaccatatttatttaataggaaaatgtaccatatgacccgaatgcacttttatccaaatccaccaaaaaagtcttgcaaaaatactatagaaataagaaacgatagtcggttttgataggtataagattaacaaatatattagttagcttaaattagttaaagaatataaattgaaaatgtatattacactttatttgaatatagtatcaaaacttatataacacagagatttgataattttttaattgatgaatactttttttgtgctaatttttatgtgattaagatttaattgatttcgtatataaaatattaaattgacttatttgtttataatttggtaacagatagatatttgaatattcaatatattttgcttcagtttaaaaaatctttgatgatccgtctttagatccaataagccctataatctagatattaacctgcagtatatattttagttaaactaaaatttttttattgtaaagatgatttaaaaatatttgatattattttatttgattttaaatatatagtaaactgtgagttgtatatgttttgttgatattatctatattgtttagtgtttaagattatacacttgtagtttgtttgttaatttaagagtttcacctgtagtataccattttgtatcaatatcgatctaaacatgcaattctaggattttcaacttgtatcaaaaattgaatcacatctaatatgttattaattattgtagtatataagattataaattttcaatataatatgtatgaaattgaatataaatatttcaaattatgactcgttactcagtagaaagttttcttaaatctagtttttacccgttataatatttttgtatgtattgaacagtttatatttgtttttaaaaattcaaattatggcatatgggaaaaaactctaattatttttttataatgatgatattatttttccgcaaaaatagaatcatataaagatgagaagtgaactataataattaataaaaaaattaatatgataatttagatatcaaatataatttgttgattttaattggttaattttttggaaattaataatgtatttcgtttttctaattaaattaaattaattaaaatttagatatcaaatcttatatgttgattttgattggttattatttttggaaattaataatgtatttcgttttttaattaaatttaattaattaaaattagtatttgactttttaatccttaaaaatataaattaatttactctttaaaattttatttctaatggcatacctatgtaattacttacaaacattaaggttatatttaaaatgtacttcccaaataatatagtaggatcatagatagaaaagaaccttcttcgcagacaaatttattgaaaagtaatattaaaaaaaaataacaactttattaccaaaacaatcttttcatatcgcaaattaggaaagttggaccatacagatgtcatgtatcaacatgtaaaatggagagcaaataaaatgacactacacatcctatttttacattctaaatatatttgttcactattaagttctattttgtttttaacactacacaacttttatttcagtttcatttttctcatacttttgaacatgttttgcacttatcataatcaaatttatatcaccactgttaaaaaatataaaatagattggggtctttttaggcacagtattagatttggtggatgatacgctaattaaacggattagacggctatcaaatggggttataccgattgaaatatgtctaagatcttttagtttattttaaatagttcaaactgtatttttgttttcttaaaaaaaactttcatatatcatttacttcaaagtgtttcaattattattcaattgtatataaatataaaaattttatttaaaaattttgttttgagattagatttttaggcgttaggctgccaaaaacaccgatactattaaccgattcactaagattacgatgtgtaaatgctaaatataagagaagataaaggacctagttgtcaataaaaagcaccacttgctaattgaagatcattgtctacgtgtgaacgagctggcaaagaatattaaacccctttttggtcaaataaaaaaacgtgtaaacataaatcttttggtaataaaaatcaaaaccaaaatattatccaatttgtctccatccttccgttttttttttccattaccgtacgccgaagaatctgccccaaggtaccgatttctcttcttcctctgattttccgatttcttctctgtttataatcgaatccgaaattttaggttttttttccgtgggaaaatctcgagagaatatgttcggagagaaagaaaaaacacttcgatttggttttaaatcaattggataaggataattaatttaggtttatggctctgattcccgataaaatcgcatgatgaattttttttacaaaaagatcgagaaactgcgttgactttgggtgctaattttgagaatttagggtttgggtttgtttaaaaattagtgtttgattcgtttaattatttgtatgaattgtaaagttttaattttttttactgggttccatggattggtctagattttgcttttttttatttattgtagtgttggttggagaattttgattttttttaatgatgaattggttttgtttgcaatgtgaatatgattaagatttggattagaatggatatggtattgaaaacgtagtgaaatgtaattgtgttttgggtttgttccttgtggtctaaaaatatgcagaagtttaaaggtattgatggaacaaccgaggaacaacaagacctctcaagaacaagctcgtgaatcgctcatcgaaatctcctacacttcacccgaggaagacgaggttataacctactcagatgtgaagcctgtcacctatatctcaaacggaagtgccaaaggaaacaaagatgatgcggagaagctcagagatgagctgatttcgatatcctacgacgagtcaccgtcgccttcaccggatgtggatgtagctgtttcgccgaccctgccgaacggtgtatgtcgtggataggaagttaatgtacagcttgaagaagtctttactttcttatgcaaaagacttttggtttggtctaaaagttgaccattgttatatgttaacgtttcttccttaactatatgattgaaaatcaatgaagtttcttttattgtgtgcttgtttgacctgtcttatataaagttaaaagctctgatgagtctcattggatgatcttttaatcaaattagtatcacactgatacaagttgagagtggtaagaaacattgagaaatgaaagattgaaactaaagcatggattctcttgttttgctctgtttttcgaacatttgggaaagataaaaggcgaagaaaccctagtgagcagcgtcttcttcttcgcagaacttggtgtattcctttggacccatcagagcttccaactccgcggggctgctcggtttcacctttatcatccaaccatcttcataagggcttgagttgatctacacaaatgaaaaatcgactaatcagattgatctgcgccacactacaaacagaggtatttttcaaaatgtaaaaacttaccaaaccaggtgactcggtgagctttgtgttaacctcaatgacttcaccagagattggagatagaatctcacttgtggccttaacactctcaacagctccaaagcttttttctttgctcactgaactgtttgcttcaggcagctccacaaacacaacttctcctaaatggtcctgcacaatcatcgacatatacatataatctctctctttcagacacataatctgatctaaactagttctaagagttatgtctttgttacctgcgcatggtcagtgataccaattgtagcaactgagccttcatgtttcacccactcatgtgaatttgcatacttaagtccttccaacacttaaaaccccaaacaaccactaaagaatttcagacaagagtcctaaaacagaaccaatgcaacatacaagttgtgtcaagatgttgttttcttacctgaggagaagcatctggagatggagaaagctggcaagagatgagatttggaggcagaagaagagagcttgagagcatttgctgtagaggaagcccacattctcagtgccattcctttttctggtttgtttgtttactttgttttgagttttctcaaaggaaaagtgggaaaacagtaaagagagatcttaattgcttttattgacgtttgtgttctatctttagatgtatggcagaaaacaaaggcctcatcttaatgttgtcgtcgaaaaaagtgtgacccaaactttctcgaccagtcagaaggttttgaatttgaacaaaaagtaaaatgaaaatgaataaagaaaccaaaaaaaaaaaaaacttaaacggggttatttcggcccacaaagctgataaacacaataacttgaggtttacggtaccttatagtgtcggccagaaattgaaatttagaaggtaatgagtaattaatcccacatcggagaactttaaggatctaatctagtatataagaagcatgagttagtgcattaattaacaattggcttttagcaagacaatcagcacggacattgtttaaacgtggaataaaagataaagaaaaacgaggaaagctagactttaaagaataaaattttctaactcagaagaaaaagcgggtcactcatcagaagtgtccaaaagctgtgtcaactccttgcaatctgtctcaaaactatatattacatgatatatattaaaactagttgttttaacttttcaaagagcaatgtcatggatcggcgtaatgttttgtgatttcttacaaccattactgattcaagtgatcatcttccacgcaaaattgcaggcgggggatgtctcacaaatcaatatctctcctgaaataatctcagtagaatctctgccaggtctgaaattcagacccgatccgcaacatatatgcctaggcctgttacggttatcgacagcaatgtgacaaacgcggtgcaccaggtgatggatgcaatgcaagcgccggtctacttcgagacatacatcataaaggggaaaaatatgaatcatttgacgtgggaagtggtggactcgatacggaagaacaaagtgtgcttgaatggcagagtcaataactccttgtgtggtggtgcaaggaaagagcttgatctctttgcatctcttgtcgactgctttaatcttaatggtcaaccgagtcgccatgagaatgttgacatcgtggtgatcagagagaacacggaaggcgaatatgcaggtcgggagcacgaagttgttcccggtgtcatagagagttttcaggtgacaatgacaaagttctggtcagatcgtattgctaagtatgcttttgaatatgctcacttcagcaaaaggaagaaagttacagcagttcacaacaatggaaaatacgaaaaactagctgatgcgtttttcttggagtcttgtcaagaagttgctaaaatgtatccaaacatcacctacaacgaaatcggtattaataactgctgtttgcagctagtagagaaaccagagcgattcgacgtcatagtaactccaaatctctatgggctataattgcaaacattgcttctggtgttgctggaggaagttttggtgatgactatgcaatctttgagcaagttggatcagtaggaaaccataaaaatcctgtggcgttactgttctcttcggttatgatgctgagacatcttctgcttcctttatttgccgaccggcttaaaaccgccgtgacacgtgttatctctgaaggaaagtgtgggaacagtaatacaactacacaagaggttgttgattctgtaattgcaaacttggattgacttaacacagggtttctgagttttctaaccacattttttccaaagtaacttcgaaatgttttccaaataagtttgcttgatactttatttgggttctctttgtaaaagttttcacaactgctccatgcagcggaaaagaagttactgattcagacataatgtagctcgaccttacaatatataacaatgggaataaatggcactacattgaactgttcataacattttaagtattttctaacaaaaactcaggaggctgaccaaaaatgagttaatgtagtgaagagagcttttctaacaatctgtcaaagtcgtatgtactcgcatctgtttccattattcttttgccaatcccatctgagttcttacattgcagcttttccagctcctttgggcattttctttgatgcagctgaaagatcggttttgtctttagagactgaaagagtcgattctacaaaggacagtaataactaaaaagtataactggatttgagaaaaaaggttcataccgtcttcaacgtccttgagctggtagtagtgaggagctaactcaatcaaccactctggtttcaactctgttacctgcattttcgggtatgggagttttagtagcatacagacaaaccgatgaatgaaaccaataagttaaaccaaaagtaattaagaacagaaatacaattatggctaaaccttgcagtatcaaacatattaattacctgtcgcatgtattccttggacgtaagtactagttcgtgatatacaacccatctcggcaatacctacaacacgcattgagaaaaacttatcagtattcaaagttttgagattctgtcaaatcagatatttgtggtttatgtagagtgagaattcattaacctgagataagcccgaattgggatgtatgtgcactgtctggggatgtttcactgttcggtacgatccattcttctgtagctttgcagtgtgcggaaaaaaccctgagtatataagtaagaagttcattagcagaggcataattgtaaagaattatacatttcaaatcaacaaaaaggagaatgagattggcaattaccggctacgatggattttctaactgaatccaattcattcaggtttgagctgatatctatttccaccctttcgagaagtccctccaattgatcacggatatctctggctcttttcatgctccggacctgaacacatgtttaacccaaaacaaaggtcaattggatccacatgtgatctgataaacataaagaaacaacttggtacctgaatgtagttctcgtagcaccactgagtagagaagtttgtttccttccatgaactgtaaacctgaagagaaaaacaaagacgataaacatacagagaataaaagtataaactagtggaagaatgcagaaaaggaggaatacagaaggttcaaacctttagcaaagcaatatggtcaccgacattcccggtgtggaaattcattcttgcgttgtccgcatgaacttgtttgtccttgggacggtagaagatagagccaccaattgacaacatagcagcgattgatattatctcatcggagcacttatacttgtcagaaacaacaatcattttcgacagcattggatcaagggggaactctgccatccttctaccagctttagtcaattccccgagcttatttagagcacccagagcaaagagcagttctaaagactttacaagtgcttcagcaggtggagggtccatgaaatcgaagtttatgagatcatgaattccaagactcttcaaagcaagcaccacactagcaagattcgtcctctgtacttctggcaccgtgttttcctccaagtcattgttgtaattaaacgcagtgtacagacgataacacttccctggacttgttcttccagcacgaccagctcgttgagttgcagaagccttagagataggagtaataagcaaagattccatccctgtcctcgggttatatgacttcatcttgctaaagcctggatcaacaacatactttataccatcaattgtcaatgatgtttcggcgatatttgttgctaggacaactttacgtgccccttctggagttggctcaaatatttttgcttggagttcacttggaagatttgcgtaaattgggcatatgattaattcacggatctttgtacccaaacctcttatcctgtgcttcaagatctcttctgcagtttcaatttcctcttgaccagtgaagaagaccaatatatctccaagtggctccctcacatggatcgtaaggatagtaactatggctgcgtccatgtaatcagcttcaggtgcacttgtatagttgatttcaactggataccttcttccaggaaaactaaaaatcggggctgtatcaaaataatcagaaaatttttctgcatccattgttgcactagatatcaacaacttcaaatcaggtcgaaaccgcgctatatcctgtcaaatataagaagagtcaatcagaatgtatccaaggatttaaccctggttacacaagtaagaagagacattgtacaagaaaatctacttgccttgactaatccaaacagtatatcggttgacaaggtcctttcatgtgcctcatccacaataacgacactgaaatgttttgcaatcagtaagcaaaaacgtttagctgtccaatagtgataataaaaaaatgtgccagaatattcattacctgtagctggccaggtctggctcaccaagcagctcgcgcaaaagcattccatcagtcatatacttcagaactgttttgtctgaagtacaatcctcaaatcgaatggaatagccaacctgtgacaagtaccaaccaaagttcagattctgagagtgaaccgacaatttaaaacaatcagctaccagcagaaaaagacgaaaaacaagcatacctcatgtccgagtttgacacccatctcttgagccacacgggcagcaacactcatagctgcaactcttcggggctgcgtacaaccaacctgaaatataatagaaaagcattacggtactttatttgataaaggagctactctactagccagtctatacttttgaactcattcaaccacaaaggtcatggacaatagctttcttcctaaatccaagtatacgtttaataaaacagcttttgaagaaaaaacaaacaacttcacatgaaaataagaaatggctaagtttgttttcagcaagctaacagctcttagttaaagaaataccaccaatttgttagcaacttcaacttcaatgctacaatttgggacaagcagtaggttgtacctttccacgctttgtgtaaccagcttcatggagatattgtggtatttgtgtcgtttttcctgaaccagtgtctcccacaatgacaagaacctaatatattaaaaaaagttgaaagaaaaaggtttcaaatttcaattgcatgtagcagagaaagccatatagtgaaaaacaaaaacgttatgcacaatttcataatcaaacatttcaatctaaatcttcatttgtacaaaacactgaaatttgatacgttcctttactcaaaaatgattccttctctatcgatcttgaatcagttacacatactcaaatgttataaccggaaaatactgttttcgatagggattggtgaagtatgcttctcgtttgttattagatgatatcaaaaatggcatgaaagcttgaattacctgatgctcttccacagccttaagcagttgatcacgatacgtataaatcggcagacttcttctgacttcctgattcacaaataaacagatgcaagaacatgtcaagataaattttagtttttgctacggatataaattcaaagaaacatacaagcttaacttatcttgaattacatcctaaaaagaagatctggtggttgagtttgatcaaacagagttaatgagaaaaaatagaaaaaggatagtacctgaagttcctctaaagctgttttctctgccaaatcttgagatttttgttttgcatccatagcatcttcatactgcagtacaaaacaagcaatcagctaaaactcaacatatgaaagaaggtatcatcaggtttaatagacatcataggcaataatacattttcaccagccatgacagattcctttatgaagtttatttggtcttcaaacacaaacctgcgaaaaacatgtttaagatttagaatccccagatcatgggactatccatgtttaagagctggcaaggactatttctcaaacgagataaacaaattcgaaatcagtagaataagaataaaagaacaatatgcaacagatcttactgataatcgtctgaggcttgcttattctttgcaccaaattttaatgttgcttttcctgcattacaatgtcatttaaattagcatacaagtaaacaaagtcacttaaatcagtggatagttaaaaaatgactggttaacagaaaagagttaaaacagaaattaccaatctgatggtcctcccaagcttcttgctctgcgaatggattcattttctctgttgaatccaggtccctaatataaaaaatatgatttaggacgtccgaaagaattttgtaaaataagaaagatagatattcctattgtaagtgcaagcagagaagaatgtggtggatcactagcaaatcgctcgttgtcgactcacctgtatcgttgaacagcaacagaaaacctcttctcctgatcaacacctccctcttgatcataagcatctggaattctatactgaactccgagaggtaggagtaaaagggagaggcgttagatatatagatattctacataaccaagtgggagaagggtccagcaagatgaaaacgttacctcctcgacgttatcttcatcttgtgttcttttcttcacgaggtcataaagctctttcttgtacctatcaaagataacagatcaacccaagctcaatcaactataactaaacatactttcttaaatatgaatacaaccatctaacttttcaattgcaaaaataaattttttaaaaatgcactattcatatacaattgaaaatgtttattcctcatcaaaagaagcatgctgcatcaaatagatgttggcaatggcaacaaccaccttgatacaagaaagatgtaacaattacctaaactcacgaagctccgtttctgtgagcttttcacctccgaaaagatattgttcatcttctatctcatccctatggagaaaagaataaaaatgggagaaatcaattatagaagatagatccataaaagatagaaaactgcaaaaatctttatgtcatgtaccttagttcatccagtttcttttgttctctcttctttaagtattcttgtctcgagactttcctgtatcagacccaccaaaagatgatcaataacatggacagcacaaaatagcctccaaagagattatttcaacaagtaagaacaccctcaagagtacttaacaaggagatgattgacatagtcaaaaattggtaactggaacatcatatagtattttaacggtgggattttaacatacaacacccaggtacattattgactactgttcttgtaaatcatgctaggtaactaaacttaattacctaaaatcactgttaaaaagcgatcatcacaaacaaataaagaaggaaaaggttcattaccttaaggaatataaatcatccttctccaaagcatttgctcttcgaacagcctcttctgttttgcaataaaacataaaaccaaaatgagaatatcaggcaaaaaatacttatgtctagatcacaatgtatcatagaaatgttcatatatgttcatgcgcaaattataacagagtgtacctttctctttctttgacaacgtttgctctgttagctgatcaataaacaaacgaaaataacatgtcattgactttcacatgtacaatacattgataagtaaaccatgctaactatatacttcttgtttggttagtgaatttgtcttagcatacaagattggatgacgaataaatgtgaatatttttgcttaattcatcttccatactcaaacaaagctagatttgcctgctatgaattacgagaaaactcattcattaataacttgtacataaattgccgacaatacttacccccggtttgctacaaacacacgacctattcagagcacaaaacaggaaaaatataccaagattagattgaggcatacctttcgtgtccgtgcagtatcacgatcttttaaatgctgctccagttcttctctctccttttggtcacgcactctttcctcttctgactgtgcgagtggacaagaaagaagaacattataaaagcacacgtgaatgcacatatatctatagaacatctcccagttattggagtaaaccaaagaccaggaatcagaaaatagttgaaatgcgttgagagtccagatatacctcagaaccatcatcctcttcagaaacctttcttctaacgtgtctactatcctctctaacggccacctacatttatgttatacattttatcagatcagatgccaagctataacttaccattaagaaagaaagaaattggaatctgtcaatgaggaaaagaaactatgcctcgccatcactttcatctgactgcccacttttctttctaaaccttttcttgcccttatctgattttctagattcagaaactgaagattttttctccacaacaacttcgtcttcatcatcatcagcatctaaaagagcatatgttttctgcttcctcactagcattgctgcctctgcttcatgtttttggtagagctgacagagaagtaaaccaaattaagaaaaccaaccaaaactacagctaagctcatatccatacatacttctcacagaaacagaaactaaaaaagcatctcgttccaaaagcttcaaagagaaaacacaagaacgataaagtttacagcaaactcacatttacaccagcagttttacggggaactctggcaaaaatttcttctgcaaacgaacgagtatcaccagaagacgaaaacccgtaatccaccaactctcccacaagttcagttggtgattttgtttttttagctgcacacaatttgttaaagttttgggacagtcaagcaaaagttcttacataagctccatgatccaaaatcgaaacatcaaattacccattgcaatgagatagttaacaacagccgcttgagagtagccaagtagcatcatcagcttatccgaaacccaagtcttcaaatcattgctcgccattcttactgtatttgaataaacaaagcaacaccaagaatttcaaatcaaaatccattctctaaccatttcacattatttcattgatatacgaatcaaaacaataattagtgaaactatacaagattctcaattttaaaattcacttcgcagcttgaattctcatagctatcaaatcaaccgtaggcagcaatatctccgaaaaatcgaaagtaacaaaacctaatttataaactgacacaaattatcctaatcatcgaactaatggaacaagttacaaaccctagatttcggtaaactaagggttcaggtttctcgagagtgagaagatttcgagagtgaggatctctgttttcgaagctaccggtgggcgcgaatatatatatcggagtctatcgaagtatttcacccgagtgggtggatagaaaaggcggtgagagtctccgacgttgaaggaggccaacgatggagaaaagggaggcggtgaaaaacaagtgtttgttgttttatcagatttcaaataaaaagcgtgttgttttcaagttttacttaaatccataaacatcgcgtcgttttacttatacagatgcgaatagaaaccttttcccaaatttaaagagaaactgcacgctatttaactcatatagaagccaactgtttgttgttcttcttagtttttaattaaatgggccaaactggactatatgggcctcccaagcctttgagcagtaatgaacaaaggataattgacgaatcgtaagcgcaaaaccggcgcgtgagtatcacgatcggtttctgtgaaacacatcagagcaagcctttgacgtgattcctggcttggtctctgatttcccgatttggaaacttctcgataacctctgatccaaaagacgatatgagagctcttcttgcagtctccaagtcgatcccacgagcttggaaatagaagagctggtcttcttcaagatcactgatagcagctccatgagagcatttgacatcatctgcaatgatctgaagattcggttttatgttcacggtggctcggggtttcagaaggaggctccgtgttagttgtcccgcgttggtctgttgagcgaatctgcatattaccacacagaagttaaaccgatgctaagcacaccaaaccaaactgaaaagtttacctgttaactcggacattgccatcgaaaacagcttgaccagaggaatgagcaacaatacacttgtgaagctgtcgtgaagcgcctcgtggatggtctaagataattttgctatggagatcaagagtctgctcgttgacacacatatgaaacgtggttagctctgtgagcgtatcaggcccaagctgctgcacatgaacattgtgcctcccaagtttcccaccagtactcacttccacaagctcatattcactctctgcctcctacagagttcaccacatgaacaattcagcataaaacattccgaagccataccaaaacatcctattctataaacctttatactacaaagaggagaagacaaaatcaaaactcacatgaggctgaaactaaactattcatcctcatcaacaattcaatcataaagattacaacttttccaagttcagcaatcagcagcaacaaaactaaactaagacactctcctcagacagcaataagattcctactttcgtactcaaattgatatcaaaacatccaacactaatctaagccacgagagagtactaccaaacagtaataggctaaactactgattcaacaattcaagaattctactaataccaagccaattagttactggaaagacaataagagaatgagcaaagattgaacctgtcggacaaaagtccacttgatatgagcagaagccatggattctttctgcaaataagaatgcttcaatttcgcattcttttgaacaacaacttccaaaacaggattcgtccaataaaacccttcttcatctttaccaacaaattcctcaacgataccaatctctcctccttcctccactaacacaaaaaccctaggattcgataccggtaaccgtttcgattcccggtcaccagtttcaccagaaaagtacctcaaataaatcggattctcgaccttacatccttcaggaacataaatcaccatcaaatccggtgctcccataccattaatcgaccaaaacaaatcaccagaatcaaaattcccgataaactcagaaatccggttcgttaactcatccggtaaaccagaatatttcccgaagtaaaccccatcgggcaaatccgatggaccaatcgtcaaattcgacacgaacccatcaataatcacagcgtttgtgaactgggtttccgtcagattatccaaaatttccgaatttcgttgctgggtcgaaattggttcgatttgagaagatcggattaaagatgtatcggtgaatcggaaaggttcgtcttttcgtgacggccatggcgtagataaaagagtctcagcggaagaatcacggattctttgaagaggtaaagaagaagaaggagaagctgagagagaatcttcgagagattcagctaattgaagtacaaaagggtcagagaacgaagcttgtgcacgaacagaaacacttgtggaagttgttcttctgttagatttcaattttggtttagatgatagatttggtatcagtgataagcgaccgagaactgtggcagccgccattaatggattccttccttctctctctctttgcttttcgccgcgattcccacaagtactttctcaaatagagtgtgttttttttcttgtctctcttctcttttttttttgttttccgtctctattttattgtatttgtaatgttgtttagtttgggctaaatgggcttctatgatagactcattttaacttaggaccggccttaatacattattattactcaattgttttggaaagaaactgtgaaagtgtgaaagttagcaaaaaagtgtgaaccatttagttaagtctcggtaatttgcgaggcataccttttgaccatgttttattttcagggattggcaaagtgaaagatggttttcacgttttgtctatttagctaaaatttgatccttttgcccttgctgctacagctgaaaaactgttaaatgtacggtttagttagtcaggtttagttagatacactgttccggtttagttgaagatatttttgtttcacggtgaggagtgcggctgtacagttagaagggagatttttttttattaaaaatgaagtgacatcaacatttaatggcccaaaaagtttagacgtgactcttgtcataattaatgcaaaatcatcattacatgttataatataataaaattattgataataattttattcgtattcaaggaaaggtgtcaatctagcgtaagccgcaatactagatcgactttcatctcgcacggctcctaagtgataaaagtaaagaagaactcatcttctttcttttttgattaaattattgagttaaagatgaacccaggaacaaacattaattgctaacgtacattgatgctcaagaagtgttgatcttgtttattcacgaagtttggaaccaatataagcattatcgtataagtaatgaagttttaaagaatttttttgctataacacactatgatcttcagtatgttcgaaatcaactttgttttttatatagaaacccagaaatttttatttccaattttgttggttgaaaattctaaatgtataaatatttatgtttataagtgtgtatatcaaaattctatttgtttttgtagatataatcatgttttcagttgcatttaatgagtttttcctgaatttatgatgcacttgggtaatggatatttccgtatttactatggtcggtgagtggagatgcaaagaagaaaaatgaaaatttgaatcaaaggaagacatgtttcgtcactgtgtacgtgttaaggaaaacatgacgtacacggaatttgtacgtacactaagcgaggctttcagtttgaagtccacagagatcaatcccataattagttactggatgccaggagagatgttagtgatgatagatactaaacgtcttcctgtctacattgacagtcaagtggggttggatacgttctttttgattcgtggtcggtatccttctctcaacttgtttgtccgtcaagacactcgggaataatgtctttaggactcatggtgacgatgctgaaagtgaccgtgtgtgtgatagtgtttcaaatgttgatgaaaataatgagaccgtagatgagcaagacgacgttgaagacgataaaacagatgaggatgaagaggagggggacaacaaagatggtgatgggtatgatgattatcagggtgacgatggatctatgggggaaagtaccctcgatcctactattgatggtaatgaaagtactggcgaagattatgattacaacaagtggaacgatataattgtaaaagaatatggaatatggaatgttgaggagaacgtcattctcacacaactgactattcaacatccagggaaattcagtcgtttgttggcagagtgtacgtacacaagtcagcgtgtacctggcgaagataacatttctcactcgggtgaccatacaccagttgtgactccaagaagtatgtgtcaacatggtttgtaccattgtacgtacactatagattgggaagtgtttttaaaaacagaaaagtcatacaacaaacaatgtcttatcttgcaatcaaacaatctttttgctacaagcaacctaggtcatgtcctacaagattggagatggtttgcgttgatgatacttgtccatgacatttgacagctcaagccactgacatttgtccatgaatttaaaatgtttcaaaatcacatcgtatgaacgttttaaaatatatctcagctactgccaatattagtttaatattgtattaataaatttttctttataatttaattcacaaacaaatatgtacgtatattatttcacatgtatatacattaatttaccaacaatattacacatatacgtacataacttttcaatatgaggaacaaacattatttcaccatctatttttatttaattattatgtatgtatggagattattgagatataataatacataataaaatattttaagttattagaaatcgtatcatatacgttccaataaatgattttgtgtacgtacacagaaaaaattagatgaagggtataattgtaattttccagtcatctttaacctatgtatccttttctacaaacctaattttgcggtcgtctttaccagttttctcaaaatctcatttttttttacgttttgattactatttataaataaatcttgtaaacctagagtatctttagtttaaaaaactaaagtgtttgaatctatgagttttttttttgcattttgttgatctctgaaaacaagaaatttgttcctcaattttggagttcaatggagagatgtcgaaatatgaaggagtcgataatgatttttaaacttctttctacttctctctcaaatctttccgtctctttttctttttcttcttcttcggtttctttgcttcagtttttttttttttttcaaaactgaactatagaagctaaaccgaaaccaactgttgtacggtttgattgctcccaattaaggatattttggtccgaaaacgattgaaaatacaaatggtgaaaaccatatcttattttgacaaaccatgaaagcaattcttttttcatccacttatgtgaaaatttcttttctttttttttaataagttacagtagttttttaccaatttttagaaatcttttcaaaatctaaaatttgaatactagctagctagcacaaaagctagtaagaaacagagtatgtaatgcaagcggaaattatcttgggatgttccgctaccgctacatcaaaaccgccgggatcatattaggggaggcaatgtaacgatgtgattcgagagctaatatatttttgacttttgtagttctttttttctgcttgaactaaaaacaaaaaaaaacttctctattaactatttgtgaagatacaactatcaaattgtatattcaacattatttcaattgttgttaatattttaggttctttttgtgaattcttgttttgtttaatgaaaagattataataaaaagtgtgtggctagcttaattgagttaatgttcttatactatacgacgagagaatactctcatgatgactgtgtgttttcaataaaatatttcgctgaattaaataacgggttcaatttttcatttttttgttattgtagatgtcccttgggtgaagaaactaactttacatatcaatggagaacaaaaaaaagaataatcaatgtgaaactaatagtaaagcaaacaaacaactagtggtgttttgtcgtgtccaaaaaagtgaaaaacgcggtaatagaaataatttaacattttaaaggttttagttaatggagattaatttgatcacataggcaaaaaaaatatgcataccaatgaaaagttgttcattaattagattttccaagtcactctgaggtggaaggaaagctaattgactcttctttgacaaaaaaaaaagaaagaaagctacttgactcctggtcggactcgtgttcacattttcatttatcaaacaatatacaattagaaagggaaaaattcagtttcaagtgtttctaatcctatcaaacaatattgcaaattagaaaacttattcttctttagacacatctacgtaatgaaactatgtatgttagtagagacaagaattctataactttttaccaaaaaaaaaaaagaattctataacctttaaattaacgaactctagccttcttaatatacgtactccaatgtaaaacattcagttaataatcatataattatttattctttttgcacgaaataattacttagagttgagcacaaactgattattcatttcgaaggttttattgttaattgacatcgaggcaactactgaactactttaagctatgaagcccctatattggtataggtcatagaaaacagtatggtgtttataaacataaacttcaaacggcaaaatgtctacatgtatttagtaaagacggcaatacgtttttaagtctctgagtgagtcagtgtgaaagcttttggttcaggtgggccaatgttgtggaatttgtgggacgttcagacaagtaagtaatcttcaaacactttcggtctgtattattaaaatgtaaaaatagattactattactatatttaagtttgtattaatacttttaatcaaccttttagccttttaatcttctgctatatatatatatatataatccataccaaacggtccaaacttacattttcccctctccctctaagtttcaacataatcaacctccaaatttcaacctcttgtctttaattttgttcaaagagggaatttgaaatcttgaaacccttatttagaaataaatttcgtgttcttgtttttctctgatatcataatctgttttttttttctcacttgttccttgagctttaagaaagacaactataggacttagggtttctgttttgtggaagtttcacactgttttcgacaagaaatttttaaatcaagatcaagaatacgactgagtaaatcatttgaagaaattatagataaagaaaatggtaggatcatttttaccacctggtttcagattttatccaacagatgaagaacttgtaggttattacctgcacagaagaaacgaagggcttgagatcgagctcgaaataatcccattaatggacttatacaagtttgatccttgggaacttccaggtatgttgcttcttgtaaaaaataatcagtttttactatctatattataacataccaagtttttgttcattacagagaaatccttcttgccaaatcgagatatggaatggtttttcttctgtcatcgcgacagaaaataccagaacggatctcgaataaacagagcaactaaatctggttattggaaagccactggcaaagatcgaaaaatcgtttgccactcttcttcttcttcatcatcttcctctatcaccggctgccgaaaaaccctagttttttatatgggtcgagctccttttggtggtagaaccgagtgggtaatgcatgagtatcgcctcttcgacaacgatacttcacaaggatcactaaacttcaaggtaacaacatcataaaccaaacagatgaaaaaataaaaaacttgattcatagtttaccatttaccaattgatcattttcatttggtattcttccgctctttagggagacttcgcgctgtgtcgtgtgataaagaggaatgagcatacgcttaagaaatgtgaaattatctcaccagaggtttcagatgagtcattaagcaataatgttaacaatttttgtcaagcaagtgacctagaaaagggttcttgtgatgcaagtaacacacgtttgtcttctcctgatttcatccttgaatcatcttttcaggtttagctacttaaatccaaactctgcgaaagtcccattcgtttatcaatatcactgtgtctcaaacttcattacattgttttttgtagggaaattcacattcaaaaacagaagaagattccggtttccaagtatttacattacccgaattcgaatatccgctagaggtttttgcagatttgaatttcgatttggaaatggaggatccattcatgttcgattatcatccagagcctcatatgaacaatgaagtcatgagccatcacattcgtgggtaaagaaaaatattatagttcactagactgaatctcaaaaccaaacactcgagatggatcaagatctaactacaatcacatttattgaatatagatttgtttgtgtgtatagttgcatattataaaatgtaaagctacaagattctcttcagcatcaactagtagactagtagttatagatacactttttaaagactttttaggtctcaaaagtatgtataatcaatgttgtatatctactaattacataaataaaagtgacctataaattatcaggagacactttgttgagattggcttagttatttaatacaaggaagcaatataaggactacaaaagaccaatacatcatcaagactaaccttattttcatctccaaatatagattcttttccatctttcctcttagcatatgacaatcccaatcttgatttagccaccctcaaatcaccaatccccgagttcgtatccggacccgcaaatccgcccatcacgggagctaaaggcggtccgataagaagcccgtcagctccaaattgaggccctccgcgagcataatcaaatagtgctgctccacttcctccaaccttaggaaggacgattgggtcatcacaatcctcgagccaatagaagaggaaagcatcaaatgtatcgtaataatcatcagtacttctatatccttccggactaaatccaccaaacttgaaagacttgtctttagtgtaagctatgataacacatggacctttgaagtcacaacgctcgtggaactttgttgcaccaaacccatcaatgcttgccttgtagcaacattttaactctcttcctaataaaaaagattgttatatagttgaagaactttagataagaaatatacttattcctagtggtagaatatataagtccacatgttgctacaaggacttagattgagaagaagggaataaatttatttaccttttaggaaggttttgtttaccattgaaagagagaaaggaatttcgacatcgtcgtggtaagccggttgttgcggcggccggatattgtctattttcttaccggagttccaaccgaatagactgttgtaaggacttattctcttcaaggtcttgaaggttacagtatgaaatgagtttgagatggcacacgaagccattttcttgcaagtaacggccacacaacaaaacccacaagaagaaaagtagacaaagcatcaataattgtggttttcaagaacttgtggttgtcattgttttgctaacaagtgtccaatccggtttaaccaaacaaaaccaaaaacaaaccaaacgatagttgatttttatttggtaaaaactagagaggcatgtttcctccaaatcgaattcatcaagataatcacgataataagttattttacatcgtgcaaagatctttcatcgaaaaaaatcaaatttcctgagtgtaaaaagctctgaggaagaagctaaacatattatttgtacttacaaagtaaaacctgaagttgtggtgatctctctgaaacccaaagagaagcttatttctgcttttatgaggttgctccaaagatacggattcgctgctgaaccaaacctcggcaacaaggacaagtgactttgcttccgccgttgttgctcgcgaagaagctatcactgcaactaccacacacaacttgatgcgcacaaggaagaaacaccacagagacttcatctttcatacagattatgcattctcgatcatagtttgcttcattgtcataagacccttcaagcttatcaatttcttcaagcagcttagcaatgttttctccttgagattttttgggtttccaagcgttgttggatatgtggcttgagtcactatctgaagaggctttgagtcgaccgagttcttgctccagtctttggtgatcgtctttgtgtctttggaagtctagttcaattttgagtcgtaaagtctcaagctttctcttgttgtgaccctcagctgcttcttttgagcgttgttcttcctccatttgagccagagcctcctcttttgccttctgctcttgcctccatttcgcctgcaaataacatatgaacaggtaaatataaaaagaagttgatagactaaccatcattccatgtttaattgaggtaaagtaaattgatatttcaattatcagtcatcaaccacagtccaagtaagcaaatctagagcaaggttttgaacacaatgtgcagcaacatagataacgtacccgcaaggcgcaaacaggtaaaacgtcaggaacgaaaagaaaatatagaccaccatgtagagagaaaagctatccagtggaacatatcaataggtatagcaaatcatttggcttctacaactcgagacggattctccaagattatattcatatcaaatccaggttccatctaccctagcaaaatatgtggcagacacagactatacctcttgaatgatctttgaagtcttatggcatactaccatctaagacagaaccaacttcgcaactagatgtgtgcctcaaatgataacgtacgtaaatattttgaatcctaagtaaatgtacttcccacaattctagagttaaaagtatagaggatctagagaactttcacagtataaatgaatataatatgaaccaacgtacctcaatctccttttcatactctgtgatttgagctaaagtcttatatagggccttaatcttttctttttcagctgtaatctcatcctgcaacttcaatatctgtttctcccatgccacaagcttcttcaagcattttttctccttctttgatgcttccatgcacgctttaagcgattctgatgcacttaatttggatccctcccgctctgctcgaatctctgcattttgattctcaagctttcttacaattacattggccctgtcattttgactgcaagcttttctgagttcaatttccttgtcagtaaatcttttcgcagttgattcttcaacagcctgtttcccctttttcagcagttggattccttctctttcactactcaatgttttaagctcagctaattcctcgctgaccttttgtgcggcttgcattgcgttcttctgagcccactctttcctttcctttactttcttctcgaaatccttaacctgatgaagcagatcgactatcacacaatccttatcatccacacccaccgattccagattatcatcaaggttcagatcacgaaatttctccaacaccgtactaacactttcttcactccctgacttacgtggttgctgcccacaactcttcacaattgcaggatcattacaagctttgctatcaccaatagtatcagacgactgtatttgcttctgcttcatactagcacgatacccagcagcaaacgctgcaacattccgcttcaacaaggacttcatggatggcgaaagattaaaccttttaggacaatcaatctctctctgcaacttcaactcagcacctttcatagaaaacccattaccagaaaactcaggtcctcccccattcccaaaaccccaacctccatggaatcgacacaacgctggtgccataaaaccagcaatatctagagtaccacccgtaccaacatcttctacattgctatcttccttagtacaacaactagacctattcgttgggacatccagagtacttgccctaccaacatggagctcactcattaacaaacaccacattgcatcacctttactcaaattaggcttaacttgttgcaacaagtaaatcatacccgcaagcgaatactcctccaaatctctcaaatccgtaaaaccagtctccgttcgatcctcaccgttcccattactcccacctccacctccaccactattcaaataagataatgaattattcactatattagtcaacacatccaattcaccataacagtgtccattactcaaaaccgctttcaacgcaacacgttcctcatagcccaattcaagaagcttagaaacagcttgattatacaaaaactccaaatgtttcagcaaaatctcttccaaatgctcctctgtacaatatgcccaaaaattctcctcaggattctcagtaacggaattcaaattgacagaaccggaatcagtaagaccaggatgataaacaaggttctcaacaattgattgtgacatagcaatcttctcgacccaacataacggtgggtcggatctaaatgcagcggctttgatcctacgggtcggtttcacgtgcttctccctcacagtacaacccatgccaaaatctgaaactgaaagagagattgaaaaacagagagacgataaaaatgaaaactttaccaaccaaaaaacatgggtttgaagaaatggaattaatttattgaataaataatgattcgatgatagagacggaggaatacgaagaacttactgatcggtggtggtggctgaattttctcggctaagagaagatgagagtttcggcgaaaaggttatgcgagagagagagagagagagagaaactttgtttcggtttcttccatttctggcggcgccagagaatatatttatgggctttgagcccattacttgactgaacttatttgggcccatatatccgaattcaaaccgacagcgttttattataggtatgggttaaaatccgatctgtttgtttggtttcggttatatagaatgtgaaaacagattagtttggttcagtttgattatggttttgattcggtttggttttagttaggaaattaactttatattatataaatataatgtttgaactaataatattttaatatagttatactaacatctattgtattaataaattaaaatgtacattatgattatatttatctcaattagtttagtccgatcgactggttacattaaactcggtttcaaattcttattctttttataaaaccaattggttaagaagcaaattttgtttttggtataaacatttatttcagtttggtttacagttttgtgatcccttcgatgcttatctattctagaaaccctaatctataacttcttagattttggcaaagcaatggacacatatatataacttcttgctttttgaaatttcttagattttggattttggtgatattcgcttatatgtttggatgcccagtggtacgtaaatgttgttcctttgggtaattaaccaatgtccatcagtccatgcatctgcgttttggatgtagagttttttttttgctataaagctttttttatgtagagttgggataccattggcattaataaacaaatagtgtgctaattccagttgtaattatatacattctctatagcttgtgttacatcgtctatagaatttaccacattctcatataagaaaaaacgaatggaaacaaaagaggtttttgtatgcatcttcttaagctgagccatcatagtttgaagtaagacgtggacaactccatagccgcactttaatggctatccaagcgtctctagagacgtcaatgtccaaaatgttcttacatgactctttcctttgtccttttattctttctctcccattcctccaaatcccacacacatacatgcacatacatatacacgcatacgttacgtagatgcatacatacatgtattggcttagtggtcatgatggaacgagattgagaaactcaactctgtttgcttgcttctggaaggcatcttctgttgaagtgtcttttacaatttctttagacaagatgtttggattttaaaacccttttaacaaaaaaataaataaataaaaataaagatatttggattttgcattgtgacctcaaatctctttgttccctaagaacttcgaccattttgtcaaatcgacatacccatattgcctccttttgaatcagagcatttgttcatgatggtatgaatggcatagtgtttctttttgtattcatagcattcgtcaaactttcacatttttattccgctaaatccattacatgctagcctctattcaaataacatgggtagtaaaatttaaatgttagtagcctctattcaaatcagttttttttttacattttagtaatctattaaaatcaagtttttaacgtatcatattgaatattctgaataaataaataaaaaatatatattctgaataaattatattcatttcaaacgtttttgatgtttcatcactttataactattcatatcgaatcactttttgtaatatgtattatttttactatgacaattaatgttttatttcccaatatacattgcctttttgtatagggatattaaggcattaccaagttatatcgttttatccagccgacttttggatttttatgttggatccgaaaaaaaaatcttctttttagcattttcaatttaatacgttttataggggtgtattcaatcaaacatttttgtttgttttaactagttctatattattaaataataaatttttcgatattttttctcttgattgtctttgtttggatgcttcttggttgagcttgttagctccctattatcatgcatcctttgagttattttggttgttttagctttaccatttgctcgtccattatggtggtcattggattggtttgtgtgcctcatagtagttctttgtgtcttttctttgcggaggcaaaacatgtttaaatttaaaattatttttaaatttgtccaagaacagtattcttgataacttcaagagatttttaaaaaatgttcccaagtaaaaaacacacaaaactaaatcccataattttaagtggaattttgtaggattttataataaattataaatcatatcaactttcctaattcatccaaaatcatataaaaaaataaaactcaaataatttaaaatacgggattgaacatgccccttactacattttccactaccaatattgattgacaatgcagaagaaataattcaattaattagaaaaaacaaaattaaccactcaagcgttaagatccatgccgaacaatctaaagcttcaatattcggatatcttgatttggtttagaacatcaaaaattttggttttacaaaagctttgccgaattagactgaattagaattttgattatattcaatttgaaagccaatatttgaactggaactaaaacttccttctatgtatacacaaagataaaactaatttccaaataatttcagttaatttaaaataagataaattaatttccatatatttcacttatattataaaatcagttttgacatagaaataactcaatgcctactccacctcgaaccatacacagtttatgtaaatttaaactccacataactaatcagcttacacacctcaatccaacatcagcttaaaccacaccatactcgattcggattcagatcacaacaaaatcaaattgaaaaatgaacacatataagttataacatagatatacctgtaagatcacggtcaagataatttgagtccaaatttatatatagaagctcatatagtaaatgagttgagcttagctagttcatgaaatatctgaattc

SEQ ID NO: 19 - DNA, 94618 bp, Arabidopsis thaliana
gaattccacaaagctctcaaatcacacaatagaccaaggttttgaattaagctaagtaagatagtaatgaaaataaaaagaaacaaaaggaagcaatagcagattgtgactttgtgaggttgtaagacaagaaagtaaaaacgttaggcttagggtattctcaggaaacaattggtttgtagatctaataatagctaggttgttatcgaaccattcttaaactcaaactctaattatagaataaccagtggtgttccgtgaaactccctatgcctatagctaagaataaccggagaagccgagagatctttaacctaaacatgcattctaaacgggttcaattgttcaccttagaagataggccgattcttattacacacctataaaccaggctcatcaaataatagatccaactaaagatacctatggtgggcataaaaatggtttggattcaagttctaggtgatcaatgtagatctagcatttagaacaattaaagataaagaattctacagataacctaacaaagggggatctactaaacaatatgaatccctaatgagaaaccctacacctaacaagtggattactcagacatgatcaaagaaacacaaatcatagtatgaataagaaatcaataataacaagagaaagagtaaagaagatcttctccaaagggagtctccatagggttttgctcccaaagtacaaaagagatgaggaaaatagtctctacaagcttaggtctaaacaatgacctttaaaactatatatatgacctaaaaagtgatgggccttctttagaaataaaagaaagttctgggccaaatttagaaatcttcaaaacatcaataagttgcgtcttcgaattgccgtcaggtattggtgtcactcaacaccaggggtggtgtcgttcaacacctacgtgcattttagtttccggatttcttcagcagtataaattctctgttttcctccagaatgctccattatctcctaatgaatcccaaacatgtaaagacctgaaaacgactagaaaagactctaaaacctatacctaaatcatagttaaaaacagtaaaaatagggatatattaactccccagacttagcttttgcttgccctcaagcaaaacacaaaagccgaacctgtggaagaggttttaaaacacaggaactcccaacattctctagcttattgccttgataatcctaaccaaattcgtctagcagttctaatcaaatcctaaccaacatgtatttctctgcaaggttacacaacattctagattccatacctaagttctattactatatctaccacgctttcatcgatgggtctcatcaaacaagctaacattcaaaatccttctagactcattcttgtactataccatgataaatcgaccattatttatatatttttttctttggtgttctttctcttcccagacttattctttttagagagtaaacaaaggggaactcgcatagtagatcgacactctcggcatttttcgaacctttgtaattgatcattctagataatgtataataatagggtcatagaaaacattcctacccctatacactatctgaaaatcctgtcaatctctcattttctttctctttttataatggaagaggaacacattctttttatcacattggtctcaatatcaggtatgaacaagaagtcaagatctatgaatactaactgtttgaagaggtaaaaggaagagcagtgagattaactccagccttagtggttgtgttggaaactaggatatcctcaagtctgttggtttgccatctagattttccaatagtcggattgagtcaaacttgcagcattaatcaaccagacaataatctaaagaatagagatcataattcctatcaaaattttgactcaataaaacgactcaaaaagaaaaataaaaataagaataagactcaagaaagaaaaacatagtaagtaagcgcctcccccagacttaaacgacagtgtccctagtggcattcaaatcacgagtaagcgagaaaaagaaaaaaaaaacagaaaataaaagaaaaataaagaaaaataaaccatactagtgggttgccttccactaagcacttgtttatagtcaatagcttgactttgatggagtatggggatcaggtggatcagatggtggcagcaaatatcgcggagaaggacctctcatcatccatgttggcatataagcagttagcacgtgaagtttatctaggaagagaggagcatcagcagggtgggactcatgtatgggtggaatactcctttttcctgcacaatcatgaaaagaaagaacaagagctcaacgagaaactcgtggcttgcttaaccgtaaaatagtatttgaaaattttaaggtcttattgataaaatcaggaggtttaggaggaggagatgagtaacttagccgtttaggaggtggatgaagtatgagaggtgcagtgggtgacgtgacagtagaacctggacttatagctgtgatcccagatggaaaaatagctatcggagatgattctgctttaaccagtgatgggtgtcgatcgacactagtagttgtgtcgatcgatacacgtgcaacaactcgtcttcccttagcctatcgacaagtcagctttgaaatctgttctaagacgataattgtcttccttttgtctccctgattctgtggagccttgcaacgcccctcctgaatcccttgcatatactgttgaggcgatggacaaagaattccaggcgtgtagactagttcatcaacatgtggaaagtcaaggctaagtggtgcagtttgcgtccaatatcgatcgacactaggtgagtgtcggtcgacactactatatggtattgatcctgctctgccaatctcgattgattctgctccatcaagcgtcgacacttcctgaggttggtactgatgtcgatcgacacccaggtagtgtcggtcgacactatcaatgtgtgtcgagcgactctagagatcagtgtcgagcctggtcgattttgcttcgtcacagcttgatgtctcgtatatatgccatggtgtcgatcgacactatctcttcaacttcaaaatcgccactctcgtcaatcttcactaactcatactcactttccattgaagcagcatgccaagatgtagtgaggctcctcttattccatctagagataggtttctctaagatcctctgttgaccttccagaatctgttccagcaatgattctatcttgcttctaggtgctggtggagtggggcttggtaagaagcaagatcatagttccttgtgaagctgaaactattgctattctgaagtggttgctggaactgagaattctcagtgtagctggttggaccattcccataggaaactctgtagccttgttggtgatcaaatctctgattcggaaaatctctgctacgaacataatcgacatcctccgtaagtttattgtagaccgcgttaagcttagccatgatccctgcaatcttattctcgttcatgtttctcgtttggtcttggttctatgattagacaaacacctgaaacacacaagaaaaagaaaagagaaaaactaagtaaaatcaaaaaagaaaccaaaaataaaagcttagacaaaatcctaatcctaatctaatggtgaatcatagagaacttcggcaacggcgccaactttgatatatatcaaattgccttaagaccactctctcaaataagagatcgattgtagcacttaagggtcgaattctacaaagctctcaaatcacacaatagaccaaggttttgaattaagataagtaagatagtaatgaaaataaaaagaaacaaaaggaagcaatagcagattgtgactttgtgaggttgtaagacaagaaagtaaaaacgttaggcttagggtattctcaggaaacaattggtttgtagatctaataatagctaggttgttatctaactattcttaaattccaactctaattatggaataaccagtggtgttccgggaaactccctatgcctatagctaagaaaaaccggagaagccgagagagctttaacctaaacatgcattctaaaaaagttcaattgttcaccttagtagataggccgattcttattacacacctataaactaggctcatcaaataatagatccaactacagatacctatggtgggcataaaaatggtctggattcaagttctaggtgatcaatctagatctagtattaagaacaattaaagatgaagaattctacagataacctaacaaagggggatctactaaacaatatgaatccctaatgagaaaccctacacctaacaagtggataactcagacatgatcaaagaaacacaaatcacagtctgaataagaaatcaataatagcaagagaaagagtaaagaagatcttttccaaagacagtctccacatggttttacgccctaagtacaaaagagatgagcagaatagtctctccaagcttaggtctaaacaatgacctttaaaactatatatatgacctaaaatacgtgatgtgccgtctttagaaataagagaaagttttgggccgcatttgaaaatcttcaaaacatcaataagttgcgtcttcgaattgccgtcaggtattggtgtcgctcgacaacaggggtggtgcctttcgacacctacgtgtattttagtttccggatttcttcagcagtataaattctctgttttcctacagaatgctctattatctccaaataaatcccaaacatgtaaagacctgaaaatgacaagaaaagactctagaaataacatatagactcgaaaagctatacctaaatcatagttaaaacagtaaaaatagggatatattgactagcattaagaacaaccaaagatgaagaatcctacagataacctagcaaggagaactctactaaatcatttatatccataatgagaaaccctaaacctaacaagaagactactcaaacatgatcatagaagaacaaaacatgtttgagtaagaaatcaataatgaatataagaagagaatagagtaagaaatatcttctctaaagggagtctccacaaggttttgctcccaagtacaaaaaaaagaggagaatagcctctccaaagcttaggtataaacaatgacctttaaaactatatatatatatatatatatatatatatatatatatatatatatatatatatatataacctaaaacgtgatgggtcttctttagatataaggaaaaattctggaccaaatttggaaatcttcaaaacttcaataagttgcatctttgaattgccatcaggtattggtgtcgctcgacactagaggtggtgttgttcgacacctacgcaatttttactctctgaatttcttccgcagcataaattctctgttttcctcgagaatgctccattatctccaaatgaatcctaaacatgtaaagacatgaaaagaactaacaaagactctagaaataacaaatagactctaaaactaatacctaaatcatagctaaaaccagtaaaaaatagggatatatcaactccaatacttagcttttgcttgtcctcaagcaaaacaaaaaagccaaacccgtggaagaggtttgaaaacacaggaactcccaacattctctagcctattgccttgatcatcctaacaaaatccatatgcctagcagttctattcaaatcataaccaacatgtacttttgtgcaagcttacacaacattctagattccatacctatgttctgaaactatatccaccaggctttcatcgatgggtctcatcaaggaaatcgatcattctttatatttttcttttggcattctttctctcccccatacttattatttttaaattataaacaaaggggaactagcatactgcattgacaccctcgacatatttccaacctttgtaattgattattcctaataatgtataataatggggtcataggaaacattcctacccctatacactaccgaaaatcatatcaatttcttgtttttgtttttttataagtggagaggaatacttttctttttttacattggtctcaatatcaattataaataaagaatcaagttctataaacagtaaccgttttgatgagctaaaaggaagagtagtgagattagctctagcctaaatggattgtgttggaaaccaggatatcttcaagtctgttggtttgccatctgaattttccaatagtcggattgagtcgaacctacaacattaatcaaccaggaaataatcgaaagaataaagatcataatttcaaacaaaattttgactcaataaaacgactcaaaaagaagtaaaataagagtaagaataaaactcaaaaagaaaaacgtagttagtaagcgcctcccacagagttaaatgtcactgtccccagtggcattcaaatccgaagtatgcgagaaaaataaaagaaaaacgtaaaataaaagaaaaagaaaaaaaaaaccataccagtgggttacctctcactaagcgcttgtttagagtcaatagcttgactatgatggagtttgggaatcaggtggatcagatggtggaagtaaatcgtagaacctcgcatcatccaaggtggcgtataagcagtcggtgtgtgaggtctaccaaggaagtgtggaacatcagcaaggcaggacaaaggtatgggtggtctactccttttacctgcacaattatcaaaagcaagaaaaagcgctcgacgaaaaactcgtggcttgcacgctttaccataaaacagtttttggaaatttcaaagtcttattgatgatatctggaggtttaggaggaggagatgagtacctttgctgtttcggaggtggatcaaggagtaagggtgcagtggttgacgtgactgtaatgcctggagtatcagcagtaatttcaacacgaaaacaagctctaataaggaactctatctcagcctgtgtggggtgtcgatcgacatccccaatgtgattaataaataatagataaactccaagcaagctttttattgcttctcaaagctttgatggtgtagccaaagtctgtatgagtttttggctttgtatcttctaacaaggaaacactactttagcttttgggaaccgattgcggttctacttcttatactcaatcatacacatgaaatcttgtcacatttgactccaaaacactaactaagcttcttattgcttctgaaagctttgatggtgtagacggagtccgtataagtctttggatttgcatcttttaacaagttaacactactttaacttgtaggaccggttgcggttctagttcttatactctatcataaacatgacatctagtcatatttgactccaaaacactaacaaaccttcttattgtttctcaaaggtttgatggtttagccgatgtccgtatgagtctttgcctttgtatcttctaaaaaggaaacactactttagcttttgggaaccgattgcggttctacttcttatacttaatcatacacatgacatctagtcatatttgactccaaaacagtaaccaagcttcttattgcttctcaaagctttgatagtgtagccgaagtctgtatgagtctttggctttgtattttctaataaagaaatactgctttagcttttgcgaaccagttgtggttctagttcttatactcaatcagaaacatgacatctagtcatatttgactccaaaacacttaccaattttcttattgtatctcaaaggtttgatggtttagccgatgtccgtatgagtcattggctttgtatcttctaacaaggaaacactactttagcttctgggaaccgttgccactacaacaaatgttgtcatgattagcacggaaaatttgctagtatacacataacatagcgaattcacaaatgctatgacatcgacaatcatcataggggtaacccatataatagtcttattttaacagctacaaaattgactaattctataacgaacctacaacgctattacatattctcatatagcaccacatgtgttgctatcgtatgacatgataacatagctcttctatattgtagtaatatatatttgtgtagcgtgatatttgttgctatcatacatgtttatactataggtcttgaaaaaatgttatgtattatttaattctgacatttacatatgctatactacaatatttgacaactaatattttagtgctatgatagaactagatatgctatgatagaactatagatcaattctttttttgctattgtatgtattttcatatagctattatatgtgttttcttgttttctgatacaaattaataaagccatacaatcctgaacatatagaaataaaaatcatctcacataaagtctgattccaaatctataagagtaaaagtttacataatcattctaatccaaaataacgtaacacaaattctaatccaaaataacataacacaatttctaacccaaaataacataatacaaggggaaagttattagggtgacccatatttcattcataataaccaaaaaggaatgctaaaaatatgagttatatgggtaataattatgtctaaaatgtccttattttcctttacagaaaaacaatattacagaaatgccatgactatttgattccagcatggtaataaaactacatttaaatacgaaactgccatcgtcgtttttgctaaatctatggctcttgttgtgacagatttgttttcgatcacagattttttggtcaaccacagattttttacaacatacttgttttgtaccacagactttacttgattaagttacgacagatttttattttttcgtagatttgtttatcgtgacagatttgtttcatatagtctccacagatttttctaaaatttcaaaatttagaatgttgaaaccaaatctgtcactgatttattttccataccgcaaatttttctttatggtggcagcagattttctatttgtaaccaaaaatctgttgtgttataacagatttgttaacccggaaaaatgttttatagtcatgacagagttggtttgtgtaatcacagatttaattaacttgttaacaaatctggtgttttacaacaaacttttgttaaaaaataaaattactagacagtcatatagtgataacagatttgtgtttagtgatgactgttttgtttttcagtgtcaaagcataacagatttactcatgtcaatgttatggccgatttgtttatgactagaataacctttttagtaataacagattttttgttggcagatttgcttttaaaatttcgaaattttttgttacatgagatttatttgctagccctcaagtaataacagacttttattagcgtttacaaatttttacaaaatattgtcatatttgacgtttaatgcattacatatccaattacgagtcaagcttggaaacagctaacaagctactctctctgatcctaataatatcatttgccgtcgtacaagacaaagacttgcaaacgtcacgacgcttagaagaatgtttaatacaaacacaacttctaacttaataattcagataataaaacttaattaaattcaacagtttgatgttagttttaatgagcttgttggtccgtttccggagattgttggtggtatggtggaagttgggcagttgaatgttgctcataatttgttatctgggaagattccggcgtcaacttccaaagcttgagaatttcacttatagttatagtttcgattagaaatcaaagaagaaggagaatgcaaggaagaaggttaaataagaactgaatcgagaaaataaaacgtaatgagagtttacttgttttgttttgttatttttatatttgtttatttattttaattaataatttgttttttttgttgttttttgttaaaagtatggtttttttattgattaaggttaattagtcttttaacttaaaatatgagtcattatagttaaccatcaattgagagagtcataatagttatttatgttaagattagagttagtctgagcaaatctttctaataggattcataagttgttgattagcttaattagttttaaacttaattaaaactagctaacatggaacaaagttacttcattccccctccaagaagcaatattatatcagatttgtgatatcagcaacagatcgattagaaagcacaagcaaaaccatatacataccttagtttcttaaactgatcaaaagatgaccaacttatccattggccatactcgatttcatctgatggcctccaaaccgctgcgtcatctttcttcactatatcaaccatactctagctgcatgtgaacccaagcgaacacattggaccttaacttctaggtcgagtgaatgcacacgtccttcagcgacaacttgcttccttccactaatatccatcaacttgcattttttattttctttgatgacctaagctcccattttacgctgtcatgattataatacaagtcagagagatataaaaatcagaatcacctgcataagtatactataaaagacttaccggagatctttgaggaggggatattagcatagatcgctgacttttcttgacaggagattttggaccagatgatttctgacttactacagcagatttttgacttgtttccaaagatttttgagctgatgctgtagattttccttctgaagattgctgagttgatgcagctttctaaataggagattcctgacctgttgcatcttttgtgttttcaaagacaactttgttcacaggccatgatacaaaagataatagacaatcctcaaggtatgttacatcaatagtaggtgtccagataaatgtatcaggttgatgtaccacatctacaaatatcttcactgcatttggtctgagaggtatcccatttactaaggtatcacgatcttgtgtctgccaacgtctttcagcaacatccacgtcatctgaagacaaatccagtagcttgcatttgttcatcgctgaataagtcctttggctttgtcaaacacattcatagaacatgttaatacttccatatatacattattatactcatgaagatgaatcataaactttacctcttctgcaatgtctcctggttgttgctcatatattaggttaacatacttagaggcaggccacgcaatcatcttaccgataacagattcaattgtgcatatgttaagcacaggtctccaaagatatgtgtctggtaccatagcagtgtcaaccaacactttgacatcagatgggcctaaccgacaatcattcactaagtcatctggatcagaagttattatacgcccctcaacaacagttgcatcaccattaccagtccaatcaatcaagatacacttaggttgtgatcttttgttaacgctctataaaattaataaagactaattactaaggcattcctcaaacaaataaaacatggatttgatatcaattacaaacttactctagcagctgagtttgaagcagcatcaggctattgtctctgttacaaaaataaaccaaagtcaaatctagtgttataatgcatcaagttaaagtataattaaagaagtgtctaacttggttctttattttgtcaattacatcttgtaactcattgacctttaactggagatgagcttgctttgcttccgtttcagccatacacttgtttttcatttggaaacatgctaatttggtcttattcatgtttcgacccattgccctcattcgaccaggattgtcaggtccaagtagttggctaagtgaatcttggccttcaaaacaagcagatgatggcgtatcacttttgacaatctctgatgcctctctctatcaagtacaagatacggattcacatgttatgatctaattctagcaatgaaaataatagtacaagatcttgtaactcacaatcttttcagccgcattttatttcactagtgtaccatcttttctagtacgtgacttgatccacacctgaagccttgacatttaactgggatttggactctcctttttctaattcagaccaaaaaaagtttacaaatagctagtaagtattcaaaagtagtgactgagtttaaacatgtaacataattgtagtatgattaccatatcttctgctagtctaaccattcctctacggctagtggtgtgaggaatctgtttgctccttatagtaaataaacttagttaattacaaatgattaccttaaactctttgctagttttgagcttgactagcttacgccactcaaatggagaaacattcttaggtcgcagcttcatcctcaattggttagtctaggcttttactagccgagatttccaagaccatgaagaaaagcaatcacgtatatatcatcatcacatggttctcatatcctggcaacatttcgatattgatataatattccgttagccaacaagaatctcaatatcttacattataccctaacatctacgtttgatttgaaactgactttgagatggttacgtatgcttcaagcactacaacaaatatggacattcttatcacgagaaaaatgctataatatgtctttaatagcttttcatgaacgctattttaggacactgttattatcaggagcggacccacaacaagagagggttgggcacgtgccctacactctttaaaaaaaaataaaaattcctttatataattaattcatttgctggaatatctgttgggcctaacgtgaagtaccctactctaatgttcaactcaattcaattaaaacaaatataatattttagcccaaaataattaaacaaaaaagcccataaaaatatggctctgccctaaaaaaagaagtcataacctagcttttgtgattaaacttcacgagggaaacattattgacattgatacacctagctttttttctttcgtcaattaaattttaaaaaattattctctttattggtttcttctcaatttggaatcattcagtcgcaaatgtctaaagtaagtaattttagtgattattttatgattgattaatactaaaattgtagtagatgattcaaatcattcgtatgtttttttttgtaattagatcaaaatttctaatctaaatttggtttctaatatatttattagggaggaattcatagatattacaaaagaaagttggaaccaacgcctgaagaaaatttggaagatttgctttcagaccctgcagataggaaaaaaccttcggactatcatccaaatgaaagagataaggtaagacgcaaatatctgattaaaggtccttgtcaacctcgcgggcatgattttcctaaaacactatcaggaaaaaaattgagacgattcaatctagagtggtttgatctctatggcaattggttggaatacagtgtgaaaaaagacaaagcttgttgtttggtttgctacttgtttaaagattacacagaaaataaaggtgaaagtgatacgtttgtgacgaaaggtttcgatacttggaaaaatcctcagagtttacgtgagcacgtgggattggtgaataactttcacaacaatgcattaaaaagggctgattgtttgatgaggccaggtcaatcaattgttcatgcttttcataagcaagatgaaatagtcaaaaatgaatacagaatcagattgaatgcttcaattgattgttgtagatatttagtacgacaaagattaccttttcgaggtcacgatgagtcagatgaatcagctaataggggaaatttcttagagcttgtgaaatatacagtagggcagaatgaggttataagcaaagttgtgttggagaatgctccaaaaaacaatcagatggtatgtcccaaaattcagaaagacatcgtacattgctttgcggaggaagttattgaatctataattcaagaagttgatcatgatgtatattgcttgttggtggatgataagtgtgtattttgcatgttttgagcatccatttttcatcattttagcattatattatcactgttttataccattcacatcatttgtcatcactttgcatgtttaggatagttttgcatgcatgttgcatatttgtgttgttttcaggtgatttggagctgtccacgagctaactggaagaagcggacctgatcatgacaaaccactcgacccagaggtcgagtaggagcttcaagatctcaagagaccactcgacccccaggccaagtagaagacaaaaccactcgaccacatcactcgacccccaggtcgagtgacttcctctccatcttctgacaaccactcgatcacgtcactcgatcacgtcactccagctactcactcgacctcccactcgaccacatgggtcgagtacagttcttaatccgtcccaatacttcgtcgttttgagtattagggtttcagaatatttggctataagtagcatgtacttcacattttcgcaaacaagaagtttttatctagttttattccgcagaccttgtgttctagaccttttgtaatccggatttctctttatctattcagtattcagtattcagcttttgttcttgatttcgtttactgttgttcattctattatcatcctgctgttacactgttgttatcatgttttcaacctgttcaacgtttatgcttactgttatgatgtctgagtagtgaataggtttctgaggatgggttagagtagtgtagaattctaagtatgctaggtgattgagtatttgttgatagatcccttctgaattagttgttcttaatgcctattgctttctgatcaactaaaatttgagcccagacatttccgcgctcaaaaggtgttcgatgaaatgtctgaaccactaattccagagactcgtgaccctgtaccaaggtattggttgcaaagagcgttttggctttaacttgttgattcgtaatgcctgttaggttagctctcgtcaatggtgattgagtctgggactaggttaacttgagagtctctgttgcggtggcacttagatttggttaatgaacttgttgtctaaagttaatttattgagcatgtcaatcacctgtaaactgagaaaacgaaactactcgattaccccatcctcgggaattctttatctgattgaattatttgtttactctattgttgtttactgcatcttgttatctatcgcttaatttctgcagttctttcttgttactcgacctcatactcgactacccagttgtctggcaacagactgtgcagtcgagtatccgtgttttattttctgtctgttactcgatctgtcactcgacctcacccagtgctctgcaaagagctgtgttggtcgagtgtttcactgtttctgtttgattttctgttttctgcatgttcacttaggactgctagaacacaccaaaacctgttattgcttggcttgacttagtgacttctgatcacatcttgattgttagcataacacccatttggattgacaaccttcaatactacaacgacatgatagtgttttaggtttaattgattaaaaacctattatcagtggataaatctgcagatgtttctgataaagaacaaatggcagtggtttttcgttttgttgataaacatgggacggtgaaagaaagattcattggtcttatccatgttaaagaaacatcttctgcatctctgaaatgtgctattgattcattgtttgctaaacgtggattgagtatgaaacagttaagaggacaaggctatgatggagcaaacaatatgaaaggtgaattcaattggttgagatctctgattttaagagagaatagttctgcttattacatccattgttttgctcatcagcttcagttagtggtcgtggcagttgctaaaaaacaatttgaagttggagatttctttgatatgatttctgccttgctaaatgtggttggagcttcttgtaagggaaaagataggattcgagaagaatatctaaaagagatagaggaaggaatcaatcaaggtgaaattaagacaggaaagggattgaatcaagagctttcattacagagacctggtaatactcgttggggtactcattacacaacattacaccgattagctcatttattctctgttatcattaaactgcttgagtttgttgaagaggagggaactgatagtaccaaaagacgacaagctaatggtcttctcaagtactttaatacttttgactttgcgttctacttacagttgatgttgcttcttcttggactcacaaatagtttatcagtggctctacaaaagaaagaccaagacattttgaatcctatgtcactagtgaaatctaccaagcaacaattatgcaagctcagagatgatggatgggattctttggttaatgaagttttttctttttgtaagaagcatgacattgagttggttattatggatggagaatttgttaatccaagaaacccaagaaaaagaagcaacatgaccaacttccatcattatcaagtggagtgtttttacactatattagatatgcaaattcaagagtttaatgatcgtttcgatgaggtaaacactgaattacttagttgtgttgcttctttaagccctattgattcgtttcatgagtttgatcagttgaaagttctgagattgtctgagttttatccacaagattttactcatgtcgatcggagatcactcgagcatcagcttggtctttacattgacaatattcgagaagatgaaagatttgctaattagaaaagtctaggagatcttgctcgcgttatgatcgagacaaagaaatatctttcgtatcctctggtttatcgacttttgaagctagttttgactttacctatagccactgctactgttgaaagatgcttctctgcaatgaagattgtgaagactacattgcgcaaccgtataggtgatcagtttctaaacgattgtctagtttgttttgttgaaagaaaattatttgataaagtgacaaatgagatagtgatcaaaagatttcagagtatggaaaaacgtaggataactttatagactttttttttaagaaactatttttgtattagtattttttatttaattttatttttaattatattgtgcccgaggttaaaataattcttagatccgccactagttattataggtaccccacatacagtagcgtgagtttagtatgctatgttatagttttataacatagctataaagaacagttgtattaccacgtttaattttcttaaaaaaattatatagtatttgatttttcatgctatgttatatatctctaatatagctgttgcgaaatgttattttatcttggtttgccttttttcaattggaaaataattagtcaaattatgtgctatgttatgctcttatatcaatttataagctacgatagatgattaaaacatagcattagtcatatgttaaatattctattacttgtattcttatagcattttctgagatgtgattatagtacacataacctgctttataaaatctcatacattgaccattgattaaacataagtttagatccaaaatacataagaaaagtctcaagcacaaaataaagcaatacatgagctaagtgcataagttcaggtacgtagcattacacaagaaaaccatcagtttaagacataatgaccttgttctctggccaagcaatacaggagttaagtgaatctttcataatctctatctcatctgatggcctccaaacttttacattgcccaccttcacaatatctatccacactttaactgcattaaaacctaagggagtgtggtgaaccttatgtgctggatcatttgttgcccatcgtccttcagccacaactttattctttccagttaaatccatcaacttgcacttcttattctccttggaaataattttgttaatgccctgccatgtttacaatataaaccatcagtcatcataattaacaaaaacaacttcaagtaacatatgaaagcacttactggagacttcctgagaggagactgtgctggtaaagtattccttattggagaacttggacctgttgcatcatcaataggagattcagaaccagatgcagacttagaagacatagctgcagatttggactctgacgcagcctttgaagctgttgctgaagttttggacccgtctgcagacttcgaagttgtggctgcagacttagccttcgatgcagacctagaaacttctgatgtagaattatgaccggttggaaatgagggattttcaaaatcaactttgctcaggggccaggatacaaaagccatcaaacagtcctcaagatatgacatttcagctgtaggtctccatagtgatgtatcaggctgctttactgaatccacaaatactttaactgcttttggtccaagaggaagtccattaaccaatgcacttggttcttgtgtctcccaacgcccctctgcaacaatgacttcagcattcttcaaatccagtagtttacatttgtttccttttagaccctatcaaacacaatcagtaaacaaatccaatacaaataatcagcatgatacacaggggaaatacattgataacacagtgcaacaaatttaaattaccaaaggtgcaatgtcttcaatttggatgtctgtgtctagaagtttacacttatcagctggcaatgcgattatatgtccaacagcttttttcatattaaagatcttgtgtgcaggtctccatagaaatgcatctggttgatatgcagtttcaactaacacttttaggtccgtagggcatagacggcagtcatcactatgtcatcaggatctgaagaaagaatacgaccctcaccaacattttcatcagtctcagaccaatcaacaaacacacacttacgatgtgaatttctgttaacactctgcaaaaaattatgagaaaataagagttataaacttaaataagaagaatcacatagatgatatgaaaagaataaggaatatgttactcttgcagctgagttttcacccatttcagcttctggcctctgtaacataaacaaaactaaagtcaacttatataactctaactggttgatgaatattttaaaactcttaaagtatctaacctgattcttgattctaataatttcatcttccaagtcattgacctgtttttttaatttcacttgcctctcttccatttcagccatacacttgttcttcacttgtaaacaagctaatttagtcttactcatgtctctccccattaccctcagcctaccaggattgttaggtcctaaaagcttggcgaggtgatcttcatctggatttgttgaaaatgttggaggatcatttccaacaatttcagctgcttcttgctggaaaacatgaagacagtgtcaggttttactagtcgaagacacactcaatcaacaactctatttatacttacaatcttttcagctgcattagtatctactggtgtaccatcctttttggtacgagacttgatccaaacctgtagtcttgtcacgctggaaggatctctactttcaagtttctgtacaaaaaacaacatttgagtgactgtcacaacatacaagcaataggcgtagaataataagcaacataaatgaagtagatatcttgccatttcttctgttagtctgacaatccctttacggctagtggtgtgaggtatctgtttctttcttcttgctttatatgtatcactcacagcctaacaatgaaacatgttactaatccccttttaaatacaaaactttatattcacaagtaattaccttgaatgctgcactggttttgagtttgacaaacttttgccactcaacaggattaatattagttggtctcaaattcatcctctcttggttatttgcaaccaaattaataaccttcaccctgcgcgacttgtgtgctctccacatatttcccatctggtttatcacagatatactttgccaatcttcatcaagctcaaaccttgaatgcattcacgaacaatcacaccataattatagaagtaccagatcaattacagtcaacttttttaaaaaactacttgttacctgaacagatttccacataactgttttcagatctcgagtcactttcttccagttaacaatgttgatagggacgtgttccatcactcgatcacatcatctccatcatcagaccaccactcgacctcgtcactcaacctggaagtcgagtatcttctaacaccactcgatcacatcactcgaccccaacgccgagtgacttcatcccattgccagacctctactcgacctcatcactctacctggatgtcgagtatcaccatcaccaccactcgactgcatactcgatgacaagcttcagagccttcttcattccgcactcaaccagacactcgagcacaaggaagaaaagaagactccagctattcacttgacctctcactcgaccacgtgggtcgagtacagttcttaacccatcccaatacttcgtcgttttgagtattagggtttcgggatatttggctataagtagcatgtacttctcattttcgcagacaaaaagtttttatctagttttatttccgcagaccttgtgttctagactttttgtaatccggatttctctttatctattcagtattcagtatttagtttctgttcttgaatttcgtttactgttgttcactctgttatcatcctgctgttacattgttgttatcatgttttcaattcgttcaacgtttatgctttctgttatgatgtctcagtagtgaataggtttctgaggatgggctagagtagtgtagaattctcagtatgctaggtgattgagtattggttgatggatcccttctggattagttgttcttaatgcctattgctttctgatcaactggaatttgagcccagacatttccgcgcccaaaaggtgttcgatgaaatgtctgaaccactaattccagagattcgtgaccctgtaccaaggtattggttgcagggagcgttttggatttaacttgttgattcgtaatgcttgttaggttagctctcgtcaatggtgattgagtctgggactaggttagcttgcgagtctctgttgcggtggcacttagatttggttaatgaacttgttgtctagggttaatttattgagcatgtcaatcacctgtaaaccgaggaaacgaaactactcaattaccccatccttaggaattctttatctgattgattttattgtttactctactgttgtgtactgcatcctgtaatttgttgcttagtttctgcaattctttacttttactcgacctaatactcgaccacccagttgtctggcaacagactgtgcagtcgagtatccctgttagattatctgtctgttactcgacctgtcactcgaccacacccagtgctctacacagagctgtgttggtcgagtgttttgctgtttatattatagtattattcggcatttactatatagctaaatatttatatgaataagactaatgttattaagttactatcataaagttcaaaattaagtagtgattaacgaacctttctcatactcaatagcttgctacataaagctctacaaacaacaaaatcacaaaatcaatctattaaattcgtcgcacaaacactgataaatattctatatagcaaaacatctctagagctatgcataagaaataccttggtatatgagaattctgagggatcatttggactgaggcaaattgtggttgtggtaattcttattttaatatctgtccagcttcaccttcgccatcctgtttcatagattgacaatagtgacattagattcttatactaagaaacaatgcttaagaataaagattaaaatgaaaaatattaaaaattattcaaatgaatgtataagaagagtgatagacttacttggtttgttgaattgatggagagaaaaagagaaacaactttcatcaaactcgatacatatgtgtgattttttgagttaagcatgacttgttgaaccctgtaaaaaaaaaatacacatgcaaacataaattagttcaattttaataagagactttgacaaatagaaaatatgtatgaatgctaaacgttattgcttaaactaacattcatcccattatcataaaaagtttcttatgagttggtgcacttttagtcttctgtcgtaaggttatttatagagttccttgttgatgatagaattaggtgtgatatggaatcgagtaaaaatcggtaagcaagcaaacatattttggaaaatatgacgattataaataataataaaagatctagtatttaggtaaggaatatacctttaaattctcatttaagtgtactaattagtttctaaatttttttgagtctatgtataactgtcataataaatctggatttgaattcgatataattattacattagcataaaatagtcatgttgttatcgtaatcaagggaaatcttaccaagtttatacagcatggatcatgtatattctcgattttttgtataacaaaatatagaaaatccagattaattatagaattttttatgatatgttaccgcgtaatgcttcttcccttatctactaaatataaatattaattaccattatttgattacgatattttcagttagtagttcatatttagtagatatgatcgagattataaatattaatagtatttaattttgaagatttgatttccatatgttaggatctcaaatctcgtcgtatgggattaaatcagatatggttagttatttggttgttcgaatttttagggaatattatgtcgtgtaatattgaattagtagagatttaagggattaatgtgtgcaatttatgagggtagtgcaaaataatatttttgtttaggtaagtaattagtgcaaaatgtgaatagttgatcaaaaatttggtcattgtcctaaagaagacaatcttctctgattgattttgtagggactaaacatacaatatcgaaattgaaaaaggatttttcgacacaaatcttccccaaaaaagtatatgtagataaaatgggaaaatatttgttcgaaactccaaatccatctgaaatagttttgcaagaaaaaaaaagagagaatatttattttacgtttgaccatattttacggggggaaatatcaaaaaaaataccaactttcaaatttgggacgatttaatcttgaacttcacacaataaaaataaatcgtaaagtttttgttgactttctaaataaatgacaaagtttttgttgacttgctgtgagttctgaaatccacactagagatttgattttaagattatgagaaaggacggctagatcttcactgaaaccttgagagttatattgctaagaacgaatggacttttgtattgattttgacaaagcttttacaatgagaaaagatattacaagtgtaaaagtgtgtgtgtgtgaatgtaagctagattcaatgtgtcttcctagtcgtcctagctcccttatataagtctacgcacgtggtagctccgtccgggatctgcggagatcctcctggatattcggcaggtcagttccgagatatcaggtccgctccgcgaatatctcctcgtcagttcctaggtcattattcgcttatctctcttcatcaggtgactgggcttatctggcccaaatacccattcgcgtatgtgggctcgtcagctgcgtaggtcctctacttagtgggcttggtgggcttttgtgggctggcttggtattttcgcaggtggattcctggaggggaatccaactccaacatttgccccccagcccattgaatgagtaggtgaactcgatgagcggacatataggtcaggtaagattgcgaaaatattcttgacgagaggataaatatggttagatcagtcggttttgaggataaactcaacaatttcgttttattttcagattcctttaaccaaaagatttcaaggagatacgcgagataagtcgctgctaatgtggacggccgagatggagcgtcagttcagcgcaccgcatctgacggtccagatcaggcgcagagaagagatttccgcaatctcgaaaatcgtggtgatgatggctttaaataacttcccacctctacacttgacgtcacgtcaactcacacaactctcaaggtaacttctctcctcctttattatttactgcgctttgttttgtagaagtagaaaaatctcgtttttatttttgctatctccttcgtttctctgctattccctccttctcgatctgccttctttgctttttactttcatctctctcgtccttctccgtcaaaacccaaagatgagagacttcgaagattctaagaacaagagcaaccacagttacggcaatgattcgagttcatccgagacaaggtcgacggcatcaccgccgcaagtacagagacgcgccataaccctaggcggaatgggtccaattcatccgccgtcaacctgagccgacaaacagaagaagaaaaaggctgtcaagcaagggggaggcacgccgatgacgaacgacaacctggtcgacctccggaggagatgccaggttccggtggaggtacatatgatactcccaaggccaccgctgcatcctgagaacgtgccggtcgggtggtgctgcgcctatgccaatttcttcgagaaatgcggcctatttttcgcaattccggcgtgtattctcgagatgctctactgtctcggcctcgcctttccccagatgtgttcgaacttcgtccgccatgtgctcgcgttattcacccgggctcgggaagtaaacagagaattcagctgccatgacctgcttcagctctgccaggtcaagaccaatgctaggagtgaccaagagacgtactacatcagtgcacgtcccagatctctggtcctcggcggtttgaaagcctgtcgagacaccaattggcgatccaagtatttctttttcaaagtagatcgtcattcagttggcaattttgatcccgcgaggataacaaggacctggtctaccaacctgggtcagatggagacctgagcctcttgatttttctttgttgtttgtgttgagtccttgactgcttttgctaatcgttagtactgaaactaattgcttgtttttgatgatttgtagcaaggaccaaggaagttactctcttggagacggaacttgagctgttaacccttctccgacgtggtcagactgactggtccactttcagcagaaatcgcatcgtagctgctcttgccgtagctccagcagttcccgtagctccagcagttcccgcaatcgttccttcagcagcaccgctagatccgatcaaagaggtctcgcggattgaaccagttccccaggctgatctgcctataggtacgagttccgttatatttactttggtttttagaaatgtgcgagttatcgagacagctgcgcaactcgaattgctaactaacaaatgtcgtgctctatttgttcagttcatcctgattccagctccacttcagaactcccgctcatcagaagaatgaggcgcccaagtcttcgtgttcaacgagccaacgtcggggctcctgctcgtgctggtgatctgtcggtcgcggtgaccgcggctcaaaacactctacctttttctagcgcatctgcctcagcatctcatccctcgcttcctgaggtcattgtcgggaccttagctgcagcaggtcaaccggataacaatcaggtcgctcaggtctctgggccatctgttgttcgttctgatggtgcaccgtcctctccaaagagggctcggacccagccggaggtgaatttggcggctgagtaggtcgtgagcgaccagagggtcgcctctcctagagaggagaggatggaacctgcgactgctactccggaggcagctgcgtccgcgataggcgatcctcgagcaggtcccatggcggaggacgacgctccagaggtgggggccggtcttcaaaccggtctcaggaagtgaggcagacgtccaactccagcggaggatccgcgggaagcaggcctttccactggtcttacactcacgaccgttatcaccgaatcgttgaggacgaggctgggttagcgaacctgcttcgccacgtcaaagggaggaactgccagattcctaggtgaagaacatggccgaggcggcggcctatgatgacatgatggcgaaggagggccaagtaattatcgataactttctccttctaatttatatctttttgcttagttgtgactttctgttttgcttttggtaggcgatagctgccacaaacaagctggttgctctctatgagcagcgtctaagccaggtcccctaggcgaatgagcttgaagaaggaaaggccctcatccgggagctgacgtcaagtgtgaaggctggtcaggatctcgaagtcttgttccaggtacacctcggttttgacttgtttataaatagttcgtcgatgatttgatgattctgacctgattgttatttcaggcggagatcgagaggcgcggtgcaagtcgaaggaggtatcagactttactctaagcaagttggatctcccgcaggttttagagatttcggtggtacgtccaatagacgtcgacgagcaaggaacgccaattggcttggatgagttcaggagcaataaagatgcgtttacgggaggtctcgcggagggttctggtactgtctttgctacgccagccgaagaatcgagggagtgatcactttcgctccttgtttgttttaggatttcgtgttttgtttcagacttaatgcctgtgaaggcttttatcctttcgtttattgccttttgaacttggtgcctggaaaggcttttatcctttgttcgtttaagtactcgaatgcttgggaaggcttttatcctttttaacaagtattttttatctttcgttcaagtgttgacacttcgttgattttggtgcgagaccacctcgctttgtcccggtattttcctcgaaggttaatactttgaatgagtttgagttgttttgtcttgggaacctgttgaagtgaggtcacacaagggacctgccagattttgggagctgggcttgtggtatcgccaggtcgcgaatgtaaccttcgtttcttccttgtttactatgttatgcgttgatagcgaaagagttagatttggttgtagtaggtgagctccgatgaagccgtagtgatgtgttcttataagttttagttcactgtcgactttttggaagcgagatcacaaaatggatccgccaacgttcgggtgttgggctttatgtatcataagattacgaatgagttttaaatcatagtgtaaatgattgttttttgcgaaatatgataatgactatcaaaatttccttttattcttatctcgaaattgttaagtacaaaaggaggtaaagcaagcgacgatctggcgtttggtcgtcgagcagggacctgctcgatactgaagggagattgaactgtcaggtgagcagctgatcttcgttgatgagagatgcgatatccgtttcccttgttgaagttttgtcttacaaatagaagggttgagatggtaattgcgttggcggaggtgactgcctgaatacctggttaggggattaagcccttttgatttgattgaattggtggctgcgctcttgggaggagctgcctacgtaccctgccaagggatcaagccttatcgtagttcgattgtttttgagtacctattcgtggtatttcttgagatgcatggcattccaaggccgtaactcaggtactccgttgataacttttacgagcttatagacgccgtcacgtaccaccttggtgattcgatagggaccttcccagttagttcccagttttccagcgtttagctctctcgtgttgctgaacacttttcgtaagacgagctctcccacttcgaatctccgaattttgatattggagttatagtagcgggcggcagcttgttgatagttttgaactcggatcattacctgatctctgcgttcatcgatgaagtccatgttgtcctgtaacatttgcatgttcaggtccgggttagcaggactggcggtccttctcacgcttggtactatggtttcgacagggattactgcttctaaaccataagcgagggagaacagtgtttcttgcattgatttgcgaggtgtagttcggtaggcccagagaactccgtggagcacgtcggaccacattgatttttttgaatcaagtcttttcttgatgttgctaagtatagctttgttggcggcttctgcctgtctgttaccttgtgggtaacgggggggggggggggggggtggatgtggtaagacggatctttcacttgtcgcaaaatgcgttgatttttcccgaggtgaggttagtcccattatcggtgatgatctcataaggtatgccgtgtcggcatacgatgttttcccataggaagtcctcgacttgtttctcggttacctgttggaaggctttagcctcaatccatttggtagaatagtcgatgaggaccagcaggttttttagtctcttcttcccaccggaggcttccatgggacctacgacgtccatcgaccacttcataaatgggtaaggggaagatatcgaggacatttcctcgggaggttgatgaagagtaggtgcgtgtcgttggcatttatcgcacttgagtgaatgagctacgccatcggctagcattgttggccagaagtaaccttgctttttaattctaagggcgagggtacatccactacagtggctaccacattgcccctcgtgcatgcttttcatgagatctttcgttagttgcccataggtacacaccatgtagggacctgcgacgctgcgtttcatcagtctaccttccaggatgcagtaccttgcgctctgggctttgagttttctggtctcccacttgtcgggaggtgtgatccctcgttcgatgtaatcgatgattgggattctccagttattgtacggttcaggttcgtacgaggcaggttgttcgggggttccgagctccggctcttcctccgctgcatctgcctccgcggctgatgcaagggctctagccacggcggtggtgcttcgggttactcatgtaaagttgcaagttgccgaggtttccgtcccagcgtgtttgacccttaggtcgatgctgaggtgttctattccttcaattgggataattcttttgacgaaaggatctgacgtggaggcgagagctgccaaggtatctacagaggtgttttctcctcaggggatcctggtcagttcaaacgactcgaactgttgggtcaaggttttgactagttcgaggtacgcttccatgcgctcgtctttagcttcatattccccgtggaactggctggtgacgagttgggagtcgctatgggcgtgtatatcgcggattcccattccttgagctagcttaatgccagcaatgagggcttcgtactcagactcgttatttgatgcgttgaatctgagtcggaacgattgttcgatgacttccccgataggggaggtgagttgtattcctactctggatccctgtcggttggaggagccatcaacgtggaggagccatttcttattggagttggttccatccaggtccgctaacgggagctcgattacaaagtcggctaggacctgtgctttctggctggttctggtacgatattctatatcatactcacttagttctatagcccattttgcaagtcgacctgattgagtcggactgaatggttctgattggttgagacgtcatcactacgatgggatgtgattgaaaatatggtctcagttttcgagctgacatgactacggccagtgccagtttttccatttctggataacgagtttcggtgtctatcaacgttttactaacataatagatcggtttttgtccttcgtggtcttctctcaccaggacgccgcttatcgcggttcgggagactgccgtgtacaggtacaatgttctccttcttcgggttttgcgagtatgggtggtttggacaggtacgctttcaattgtttgaaggcttgctcgcagtcctcgttccaatcgaactttttatccttttggaggagctgatagaaagggacgcatttatcggtggacctggatatgaacctgttgagtgcggcgatacggccgcttagttgttggacctcccgtgccgtttttggcgatagcatgtcgatgaaggttgcaatctccttaggattggcctcgatgcctctttcggttactaggtatccgaggaattctcctgagggaactccgaaatagcatttctcttaattgcgggacatggtcattttcgcgagctgacttgaccagcatgtcgtcaatatagacctccatcgttttacctagctggtcggtgaacattctgttcaccaatctttgttaagtagctccagcgttttctaaaccaaagggcattactttataacaataggtgcctcggtcagttataaaagctgttttttcttggtaatctgggagcataagtatttggttgtacccggagaatgcatccatgaaggacaatagttcgtgtcccgcagtggcctcaaccagtcggtcgatatgtgggagtgggaaactgtctttaggacatgccttattcatgtccgtaaagtcaatgaatactctccacttcccgtttttctttttaacgacgaccgggttggcgagccagtcagggtattttacttctcttatcgatccgatcttgagcaaccaatcgacctcatcgtgcacagctttagccctctcggtacctagcttgcgacgtttctgctttataggtcggtaggtcggatcgacgttgagttcgtgtgaggttacctcgagccttattcctcggaggttcgcatttgaccaggcaaagctgtctttgttttctttgagaaaggttatgagattctctcgtatcgctgggtagaggtcttgacctatcctaacgcatcgtttgggatctgattcgtctatgcagacctgtgttatcaatgactttcgaggtccgcgttgagaaggatcagaggatctgactgttttcatttccgcgagtttgtcttctatcattagtactacggggtcagcctttttgataaggtcgtagctgcccatatagcattttctggagctgcgttggctgccgtgcacgactattattcccttgtccgaggggaatttaatgcattggtggtaggttgatgggatggctttcatggcgtgtagccatggtcttcccagtattgcgttgaaaggagctttcttgtcgactacgaggaaactcgtgagtcgcctcactcctcgtgcgacggttgggagctggatggttcctagagaaaaggtcgtatctcggcgaacccggtaagtggcgttttcctgccctgcggctcggaatcgaggtgccccattcttttgaaggcgtcataaaagagtacgtcaactgagcttcccgtgtcgatcattatacgggagatttcgtagttgcctacatcgattcgaataacgagagtgtcatcgtgatgtttatcgaggtcggtggttttgctttcccagaatgtgatctggtggtcaggtcccatcatcgggctcttgccttttgtgtaagaatttgccttcctgtgatgagttttgatcgaattgattgagtcgttgcagagctgagaccctcccatgatgaaatgatgcgtttaggggagaggtgctcggttgcgcttctgcagaattttgagaggcgtaatggaaacctcatgtttttcttatacggggcggggggaggtgtggtgactgaccttcctgtcccgccacctagatcgagttctgcaaagactaggtctatgcgttctctcctagcaggtgggggagagtcacttccctccggtgttcgttcccgtttcttttgcttgggagtttgctcctcctcctgttcgtcggaaggaggggtttcaactttggggtttgaaccttttttagtctttcccccagctgcgattaactttttaacggcgcgacactcctccgtggaatgtcctcttttcttgaggcacttgcaatattttccgaggtcaagttctggactctagtcctcagctgcctcgtctattgcgaataaggtatgctgcccctgcgtttggttttcctttttgaagggtttcttaattgcaaggggagcgttttgcgttttagattctttgaatcgtaaggccagcacggcgagctcctcttcggctttggcgaagtggagagctttgtgaagggcatcgtctaaagagactggttgcctaacagtgagttcctcacggaacctagaggagaaccaaaggtcgttacgaagggctgctatggctacctcttcgtttaggtttgcaattttcgatttgatggctttgaatttttcgacgtaagatcgcagggattcgttctgaagttgagtgagactctagaggttggtttcagacgtcctgtgctcgataagtactgaatactgttttaagaaagcggcggcgagctggtcgaaggtatcaatggagttctcttcgaggctagcaaaccattcgagggtcttatagttatattatagtattattcggcatttactatatagctaaatatttatatgaataagactaatgttattaagttactatcataaagttcaaaattaagtagtgattaacgaacctttctcatactcaatagcttgctacataaagctctacaaacaacaaaatcacaaaatcaatccattaaattcgtcgcacaaacactgataaatattctatatagcaaaacatctctagagctatgcataagaaataccttggtatatgaaaattctgaaggatcatttggacagaggcaaattgtggttgtggtaattcttattttaatatctgtccagcttcaccttcgccatcctgtttcatagattgacaatagtgacattagattcttatactaagaaacaatgcttaagaataaagattaaaatgaaaaatattagaaattattcaaatgaatgtataagaagagtgatagacttacttggtttgttgaattgatggagagaaaaagagaaacaactttcatcaaactcgatacatatgtgtgattttttgagttaagcatgacttgttgaaccctgtaaaaaaaaatacacatgcaaacataaattagttcaattttaataagagactttgacaaatagaaaatatgtatgaatgctaaacgttattgcttaaactaacattcatcccattatcataaaaagtttcttatgagttggtgcacttttagtcttctgtcgtaaggttatttatagagttccttgttgatgatagaattaggtgtgatatggaatcgagtaaaaatcggtaagcaagcaaacatattttggaaaatatgacgattataattaagtgatatggtaataataaaagatctagtatttaggtaaggaatatacctttaaattctcatttaagtgtactaattagtttctaaattttcttgagtctatgtataactgtcataataaatctggatttgaattcgatataattattacgttagcattaaatagtcatgttgttatcgtaatcaagggaaatcttaccaagtttgtacagcatggatcatgtatattctcgattttttgtataacaaaatatagaaaatccagattaattatagaatttgttatgatatgttaccgcgtaatgcttcttcccttatctactaaatataaatattaattaccattatttgattacgattattttcagttagtagttcatatttagtagatatgatcgagattataaatattaatagtatttaattttgaatatttgatttccatatgttaggatctcaaatctcgtcgtatgggattaaatcagatatggttagttatttggttgttcgaatttttagggaatattatgtcgtgtaatattgaattagtagagatttaagggattaatgtgtgcaatttatgagggtagtgcaaaataatatttttgtttaggtaagtaattagtgcaaaatgtgaatagttgatcaaaaatttggtcattgtcctaaagaagacaattttgtctgattgattttgtagggactaaacatacaatatcgaaattgaaaaaggatttttcgacacaaatcttccccaaaaacgtatatgtagataaaatgggaaaatatttgttcgaaactccaaatccatctgaaatagttttgcaagaaaaaaaaagagagaatatatattttacgtttgaccatattttacgggggaaaatatcaaaaaaaataccaactttcaaatttgggacgatttaatcttgaacttcacacaataaaaataaatcgtaaagtttttgttgactttctaaataaatgacaaagtttttgttgacttgctgtgggttctgaaatccacactagagatttgtatttaagattatgagaaaggagggatagatcttcactgaaaccttgagagttatattgctaagaacgagtggacttttgtattgattttgacaaagcttttacaatgagaaaagagattacaagtgtaaaagtgtgtgtgtgaatgtaagctagattcaatgtgtcttccaagtcgtcctagctcccttatataggtctacgcacgtggtagctccgtccgggatctgcggagatcctcctggatattcggcaggtcagttccgagatatgaggtccgctctgccaatatctcgtcgtcagttcctaggtcattattcgcttatctcccttcatcaggtgactgggcttatctggcccaaatacccattcgcgtatgtgggctcgtcagctgcgtaggtcctctacttagtgggcttggtgggcttttgtgggctggcttggtattttcgcaggtgcattcctggaggggaatccagctccaacacttgccatttgagtcatgtcgttaaataggttaacaagattttttacgatgttaatgttctgtttatctgctctgttagaacaaaacgatatcgtttattgcagacacacacgacgtcgtttgtctgttgaaacaaatttaaactctaaatccccaagttgattttattatctcaaatccttagaagccgaatcgattcgaatcccatcaggcgaggagacgaacgatgttcctcagcccaaatcaaatcgaaagaagagaaaacgaaagaaagaagttgaagtagatgacgtcgttttgttttaacagagcaaataaacgagacattaacgccgtaaaatatttttgttaacctatttaacgacattactgaaatgccaagtcaacaataactttgtcatttattttgaaacacaacaaaaactttatgatttatttgtctttcatgaagttcaagattaaatcgttccaaatttgaaagttagtaattttttgacatgttttccatattttacgagttaattttacaaatttccatccatgtaatataaatccgtatattttgcgatctttcctattcatatcatgtacgctgtagtctctctagattgacaatcgttataagaaaagaaaaagaaagattaatactctcgcgtctcaatcatacacaacccaagtaaaaataacaaagatacttaagagcatcttcaacggatgaaaatgtaagagtttcttaaaaaacaaaaagtaataatattttaatgttatgattatattttaattttttaatacacacaaaatactaataacgttacacgtgtttttgtgttggtgataaaggctcttagataaggatttttgttcactctctctctctttttttttacagcttttgattattatataatatatttttttagagtctctgttaatagactaccgttaagggtggtctaagtaaatgacatgaaacttatctagataaattgatcaaatagtatcttaatctagtcatttgtaaaaagtcaattacacatgtgaacgcgatggagatatcggtaggagcccaaaaaccgaattgagaaacaagtacaaattttattaagataacgataacaataataaaattacaacaacaataattaaggacagaaagtaaatcacggaggcaagatatgatatctttttccttaattcaattaatcggccgtaagtactttttggacatgacgatttatgaatctcaggatacaaccgatcacgaactaatacccgagcacacaagtattagactcaatcgaacttgatctacgatatactctcgaaattattaaacaaagaacttacttttaagaggcaagagagaggagagactttagaatttagagtgttttgtgtttgagagcttgagaaataatgagaggttgggtctctttatatagtagagggagataggattttgtgaaattctcaggatatgcatgatatattttgagactatcatgagaatatgaaatattttaaaaatatttcaataagattcaactcagcaagcccaataactcacaagcatgacggtctgcaagcccgacagcccttgagccaacgacggcacgacccgacaactcgcagcccggctcagcccggttcggttcggttcggtccggaatttagcccaagtgtcccaatttacacctttatttctcattcaatacaactccatttttgacgtatgagtataccattttgtagtactctttaccagctttccaatacactaatgacccgacaattctgttcagccgtttggccggaattcggccggaaaatcaccggaaacattttatgtcaaaaaagttccaacaatcccccacatgaatagaaataagtctaaacatatgacgactttactaatcctaaggactgacccaactagctagactagacagaccttcgagagtataaacgaaaactaattgtatatgagttggtggcattttttagctttgaacctactcactattagtacctgtcaagtttactcggccagatggtgaacatgatatcttgaaccatccggagtttgatgcaaagttggacagcaggtataacacaacttcattttcttgtagaacgaggttctctgtttgtgttcattatggccttcaacatgcctggttaatcatgattgaagttggagagtatagcctcacatattctcacattgcttgtattcaaagaagtatcctgtaagtatttcacatattttacaaagctaggttcaaatcattaaaagcaaatgcttaacctttatacatataggaagcactgtacatcatttttggaactagtaagacacaacagtctctcagtgcttataagagatttagtttgatttaattgtccctttgaacctatgtcatgggatctccaatctttgtaggtggggttaccatcaaacttcctcttaggtggtcaacttgatctcgattcaaaccttttgtaaatggatccactaggttgtcagctgacttgatgtaatcgatcgtgattactccagttgagataagttgtctaatggttttatgtcatcgtctaatgagacgagatttaccattatatagggtactttgtccatgtctttagctgaatggctatcacggtgtacacgtattgcaggcacaggtttcccccacattggaatgtcttccaggaaattacggagccattcggcttccgctgcagttgtatccaatactatgaattcagattccatagttgatttcgctgccacgatttatttgctagatttccaggatactactgcacctccaagtgtaaagatgtatccacttgtggatttagagtttttggaatctgcgatccagttggcatcactgtaaccttccaaaactgcgggttctttaccatattgcaagccatgatctttggtataatgtaggtagttcaaaactctagttatagccttccaatgcttatgtcctggattacttgtgtagcgactaagtacatttatagagtgcattaaatccggtcttgtactgtttaaagtacattaaactgccaattactcttgcatattccacctgttgcacatgttcaccagagtttttgatcaggagtttttgcagtctcattagagtaatgcttgaaacgatcaagtatcttctcagaatagtgggtttgagacaaggtaagaccttcattagttctgatgatttttatacccaaaataacatctgctagacccatgtctttcatttcaaaagatcttttgagcatgtttttagtttgatttatgatatatgtgttgttccccaatatgagcatatcgtctacatataaacataacaaaatgtaccctgttggagtaattttgaaatatatgcatttgtcacattcattaatggtaaaaccattagacatcataacactgtcaaacttctcatgccactacttaggagcctgtttgagtccgtatagtgacttcacaagtttatacattttgtgttcttgtcttaggataacaaacccttcatgttgtttcatgtagatttcctcttccaaactccatttaagaaagctgtttttacatccatttgatgtatttcaagatctcgtaaggttgcaatgcttatgagcatcctgattaaagttaatctcgttactggagaatatgtattcaaagaaatctaaaccttttttttgtcgaaatccttgtatcacaagcctagccttgtacctatcaatatcaccattcgtttccttttaatagtaaaaatccatttactccccaatggtttagaaccttggggtagatctgctatctcgtaagtatgatgttgcaagatagagtctatctcaatattgactacttccttccaataagatgcatcagggatagacatggcttctgaataagttcttggtatgttttcagctaaaaacaccatcaagaaatcatcaccgaaagatttctctttgcgagctcttttgctccgcctaggttgttcttcaggttcctttactgtttcttcaacagtaatagtacccaaactattttcctcagcctccgaggttgttgaatctcgttgttcacgagtttgttttttgagttctcctacaaggaaaaatatcttcaaagaacgatgcatttcttgattccataaatgtattttcatggatatctggaatattcgattttttaacaagaaatcgataagcactgctgttgtgcgcatatccgatgaagatacaatctacggtcttaggcccaattgtgacctctttgggaggtggtacatccacttttgctagacacccccacacttttaggtatttgtacgagggtactgtacctttccaaagttcatgtggtgcctttgcagtcaccttatgtggtatcctgttgaggatgtagttagtggtaagcaaaacttcccccacatgttttgggctaacccaagttcatgcaacagtgcattcatcatttctttcagagtttgattctttcgttccgcaactccgttagattctggtgaatacggagcagttgttttgtgtataatgtctttttctctacaaaatacattgaatggctcattatattctcctcctctatcacttcaaactatttcagtagttctctgaagttggttttctacttcgagtgtaaattctttgaattttaccaaagcttcatctttgttatgcaatagatatacataacaatatcttgtgcaatcatctaggaaggtaacaaagtatttcttaccgcctctagtttgcacatattttaaatcacataagtctgtgtgaattaaacctagaggttcagttgttctttcaactcgtggtgacggagtttttgtgagttttgcccgtacgcatacttcacatttttcttggttagttttgaatatcggaattaaattcatgttttgcatttttctcattgttttataattgacatgtcctaaacgttcatgccaagtagtaaactcaacaaagtaagcaataggattttcatttatttcaacaacataagctacagttttaggaaagactgtcattacagacattttgaccagtccacccttaacaaaaccctttctcagatacaccccatgtttctaaagaactagcttatcagactcaaagttaactgcacatttttaatcctctaaaaattaattaagtaagaaaaaattttagtactatttgtgtcaatcccctagataaaaatgagagcaaacactaatttaatattaaattgaatcaatttttgaaaatatagtggaaatatataccctaaattggaaataaagaactcaaatataatactacaaactaattttaaaataaaaaaatttcttttaaatagtgaaaatatataccctaaattggaaatagaaaacccaaatataataccataaactaatattaaaaaaaatcgaaatttcttttaaatgattgaaatatataccctaaattggaaatagagaacacaaatttaatattttaaatttattttaaaattattttggttgaaaatattttatataaaattatgatattattgaaaaaataaattagtgataatacttttaggaaaaaaacttcataataaatcaaataatgctatttttggaagtttatggagggtgtgctattattgtccataaaacttgatttagtgctatttttaggaatttatattttttgtttgttgctgctcgtttttggtgaatctacttgtcgtttattgcataatctcgagctgtttctagaagaaaactcttctattattggggaatttatgccccttttcgtcattaaagttttcttaagaaataatacacagaccgggaattgaaagggtcgtttagctttttgtcttctttgttagtttcaatgatactctgttacttgcttttacccgacaagctgttgatgcatgtttcagctgctaaaatatgaagcatcaagggactaaaatgatgttactttccaaaacatgttgtctttgatgattttggcggtgccctatagtggaaactggaaactgttgtctttgatgattcaagaatgtgaactttcaataagtttcttgatcagtttttgtcttccgcaaatttttagctatgaaaactctatttttcttttgttttatattactctgaatttacattgggatgaaaaatgagtggctgaggaatatagaaatagttgacaaaggatatatatactctattcagtgttgcatgtgtgtgaaagcttaagtgttgaagaacttgtacaattcatggtttcaggtagcatttgttataacaaccggtataaacagtgcctatgtgttgggatattccaagacagtcatggttccattgggttggattggtggtgtggttggtctcattcttgctactgcaatctccctttacgcaaacactcttgatatgtatataatttgcatgtttcacacatccttttatcaccattttgagtctagtttcacccatctttcatagcattcatcaatatttttgtacattttgcgtcttaagtcgagtctaggactagtcttgcatacattatgcattttggagttgtttcaggtgctttggagctattggtgctcagaaagaggaaaaacagaacagaaagtcatatttccaccaacatactcgatcaccagtatcagagagggaagcggtcagctcagtagtccatccagacacttatactcgatcgcagaggagaggaggcagtcccaactgcagttctactcgatcacagagctgaaggagtccatcctgacttttctactcgatcgcagaggcgactaggcagtccactttgccagtccaccagttctactcgatcgcagaagagaagaaccagtccatcctgacagctgacacacatactcgatcacagaggccaagaagcagcccaaaccattcagtcaaccaacctactcaaccaccacctcgaccatctgatcaatccgcactcaaccagacaacctgagcaacggaaagagaagagaagagaaggcctattcaaagcccattcgaagcccatcaggaaatccactttgggccgacactcttgatcacgtcgtacatgggccgttaagtgggctcgaagcccgctttcttatcttagtattaataagtatctaagggtttcgccctggcacttgcactttgagagacacgaattttgcactattattcagcagccgtttttcattcctgcaactttgtatttcgatttttcttctaagttattcagattttgctttcatttgcttgttcatctttgtttcattccctttaatatttttagtatgcaatcttcaatcgtttctatgttattgtctttaagcatgttgtctgagtagtgattaagatttctgaggatgggatagagtagttgtggaacccctcgtcgaatctgttggttaagtgtatatttattgaatcccttctggattaattgtgtttactgcttattcctttctgatcaacaggaatccgatcccagacgttccagcactcagaaggcgtttaatggaacgttggatctactaattccagtgataatcgtctctatcccaagggattggccgtttagagcggttattggctttaacagtcgattcttattgtctgcttagttagagatcgctaatggaaattaggtcagtgtctagctatgcttgaggatttatatcacgggagtgaattaatctgttgttgaacctgttgtctagggatagcttaattgagatttgttaaccaactgaattgattacggagaccacactattcgataaccccatccttaggagtttctcatccatatgatttctctgtttacttacctgcttcattcacttgccattgaattttagtatttttctgttttcaaccattctactcgatcacaccagtctactaacagtgagactgcgtgatagagtaaagtggtctatttctgcattttcactctttgtcatcctgttgtactcgatcacagggtcccttctggcagtcgatcctgcgatcgagtatatcagtcatttctgtgactttttactgttttctgcatcaacactaggactgttagaaaaccaaccaaattctgcttggcttgacttagcaacttctgatcatatctcatatgtctgcatcacacccatttggattgacacctaaaatattacaacgacaggattagtgttttaggattaattgatctcaaaaacctattatcaactcttatcgccaagcttcatgagtttggtggcaaaagacacattcgttatagagatctcgcaggcttcatctatggtaaattctccatcactctctcgcaatatcaaaaaacacacttaactagaattgtatttgcttgattgattcaggtaaaaagatgtatcgtgttacatggggattgcaatatgtctatcttttcatgattaattgtgccttcatcttacttgctggttcgaccttaaaggtacaacaaccgaaacaaaccgttttgttgcgaaaatccgaaaattagctcatatggctctgcttttgcattgtgtgcaggctgtttatgtactttttagagataattgtctcatgaaactgcctcactttatcgccatcgcgggtgttgtatgtgcgattttggccatcggtattcctcatttatcagctcttggaatctggctaggagtttcaacaatccttagcataatctacattattgttgcaatagttctagcagctaaagatggtaaactttcatgttaaatcaaacctcgaaaatgatttcaaataaccacaaaaaaactactcgccattttgtttttggttcaataggagtaaacaagcctgaaagagattacaacatacaaggatcatcaataaacaaactcttaaccataacaggagcagtttgcattcaacacgggaatgctaccggaaatacaggcaagtctcatcgatctatttatggtcaatcaaatatttctctgttttgtgacttacactaatcttttgtgcaaatgattaggcgacagtgaagcaaccggtcgttaaaaacatgatgaaagctctgtattttcagttcactgttggtgttttaccgatgtatgcggttacattcatcggatattgggcttacgggtcctcgacatcgacttatctgtttaatagcgtcagtggacctctttgggtcaaagcactcgctaatatttcagcttttctccaatctgttatctctttacatgtaagtctctatctagacctcaatgatgagtctttgtgtcttaatcctaaccttaaccgtttaaattcttgtgtttttcttacgtaaatttttgcaagtccgacttatgagtatatggacacaaagtatggagtcaaatgaagaccattaggaataaaaaatctgttgtttagaacagtagcaagaggaagctacatcgcggtgagcactcttctctcggctcttttaccgtttctcggagatttcatgagcctcactggagcaataagcacgttccctctcacattcatattagcgaatcacatgtatcttgttgctatgaacgataagcttagtcttgtgcaaaagctttggcattggcttaatgtttgcttctttggattaatgtctcttgctgctgctattgctgctgttagactcatctctgtggactcccaagaacttccatgtttttgctgatgtttgattaaaatgtcttcgacattgttaacgatgtaaaaattataccaagaagaaaaaaattgtaatccttttgttgttacttttattatttcaaatgacataaattttttataacattatatataaaaatttttctgttcaacacaaatttttacttttaacaaaacaattcaagagacaaatagaagaaacaaagtaaagtgaagtcatattcttaagcaaagccatattgattaagaaaataaataatcattttcttatgcaaagccatatttgggccaagccgtattaaagtttgggccaacttgtttgagatagccacatataagcccaatagagttttgttgctgagcttatttatgaatccatataaagtcttgacctaatagcgaaaactagggtttttctctgtgaattcgctcggcggcataaaagagagtaagaagaggaagacgagagttacaaggattgaaaatgaagggacgtcaaggagagagagttaggtaattagggttttgattgtgctctctttttctcagctgaatctccgatttgaatttgttcgttactggttcactttaatctgatgaaatctttgtgttgctgttatgcagattgtatgttcgtggaacagtcctcggctacaagaggtactttcaattttcagtctttctctgtatgttcttaagttatttggatttgaatattcacctatcgtttttggatatcaacataaggtctcgatgaaagtttgtaactttgccacaactgatagatttcaatgataatgctctcatatttgtaatgttactccattgtttctgattaatggttgtgcaaaatgatgcatttttgctattgcttcctttaagattagcttttaagcagttggttgatagtttgattgcttatagaaagcagaataaagattgattactaacgattaagtaatgtttcaggtccaagtcgaaccaatatcccaacacttctctcatccagattgaaggtgtgaacactcaagaggaggtcaattggtacaagggtaagcgtttggcttacatctacaaggcaaagacaaagaagaacggttctcactaccgttgcatttggggcaaagtcactaggcctcatggtaacagcggtgttgtccgttctaagttcacttcaaacctaccacccaagtcaatggtactttatcttcttgaaacataatcatggttaattggattttttcctccagactaatcatttttgatctgctgtgtttaatctcagggagctagagtcagagtcttcatgtaccctagcaacatatgaggtaacaacaaactcatttcagttttacttttgatccaatagtcccgtttattgcattcatttcagtagaattgaacaacactgattctgtaacttgatatttaagattagttgtttcattttgcttctctaatggagaaaccatgtcaacaaggctatatctatttgaaaggttgtgcattgtaattaagagcaattagattaatcctttaagtataatagattgtccatgatatatatactttagtgaacatggatcctgattcgatttcctaatgcaggaggatagatttcaagaagtatcggaaggaatcgccattatcatttctcaggagctgtagtttatctattcacttttgttctaaactctctgttggttttgattttatctttagacgaagtaaaacatttttcttcttgagataatattaatggaacttcagaaaacctatgatcccagtcatttccttatttattgggtggataggcatttggagttgcaagtagcttctcacttattttttccactttgatagattcgtgctccttttgtttctctattttttctcttttggcttctgcaattttctcaatttcagcaaggcaatatcaaaatgtgaattctaacaagaacaagtaaaagagatatcgagatgctttagtataatggggcagatctagaaagtgacttaataatggaaagtgatggcttcaaccgcctcagctccaaacgtctcttccgctctaaatcaaaagctcccgtctccagatctgagccttcttccttcagctcaaatgcttcttcctcttcctccatcaatggttttggttttagttgttgattgcgaggggagcgaccagaagatttgaaaccgaaagatctcatgaaactctaaaaagtaatgaccttctagcttatgctatgactcttatcaatttcttcttttttgaaaccggaagatctcatgaacctctagcttcggctaagatctctttctgtcttggacatgaaaactcacaaaataaacatatgtaaagaagaagctttgactatcaaaatttccaacactaccaccacatttcgtttttttggtcttggcatggttggatttactatatcgactccactcgttctagccaagtctagatcctctataatggagagaaatttctaatcagtcaccaatgtctatttggcagatcggaactcaagcttctccgatatggatatgaactgagttttattaaccataacaatgtttctagagatctattcgagatcctctcttcctgccaccgtgagttatctttccggagcagagaatttttcttgtaccgcataaccgccacaccaacatcgcctctctttgctacatcatagctaaccctaaaattttcatgggctcggtccattttcttttttgtgatctctggccattttgctaagcccaactttagtttagtttttgtattgcctgtcctttatgcaagttgtttcgctgactcatatgtttcgatttctttctgtaaggagagacttttcccacattccttttttttttggaaagatcatgtctacaattctacaatactttggattgtttcttgaattcaaaaacgagagtttctaaaacgtcaacaaatatccctcataatgaggtgtcccttttcaaaaaaattaagattatctctttattttttagtacggtgggatatcaatctccctccggaactaataaatgaggatcctagcatggaattgtcaaggggtgggtgcggatcttaccactcatcgactggaagagatgtgtcgtatgtactctccaggttttctgtttctatcggaaacgaagaatgatcttattcatcttcaggatatgcaagtatcattaggatttgattctcttcaaactgttgaacctataggtaatagtggtgtcttgctcttatgtattcgaaagattatccggttaagttgttttcgttagtgatcggctaattgatattgaaacaattattgatggaaaccgagtttttattacctttgtttatggcgatccggtagttcaataccgagaattagtttgggagcggttgactcgtattggtcttactcgttcggagccatggtttatgatcggtgagtttaatgaaattgttggaaatcatgaaaagaagagtggaaaaagtagatcagaatcttcttttctcccatttcaatgcatgattgaaaattgtgggatgattgagattccatctcatggtagcttattttcatgggtgggtcgacgtcgctgcggagttacgtgtcggagagtctgtaggatcattaaatcatggctagatagagccatggcgaatgaggattggcattctattttttcccactcaaacgtgaagtatttgaacacagacctcttctagcttcaatccagaatagcccaaaaacgtaaataaaagaaaataaataaaaagaaaaatcatactagtgggttgcctcccactaagcgcttgtttatagtcaatagcttgactatgttgggtttctagaatcaggaggatcagatggtggcaagaaataccgcggagaaaaacctctcatcatccatggtggcgtataggcatttgccgtgtgaggtctacaaaggaagtgcggaacttcagcagtgcagaacagaggtatcggtggtctactccttttacctgcacaatcatcaaaaaaaagaacaagcactcgacgagaaactcgtggtttgcttaatcgtaaaacagtttttggaaatttgaaactcttattaatgaaatcaagaggtttaagaggaggagatgagtaccttagccgtttaggaggtggatcaaggagtagaggtgcagtgggtgacttgactatagtgcctggagtatcaacagtgaactcaacacaaaaactagctctaataaagaactctagctccgcctgtgtgggggtgtcgatcgacataggtggtggtgtcgatcgaatccatccctccagattgattctcagcaactaaatcatgacttgctttttgtagctgcccgcttgtaccatgaaccttatctatcttaacactagtgtctatagagtgctctacagagaatgcctgaccatctatggtgggtggcttcttcaacttgtccatgtcaagagtcataaccacatcacactcattcaaaacaattggaatttctgtagatatagagcaatcgagtacacaactacctggataggtggcattgattatttcagagataggcattgccagcttgtccttcatcgtccgtggagcatcacacatcagaagtgtaatgatttcggcattaagcaagcttgcctccttatcactgacaccattcaaaattaactcccagatatattcatgaagtatataccataggttcgtgtagtcaacataaggtaacttttctagaagcaaatcacacagcgcaaaacatctctcttcaaggatatgctgttcggtccgtatagccactagaatctcaacaaaatatggcgcagtccttgtccattgttcatggacactatcatttgttgttgacgctttggtgtcgagctcgctcgatttcgctccgtcaaacgttgaatcattgattgttcctgatgagtgtcggtcgacaccgaggtcatgtcagtcgagactgagacttggtgtcgagtggttctgtaaatcagtgtggcaagcaagcgtgatggttttctctaaggtctggtgctgaattctactccctaactgaactacactaacatcctttctatcgatccgagcattcaagtcttgaaagtcattgtacagaccatcaattctttgattcgttatcacctggctcttgagaatctgttctagcatgtattccatcctactcgtagaagtgggtggacggtgggcttggtgagtagaatagctggaatgattagcatagaatagatcaggcttgttgtagtcagcaagttgaatataacgttcatctgcaatagctgcagctctgtatcctacttggtgtcgagcgacaccctggtggtgtcgatcgtcaccctcaacaatatcaggtatcatgtttccctactcatcgattttttgaccatcctcgttgtatgcctgaccagctgtcccttaacactcctgcaacatcagatataattatcaacatcttggtgttgcaattaaattcttgaagctcctgaaacacaagaaaaagaaaaaataaaaacaagtgagaaaaaaagaacaaaataagtctagtctaaattctacacctataaaataacaagagaaaagagtttagaataatcttctctaaagggagtttccacagggttttgctcccgagtactaaagagaaaaggagaatagcctctccaagattaggtctaaacaatgaccttaaaactatatatataagtcttataaacatactgggccgaatatggaaatcttcaaatttcaataacttgcgtcacccaacaagaagtctgacgatttgaagattctagaaattgccctagaagactttcttatttgtattattagtccctgcttgtatttttagatataaatactctttttggtcattgtttagaccgacaacccttaaaacttttattttaagttttatttttacttttgctcggctagtccttggagattttggagagttcaccaaacatttcaaaaccatgtaaaaagaaaatcttttctaaagtctattcttcttttgatttctttatgcaatcttatttaaacatgttttctgtttccatgatcatatctgagtaattcccgtgttgggtttagggtttctcattaggaattttgatgatttagtagatcgataacctattcgaatttatattcagagttcttcatcttgattgttcttaatgcgagttctagagtagctacctagaatgtgatcataggttaataggtaagatcggagaggccgcttattacgtgaactatcataggtaagtatctagatatagataggtctaacttaaatgcttaggtgaacgtatcaatcctgattataatgcatgattagtatttagggttttacagacgagagttgggattcctatttattaagcatagttaatcaatacagacgagagttggttgattataggttagggatttgagttctaaaacggtttgctaacaatcctaattaactgctaaatctattattcatctatttccggagaatttccttaaaccgacagctttaattatctaagtttactacaatctaatatgttatgtgctttgttgtcattttacatttaattattacttgatttagcttaattatgagactataattttttgtgttaacaaaagaactttgtggaaatcgattctaaagtactacaattgatatctaatttgagagagagcttgaggtctaatttgatccatatcactaatcttatggaaaagaaaataaagggcaattggcaaaactaacgcacaaaaatattataattaagaaaatgacatcaacaaaaaagatgggtgatatatttccctctttccctcttctcttttcctctctttctcgatattttttctccagttttcttcttcttctcactgttcacaatcgaattgtgactctctctctctctctctctctctctctctctctctctctctctctctctctctctctctctctctaaatccgtttacatcaccaatgacatcaatgtttagtctattaaagattccaacttctttgatttgcccagaaaatgtttctgtaattctattaacttatcctacaaacaaaccaattcattctatttcgatttgtttgtctatttaaactaatgattaacgaatggctaaaaaaaattgtccgaatcttaccatcgtcaacgtcaccgctacagttaatcttgattatttgggttgccaatgttgtatcttagggtatagtatttttttatcaaagcggtttaattcagtcatttggattgtctacgttttgttctatactatttagtttcattctatactattttatttgtctgttttatacaaacattattcactattttaaataatttgtattagattgtaaaatttttaatcatgttatactcagaaaagatctatttttttataaaactattgtaaaatttaattagttatttttatagcactaattcaacaattaaaatcatttggggtaatattaatttttataacattggattattctctctcttcttccacacatctcatcacgtcctctttagcgcgtgtctctcactgttgtaccattttgtcttttcactacttcaatgtgttagtttcttaatatttttgaatatggtgctatattattaattttagattggattttggttatacaggaaattcacccaaaaataaatggcctagtctgaagcaaaaaacaaaaactaatggctaattgttattgctctcggcaacaacgccaaattgatctagtgattttacccaataacttactgaacctcaaggagcaatgaaccaacacactaggaatacacaaaattatcaagtttatggaatttaagctaacaagattggaattatgattcactaacaacctattcaaaatgaccaagagaaacaagattaaagcaaaacaaaacataactaaacaaaatcaaaagattaataggataagaaagtaaatgaaacgaaaaataataattcaaagacggtttcaaaatcaagattaaacaagcaaccctagggcaagatacttgactagggagatagcaaattatttttttatttttttgtcataagatattatttagaactcaaacgagctaattttgaggaaaattgtttacaaaagtgatatgtagcggttcgactcgaattttttgcgccaaatagtccgctttgacatttgcattacgagagattaaagataaagaaaaagtagtaaattcttctttgtcgctctagaactcctccaaataagctgaaaatgctggccatttgcattgcaaattaatctattatatttaatcaatcaatcaatattcatcctttcccttcgatacctcacgtaaatcaattcattgacatttaatcaatcaatcaatattcattcttttccttcgatacttcaggtaaatcaattcattggcattaattataagctaataaagcagtcatcaacaattttcattcgcaatcacaagataagcatgcattaaataccagtcaaccactaaacatcctaaccatgttttcgaaagtaaggaatataaagaacttgtgaattgggtttggcattttgtcgaaaaccttccaagaataaaatgcctaacgtctaaatcatcattaaatcaaaggtaatttagcattaagatcattccacaaaaaatgatttacgtaaatctagcactaaacatcataaaattcatcatcaaatctccctaatctagctaccaagttcaaaagttataaaataaactatatattgcataaaactacataagatcaaatggcatcaaaaatccaaaatccattccatgaacatagaattaagaaatgcaattcaaacgccatcaaaactccttaatacattccatgaacatagaattaggaaatcaaatatgcaactaaggacctaaacttgaatccaaaatgatgggaaactaagaaaaacgaatctataaaaccaataaaaatacaaagatatcatctctatccaagatcatatcatctcctctttttaaaaaggatttgacgtcaaatctgtttgttatgcaataaaaggtacaagtatgaaatattgaagttagaactcacattatacttaccttgcacgtcgggtaagtaagcattgtcacttatccattcgattatcttgtatggaccatctattaatggcctgatttttgacttctattgagtaggaaacctttcctcttttaagtgaatcaataattgatctacaacttcgaaaatagattatcttgaatgtctacctttattagcttgcttagcatgaagcttggtcttttcataaatgtttttccctgccttttcatggacctgttaagcaagctctaccttctttttgtcatcaatactaactcttttattcgaaggtagagggattagattaaaatgtgatatggagttgaactcacaaccaatttgaaaatgaaaatacttaaaacctgaatgcaaatctgtaaattcaatatgtgataaacatttttcccaagatttcaagttttttttatcaatgcatgcaagagaatacctaaagttctattaaccactttattttgatcacatgtattttattgtgtctctactatttaagtgaaaaataagctttagttaactttttatattctcaccgagcattccgcaaacccataaaatataaatatcagagtttttgccaaacttgcaatcctagcttcattatatatcatttatcctttttcgctgtttacaataatactaggatttaacccatgatacaccacagagcaaatattttattcatatatataataatattaaaattttcggttttagtttagtattaaagttatataattttatattaatgttgtgttataattatttaataataaaataattatttaacctgtgttatatcaatccaaacccatcctgctatatttcatatcaatctaaacccgtcccgctatatttttcgtctcatgatattttaattttgttataaatttaaatattagttctggaattagttgtgattgtgattttatgtcgaaaaagttatggacttttatttctatggaatattcaaaccaagataaggaatgtttttaggtgcacatatacttaggtttgctcattttatgggatcgtaaatgtattttggtttgtttcacaatgttggttttaatttattgccgaaatttaatacaaataattcaaatagttcaaattttggttgttttaagatttagtaattattgtaagtaagataaggagaatataatttattatattttacgtggcatatgggattgccatatatttcgaatctttttagtttattacacagttaattgccataaaaaatttaaatctagtgacaactattgtaaataagtcctaactccgggatttgttttataaaatagctgtaaaaatgtatatgtaaattattatagagctacacaaattttatatgtagagaaaaaaagtcgtattaaaagagtattcaagatatttataaattatagtaaaatgttttagctggaaccatctacttacctaataaagaaactccttttgctttattgtggtgaggtggtgaggtcagcgaaaaggagaattgtctgatttgtaacatatttagtaactaaaattattcaatgccgtgattgcgggtaggattaatttatatttttacttccatggaaagtatatgaataaggaaaaggtcatcacttgtaaagataaacatacataatcaaattgaataagtaatatttgacgtgaaaagaaagactaatgataaaagtggatttatgttgcctccactccattgattaaaatttaaactaattcgtacacacgagagatcaaagggaaaatatttacaataattagcatataaaatttgaaccggaactatattaaattaacgtaattatatttataaacgtttttaactaaatgtttacaaattgttcttaacaacatataaaattttgttgtaaatagaaacaatcttaagggagtaaatataaaaagaattgttaaaaaaagattttttattttattttttatttttttgataactcaaggttaatttccgaatctgtggaagggtacatgattaatccgtggggagagggtaaaattatatagatatatctttttgttttaatatattaatttgcatatctatattttaaatttattgtaagatttattacaataatatagtaatgttgaactatcaattaccaaaagtttcgtcaaatactcattattattattattattattattattattattattattattattgttgttgtaattaaatctcaaaaatcattcttacataaaatatgatttaacaacttcttcagaaaacgttttacatgcaaacaactgatcaaactataatcttatttacatccatttgcaaatctactatctattttaccactaaaaatatgcttttatactaaaggtatctctatgacacttaagctaactatatgtttctatgttttatacgtccaactatgtgtctctttaccaacgtggatcgaggagcttcagggatctccgagtcggagtgatagtatagatgtactctacaatatcccttcttgacaaaccatttgtttctattcagacaatagatatgtggattctttccaaacaacgaatggttgtcaatcgcttctccatctcagcaatgcacttcttactgttgagctcctgcttagaatgacgccttggagtggttaaaatttctggaaaataaattggtactagctcctcatgttgtgtctgttctggttagtgttgatcgacactagatgagtgtcgctcgttagtgtcgggtgatgaacgatcctttatgttcctatttgacactgtctcgtcagctgattcgtcccagatcgaattgccttgtgtcaatcgacactaatgtgtgtcggtcgacagcaactctgcagcagcgagctccaactcgtccttaacatttcattctttccagctttcctccttagctctgaccatgatcgcgttacagctcttccttgtattagtatcaggggtatcaagaagaaaaccctcttgtctcttgataaactgaacagtttgagctacttgaacatccagtgtcttcatgtgagagctcaaattgtcgatcttcctattaagatctgtgtagatagcatcaaacttcccattgaactcgacaactagcttggactgacccttaagaatctgctcaagcattgattcaatcttactctcagcagtgagcggaggaggggtttggtaagaagaattaccataagtcctagtgaagttgttctaaggaaagatcttctagaaggcaggttttagggtgaaacctaaagaactctagttccttgtaaacttgttgccctatggctgtccaaatttcttataaactcgaccttgagtgaaggcagtcagcttgtttcgcagctccttagacttagtatcatcataaaagttattcaggaaggctatcttgatgcttctccaagtagtgagtaaaccagccttcaattgcttcaaccaagaagcagctttcccagcaagtgaggtaagggaaaagcttacacagtaagtagttttcagagactccattagctttaatgctcattacaaggccctcaaaacgctcgatatggtcaattggcttttcatgagataagtcatggaaaggatgcttgcctagtagtgcaaagtagcaaggcttcagctcatagtcgtatctctgaaagggtggggggtacgatcgctgatcggttggaatagaacatgttaggcttgttgaaatccccaagagtacgaagcggttcagtagctagtggattagctgcactaagattttgtggttggtgtcgatcgacatagagccgcaccccctttccgaccaacaactctaggatgtgttgggactcctttaagaatgttttatggtgttttggatgttgtgagatgatgtgagatgccttgggcgtcctcccttatataggaggcgaatggatgcttcccgaagcatcacatccggtccttgcacccttccgaaatgtcacatccgttctttgcatcctttcgaaaggtcacatctattccttgcatcctttgggcgatgcaaccgttcgttggtacccgctcgaccttacaccttttggccgagacacctcttcactcgtgagctaccacagtccaccagctcgagtgtcagctgaccggaccacccagctgggtcagtacttgatcagctcaccgagctcagtcgagctgtcggtcagctcacctagctgagctagctagtcttacagctggtttagctcacctagcttagctagctagttcatctagcttgtccagctcacctagctggttcggcttgaactttctcgttcttcctactaagtattttggtccgttcctcgaccatgatttagttttctcctaaaacaaaccggccttttttatgaacgcgggacgcggtcgttacaggtatcctagcctattcggatggttaacaagcgcaatcaagctatcccttgacaacaggttcaacaacagattaattcactcccgtgatagaaatccttaagcaaagctagcccagactaattctcattaacggaatctaactatgtaggcaataagaaccgactgataaattcaactaccgctctaaatggccaatcccttgggatagagacgagtatctcaggaactagtggatcaagcattccatcaaacatcttctaccaagcatttcatcgaacaccttctaggtgcgggaatgctttggatcgaattccagttgatccgacagaaacaagcagtaaacacaactagtccagaagggattcaatcaattctaaaacttaaccattctacagactatggattccacaaccattctatcccatccttaagaattctaagtcactactcagacaacatactcaaagacataatcgtagataaacaagtatattgcataagtaagaagataaagagtagagaaacaagatgatagacgaaatcaaatgcggaatctgaataacttggaaaaatctcgaattacaagttgcagaagcaaagcggcgcaacaagagtaaactaggtaagacataaataaaaactgaagcaaaaactggatgtaaaatggatgtcctgggtcaaaaccatcaaaaacctatttatacaaaatgataggagatgggccgggaatccaatcgaccggcccatagaatgataatgggccaaactgggccttgtgatcgggtgaagctccgggccgcttccaaacacttcttcttctcctcttctctgccttatgctcagcttgtctgtttgagtgcggatttgagaagactctgaaggtgtgatcaagtgcttggtctagtgatttgatgggtggtgagtgatgatactcgacaagggggtcgagtaatgtggtagagtgaatggtcaagtggttgtcaagtggtgtgacaaagtgttgcttgccgatgcggtcgagtggtgtcatcgagtaacctggagtgtggttactcgaccatggggtcgagtgattggcaagaacggctccaatgttactcgaccaaggggtcgagtgtggtgctggatgtactcgacctgggggtcgagtatgtggcttctggtttcggctttcttcttccaatttgctcgccaatagctccaaatcacctgaaaacaactcagaaatgtgatatgtatgcaaagctatcctaatcatgcaaagtatgccaaattgatgaggaatgatataaaacagtgatgaatgatatgaaactagactcaaaacgatgatgaatgaatgcagaaaacatgcaaattatagacatatcaactcctccaaacttagtgtttgcttgccctcaagaaaataaaatgacatagctgaaggagaggtttgaagttggggactcagaaccaaagcatcagatacaacataaaaaatcaatgtccaagttggtagttctaagatgcgatatgatctaattctactcaaaaacgttagccatgccttgttatgattcaatccgtctcttatactcgacctacacatgctttaaaatctaccaaaccctttaacattctttagttctggaacgtaaatcaagcaatgcatcatcaatgaactcatttggctaaggtgaaggtcaagagaaaaagatggtcccttaaagaataggctttagtaacacgggatctctcaagaatgattgagctttagtagaatgctaaaggtaagtcccaagttaagcgtacagagataagatcccatctacccaaagtatagcaaatgaagctctaatagtaatcccatctccaatcccaaaagaagaacttaattctaccctttacattcatgaatcttttaaaccctttttcagatcattcttttcttttctcttaactctaggagaagctttctcaacactttgatacttctagcggttttggatttctttaacaactaaggttcttgttttaatcttttaaaactaagggctttttacccttcttctttagctaacaagaaccccattcttttctttaacattcccaaaacctttactagcctttttgtttttctaacttctttagcttccttcccctagaattcttttccccttttctttcttttagacacatctcaacccataatatgagcgcctacctagtcttatccagcccggaaaacgcgaactagaactacatgagacactatctctgacgttacgaacctaacactttctaccaagctcaatgagaataagacctcacggacactcacaagtgataaagggctttaaagaaggtttaggtttagtgtcggggttaactcctccaataaggggagtcagctacttgaactaacatgagtggttaaaatgagtaaggaagtccaagtattttagggtatccatgagttctaattcgatgctaagacatgataattgtaaatcagattcaggtttcaataatacaaaatcttttaaggtaggattttctttccatatttatttaatatttcgtgttttactacatatgtcgtaggaaatacgatagaaatttctttcattaatctgacgaatatatttcgacggaaattcgaaggttttggtaagtgttttttcttaccaaagttttggtaggaatttggtcggaaaacactatgttttcttgtaataatatcatgattttctacgtcgttcttgatttttatgatacttttatattcttgaaaaatcatcagagcagtcaattacatgatttatgagtgagcgatatatatatttttgaaaaaatagccaaacgttttataatttttaaattttaattatgcataattttcaattcaatagtcgaattggctatttaaatataataattgaggctactattcataaatttgaatttatgtatatcacttatatatgtgaattcatctttaatgtttgttatttattgataaaacttttatttttcttctaatattaaaagttcaatatttaaaaagcattagttttatttagatcaaattgttttacctcattttttaaaacttctgtataaattaataaacattataaaaattaaattacactataaattgataaatattaatttatacatcaaataatcctatacaattatttgggaagtttataatagaaagtaaccttgtcatttgtaggttattacattagaatcttattggaaataaaattctaagaaataaattaattcatcttatcaagaaaaattctttctaatgccctttttatgatgccctttttcgactctacccttttattttatccaattttatttctagcctctttaaatttttaatgaccattttacccttatttggaaattgttttaggttaacaaaatgaaaaattaatatttttttgccaaaaatattccaaaataaatttccggccaaaattttcccgccaaatatttttgaaaaacaatttcccgccaaattttgttttcaaaaatatttttccccccaacttttttttttggcgggaaatagatttacaagggattttaaaagagttttaaaagatttacaagggattttaaaagggttttataagatttacaagggattttaaaagggtgatttacaagagattttaaaaggtttttaaaagatttacaagggattttaaaagggttttaaaagatttacaatagattttaaagggatttaaaagatttacaaaggtcttttaaagatttttaaagggtttaaaattgttttaaaagaattttataatatttacaaggaattttaaaagggttttacaatatttgcaagggattttaaagggctttaaaagatttacaaaggatttgtaaagatttttaaacagtttaaaagtgttttgaaagatttacaagggatttaaaaaccttttaaaattacttgtaaattttttaaaacccttttaaaatccctggtaaatcttttcaaactcttttaaaatctttttaaaatcttttaaaacctttttaaaatctcttgtaaatcttttaaaactcttttaaaatctcttgtaaatctatttgccgccaaaaaatatttacaaagattttaaaaatcatttttttggctgaggaaaaatttgtttcgaaaaacaaatttggcgggaaattttttttttggcgggattttttttttttgtcgggaaaaaagtttggcggaaaaaaattggcgggaaaagttcagtttccaattacatgtttctattagatgagggtaatttggtcattttgttcaagggaaggggtatttttataaatggacaaaataaaagggtattgtagcaaaatggtagtaaaaaaatggtagttttataaatctccctcttatcaaggataaacaagtgaaatacgaattttttttaatttaattagtttaattaaactataataaagaaaatacattattattttcttaacttacaatgaacatataagatttgaaataacttatcatattaatttattattaatcattatacttcacttctcatttttataagattctatttttcttaaacaaataaatcatcatatcatccatataataacaaagaatagatttttctgtatataacatgatttggattttataaacgtatataaatcattaatctatgaagaaaaaattataatgagtcaaaatttgagacttgagtaatatatttcttatttttttgtgggcaaagaagctttcattaaactaaatcctcaaaagaggtgggttcatacaacttaagcttaaaacattacatgaaagacaaggataaagattccatgagttttcaaagatgcataacttcaaaaagattgcaaaggctggaagatctattgggacctgtagagatttaaatttgaaggctagcttctagaaatcttggatcaacttgtgatcataatgagctcgtgcgatcgacgcataagagctttcgttgaaatgctccatggaagaggctgcggtttgaggcttgttctcgggttcaaaattcagggaagatatctcgttagaggagtaaggtttgagggaaggtatctctttagaggagtaagcttgatgcattcggcaaagaaggttacaagtccaaaacgcaatcttctaatcaaaagactgagattaggcggtttaaatagttttgaagagaaagttgatcgagcaagccaaagcggttttatccaacaaatccaagaaggttgagatgcatcgcccaacaaaagacatggggcggtatgagtaagcgtgatagtgcaaaggtttaaactcgttatgtcacataagagagtagaggcgtgagccgcgtcacaatgcctatggttcgagattaaacctatttcactaagcttcaatacaaaacttgcatttggtggcaaccactctactctaagcaacaagtttcaaaaattctaattgcaagtctcctctaaaaataatgttcccacgattgaaaggagtccataaccattcgatatcgtggagcaatgttttagagggagattaggcaaaggtataaaaagatcaaacctggatattgtaacgcccgtgtcccgagttagggagtaagcaagattttacacccgctgaattcggacgccgagacgtccgggactgggtctcacagatatgggccaaattaggtttagagtttgttggccgccaaaaggagtgaggcccatcccaccaaaccctagaattgctgcggtttggagaagggaagaaagatcaatgtcgtcgtgtaactctgagatgatggtcgacggtgaagcacaagggggaaccacctgccagcaaaggagctcgtcgtgtgtcgtcgatgttcttaccggaaaaagcaccactgatggtccaagagattttcctgccatcaacgaaatccagtgagaagggactaaaggtgttgtcggtgctattacaaatcgagagccaattgatgtgttggtgaaggactgctctggaatttaggagaaaacggtggtggagtattgcgaatcttcttttggcgggttccaagacacagctacgtccgagggatgattgggggcagagctggtagagtatcgattcactcttctgtcgcatagaggacccacaaagaagaagacccttagggaggaaaattttggatttttcaagaaagaaacgcttaaagaagaagataaaaggaaccaaaggattgagaagaactgaaaaagattaagagggtatcccgacgccggcggcaagaagtctcaccggcgtcagaagacatgggtgtagaggatgtctcattcctgtgtctgggagcgttttgacatgtgtgttaagttgatagaaaagaacacaagaaaatgagtaatatatttcttacataaacaaaaatactgactgattaacaaggaaaacttttcatatatttcttttttaaatttcctaattttatatactactataaaaagttatatatttacatttataccattcaaatagtttaaatgaatacatttttaaagaatatcataaatattagtagaccaaaaagataaaagtataaatactctaatttgattttcttaagaaaaattgctaagaatgccactacctcttttcaattatacccttttctattggtcattttcatttctaccatcttctaatttttaatgaccattttacacatacttttaaaatgtttttaggttaacaaaatgaaatacttatcttcccgcctaaaatatttcgaaaataaatatcccgtcaaaatttttccacaaaaaaaaataattggctggaaatagattttcaaggatttttaagagatttttaaaggatttacacgggtttttaaaggatttaagaactttttaacactcttctaagtttttttaaaaccttttgtaagggttcacaagagattttaaaatggttcaaaaattatttaagggtttacaagggtatttaaaagattttttaaaagatttatagaggattttaaaatatattttttggatgtgattatttttttttttgtcatctgcttaattaattatgttcaaatgagccatccctgagaaacattgtttacataagggatatgatgcggttcggtacaaatttttcgtgtcaaagaatatgcttttacattcgcactacaagaaagtaaagataaagataaattagataattcttccttgtcgatttgaatctcgtttagatatactgagaacgctagccattcgtttggggaacacaccatcttcactaaatctgaacattctgaaagaacgatacgtcttggttgtcagctccaacaatacatctcatcacccagagaaaggcttctacttcggtatgaagtggggataggcttcgccgggtgttagcggctcccattatcggcggctctccattagctgactgacaataccaccctaaccctgaaaacttatcactatttttccaagaaccatcaacgtagcatttaactccattcaaacaagtcgaaacagcaactttatctcgggtaatattttccatgtttaaaaatccatggttttctgaacatagctcagcttgcgctgtttgtcatgcttttgcttccgtgtccactaaacgtaggagctcatattgagatttatcaattttctcatgaatcttttcattttgcgctttccaaatataccaacttatccatggaaaagtagaagatgaatttatatccgagggtattcgccaaaatatgtgatccatatctgtagtaatagagcctgttgggaaaattccaggcaccattggaatttggatagtgcccaagtctgtcgcgatggggggcaaaaattacatgagcaattgtttcctctggatccccacacctcccacaagatgaatcaaaatttattcctttctttcgcaaatttgttgtcaccgatacacaacctgataacatttgccatagaaaataccttattttcgggggcaatgtactttccagtgtgtgattgcagcggttttatatttagaccaaaaaattgttttgaaacgatctcttgatccctaaacgtgacgtacaataccctgatttaaccgtatatttacccgttttcgtaaaatgccaaccaatagtatcctccattgttgtaacacctaaagatatgacattaattatcggtacatcctccggaacaaaaacctcttttagaagatcaacatgaaaaaaatatgttacggggaaaaaaaaaattggcgccaaaaattttaggcgggaaaatttcattttctaattacctgttctcatacgatcagggtaatttgatcattttgttcaagagaaatgatatttttaaaaatggacaacagagaagggtattgttgcaaaaaagtaatagaaaaattgtagttttgcaaattcaaacatatattttaaaaatatttatagcaaactgtgtgttaaataatatgtattatatcatagaaagagttatgatctgtataagagacgacatgttaagaatatatgatgagatgtgtcaaataaggtttgacacttctaaatatttgaaattttgtttctgcatgcaattttgaaaatattgaatgatggattgcgcacgcaattttttcattgcgagtctaaattgaaaatatagacttcatgcacaggttgaatttgatatatatatttttattttttcctgcaaactgaattttatttatatatgtaattctttacaaaggaagtgtttgagccacctcggctgaattcctgaatatgattggaacacactagttgtgtagataggagaggctaactgatgtgctatactattacaatggttttttgtgaattgaaagacaacagaagaaaacatcaaagcccaataatccacatctcgaagtaaactaggtaattcacatctagtagtcttgccattgatagcattgatgagaacctcgcaatctccctcgaattgtattcttttgtatcctcttatccaagcttgttgcattgcgaccaaaagagcttttgtttctgcctccagagcggtgttaacgtagctatagttgataatccccatgctttcgctaaggcttcatgatctctaatgatccatcctccgttgctttgagtccttgttatattgaaccctgcatcaaaattaactttcacaaaggaagacgagggtttcgtccaatgtgtattgtagttgatgttgggctttttgtgataggaactcgtcctccctgtctcatgttttcaatccattctttgacttctgcttcagtttgtgcgattatcttcgaaggactctctctgtacttgttaaaaacaaaattgtttctagctttcaagattcaccaaatgagccaaattggcattattttttgttcctttgttaaattattattagaagaagaatcgataagaaaaaagatttttgcttccacatctggtgagaaggaatgtccagttaatattggagaatttgataacctccagattatagatgcgtaaggacaattaaagagttcatgacttattgactcttcttcaatttgacaatggttgcagattggatcgatattcatgcccctggtgattaatcttaaagctgtaggtaatgcttttgaaatagtacgccagagcatgtattttatttttgggattatagaaattttccaaatcttgttcttcaaatccactgacccatggggagctgctggtttaatttgacaatatgtcagatcatgagtgagtaaccaatatccggattttaccgtatactctcctgaaggagtgtagtaccaaattaagttatcctgatgtccttcccgagagagatgaatgcttttgaggtgattgtggtcttcaggacttatacgttgagaaataagattatcattccaataccggtgtaatccgtttatggaaatctgattttccattgatgtatttctatcaggtgtaatgagtttgagaggtctaggcaggtgcgttgcaacaatattgtctttaccaatccgaatagctttaccggttcctacaatatatctgcacccttaattattacgttcaaacccgcaagcatagacgttcacccatatgattgatactttcgagctttcgcatctaggatgttgtcatctctaaaatatcttgccttcatcactcgagccaacaaagaatttggattttgaatgattctccatacttgttttgcaagtaaagcatcattgcatttagccaaatctctaaaacctaaaccaccttccgatttagaatattgtaacctcttccaagctatctatggaattcctcttttttgcattcttttcccaccagaagttcatgagtcgagtttcgatttctgagatgataccaatcggtagtttgaaacaggacatggcatagaccggcattgccatagctaccaattttagcataatttcctctcctgctggtgataaatgtttcgcactccagctcgatgttcttttcttcactctttcaataatgtaattgtacatttcttttttttctgaccaaattgttccggtaaaccaagatatttccctccaccttcatggctttgaatttgtagtatgctttttagccgattttgaatgaccccatgcacctttgatccaaaagttatcatagacttgaccatatttattttttgacctgagtagtattcgtatatgtcaaagacatcctttaaagcttgacaattacgagcattagcttggcaaaagaataaggaatcatccgtaaactgtaaatgagtaactccaggaactccattccctatacgtagcccgtcattatctccatgtgataccctagaattaataagatggattaagatgtcagcacataatatgaaaagatagggagataaaggatctccttgtcttattcctcgttgtggtttaatagtgccgtgtggtatgccatttattaaaactgagtaattaactgatctcacagtgcccattatccaatttatccattgctcgctaaaaccaaatagcctcatcgttgtctcaaggaagttccactcaactcgatcgtaatctttgctcacatctgttttcaccgccatataggattgagaaaccctttttcttacttttaatgaatgcatcatttcatgcgctatcatcacattatcattgaccaatcttcccggtatgaaggcggcttgaggatcagacacaatcgcatcgagatgccgttttagtcgttctactaggcattttgagattattttgtataggaaattgcataaagctataggacggtaatcagagagtgttacaaggtttgttatctttggaatcatacagagatttgtgtggttcattgattgtttcatgtatgatgtcctaaaataattttttacctctttaattacatcttgtcctactatatcccaataagatttataaaacctagctgtaaggccatcaggtccaggtgctttgtcatctccaatttgacttattgcattgaaaatctcacaatcactgaattcctttgtgagatcatcattcattgccttggtcacagttgatttgaaacctgcaaaatcgatagtagaaacaagacggccattgctttcatagatatttgtaaagaagttttgtgcatgacgtcctatatctctatcccctataaaaatcgttccagcatcatctttaatggaagttattatgttcactgaaaatctattcttggtgcaagcatggaaaaaacatgtgttgcggtctccctccttcatccaactatttcgactttttggttgccaatacttctcttcatcattgtatgctatggtaagctttctctgaatttgcggtatgagttgtcgttctgttctcagcatacttgcatgactctgtttagggattattgtagatgtttaatccgggtatgtgaatttaggtttgatttgtgctttagtgatgccatcgcttgtctgcagtttttaacttgatctgtgatctgttttctttgccctgtgttcactctgttccaaccattcttaacgtaatttttgaaatgcggtacgttgatcagcctttcatcaaaccgaaaaggtctcatctttgttgtttttgatttttctagagacagaagcaatggtttgcggttagatccagtgaaatcaaggaattcgagttcagcagatggaaaggaagtcgctccttcagaatttatgaaagctctgtccaaataacatttgactgtgtgagaatgacgctctccaacccaagtgaaacgatctccttttgagcgaatatcaacaagatcgcaagaagctatcatgtttcgaaaatccctaaaagtccactcatctctttgtggccctcctatcttttcacagtttgaaaatatctcattgaaatcactgatcaaaatccaagaatcattgcatgtaagtgatagattttcaaagtgtttccataaatggtgtctttcactttgacaaggatgaccatacacacaagacaagtagaaattgatattattagtagcgatatgtacatcgatatggcgttcatcctgacaaactttggataaacacacataatccttccacaacaaggccaagccaccactatgaccttgtgggggttgtgttattacattagaaaatcctaatacacatgctagattactaacaaagtcacgcttatttagagtttcaataagaaataaaacatcaaacttaagtaatttacataggctactaagacgtgattgagtcatcggcgcaccgaggccctgacagttccaagagccgattctcatggaggctgtggggataccaggccccccgcgcctccgtccattgaaagtggagatgtagtagatgttgcaaagctgactttcttttccttcttgcggatgtgacccaaaaccgccgattcctctgctgcctccgcttgattgtataaagtttcaaagctgactctctttctcttaacaaaagcaaactcattcatagcattgttagagacttcctccaacagccctgcttctctctataccattaaggattcacgtagatgttttgcatgaagatacctgagtctttcagcagtgagttctgtgtcttcaaatgcactaaccatatctgatggaacagaacttgaagacccctcttatttaatgtttgtagcggcatgactctgtagatccggaatcaatgtggtgaaatcaacactaggcagcgactcatctcctgtcatctcttgttcatcagggttattctcatggtggtcatcgtcatttccatcatttacatttgccggttcagcctcctcaaacgccaatgcacattccttaacatcatgcttaagagaaccacacttggtacagaagttcctcaatctttcaaatctgtatttgatggtggtgttctcattcggttggaattgaatattcctctaaaaccaaagcggaccatccatgttccaagatagtttgactcttacaaaacccagttggtttgtgttctcatcaaaactaacatctaaaacataccccaaacggttccctaccgccctagctgatatagctcaaattgtcttaagcttactccctcaaataagagatcgtcattagcacttaagggtcgaattcaactgagctctcaatgttcacacaatagacttatgatgtattcaaataagctagacaaagtaaattaatgtaaagacaataaagcaagtaaacgagttgtagactcaagcgattaaagcatcgggtctaaggaattgtctcgagagatagataaatcgtagatctagctaatatgagggttgttatcgtaccgttctcaaactcaaactatgattttagagtaactagtggtgttccgcgaaactctctatacttagagctaagataaccggagaagtagagaaaccctaaactaaagcatgcattatatcaagtttgattagttcacctagtatctaaaccagagtccttctatgagcctacatgttctttcttaaatgcctaggctcatctatgatagttcaaataacaagtacctatggtgggcatacctattatctgatatcaagttctaggtgatcagtgtaaaactagcagtaagaataagcaagatgaagaaccctaaaaataaccctaaggggttttcgatctactaatccatctaaattcgtattaagactctttaaatccaacaagatgattactcagagatgataaccgaaacacaaatcataatctgaatagtttgcattgatgaattaagagtaaagggtaaagaagttcagaatcctctctacagggattgagttcttctctccaaaagtgtatctcaaataataatacaaaacttcggtctaacaatgaccaaataattaggtatattcgtgactaaaaacgtgtagggactactttgcaaataagaaaaacttcagggcttctcaaagacttggctaaaaatagaaattccctcagccgaaataagggtgtcgatcgacataggtgtggtgtcaatcgacaccatcgcgtgaaaaacgtctttgataatcttcattactgaaaagcttccattgttcccagatgcgtaagtatactgaaaatgactcaaaacatacgaaaaagactagaaagactctaaaaaccattctgaaactgtgttagaaataagtaaaaaccaggacatatcactagccattgcattagtcaaattgagaattggaataccttggatgtgaacaactgctaaattccataattagctcaaacaaatctatattttaacaaccaaaaatttacaaaaattgaaaaaagaacttcctaaatcaactcaaattaataactaacttacttaattaaattctttaaacattttttgttttgttataaatatatggcataacctaaaaagcctggaactaaaccgaaaccaaaaaaccgtaatgttgtaaaaaccaaattgtcgccaaaccaaattatagacggtttctatatggtgttagtttttgtaacaccaaagaaaatgaaccaaaactgaaaaggaaaaaccaaacacatagttatataaaattttcatacaactaaacaaacttgaaaataatataattttaaatatcattgtattatgtatagaatgattaaaattgtactataaacaatcaataatccaactttaaataaataatatttaagttttacttgtgctgctcaaatatagactatgatctagtatactataaattaatcaaatatcataatcctaacattattaatttttagaggttctactgtatttaactatttatcattttgtttaatacgagtatacgagaacacagattgtgaacccaaaaaagaaaggttcacacctattactagtctacaacctttgaagccattcgcatccatgtgagagcatatagaatattcaaagaaaatagttgacttcctttcttttaggatctcgttctttacctgtcattattgtacattccattttacaatcacttcttgcgttgttaattatgtcgtctgcacacacataaacacgactgtgataacataaatattattaccactttaacacctaaaaacaagataattctttttagggttgtatacacatgccgaaccaatgtttctatgttttcttagatgttacatgtacaactgaaaaattatgtctttttcgttgttaccaatttctttttctaagaaatattctctcaaaactagttgtgtctccaatattatccggtaaaagttctaaaacgggatgcctgacagctttcgtgagacatctaattgatatgttgatgtgacatgcattacccataatgaaatgatattttattaaaaatgtaaagtttagttgatataaaagtacatgttgtggctaaattgtctaggaaataatagtaacgtttaaaaaaagaaattatcaaaatagataatgaattcaaaacaaaacattgcaatagtgtttgctactaatatcatttttgagtgctgacctggactggcgactccaaaggcgatttagttttttattttatttttcttacacgtatgatgtcggcggcggtaaatccgcctccagttgggttggtttttgagtcggaaaaaggattgccttctctggtagccgagggtgaagttgttacgagtcatttcgcgagctcggagagtttggaggttttggaggtttctcaacagggagatttaagggtactagaaactttggcaagcgttgggatcgagaaagagataaaatagaattcaaacaaggaggtgggtgtaacccggtggttacaacttcggcttccagttcggttgcagtgttgaaaaaatcatgggttcgcgctgctacaaaacatcttttcacgaaacaggaggttgtggtgtctaaggttgatggtaaacaaggagtggtggtgccgaaagagatttttgcagatgcaaaaccggtgtgggaagattttcttgtagggaaatttcttaatgcatcggcaccacatattgaaaaaattcacatgatcgtgaacaaaatatggagacttggagatactacttctcttattgatgtctttgaggtcatgagactaccgtaaagtttagagtttggagtgagtcgatgaggagaagaatattaactagaggcatgtggaatattataggtatcccaatgctaatatcaaagtggactccatttgctgaggaggcacaacctgccatgaagtccattccattatgggtgacattaaaaaatgttcctccttcaattttcacagacaagggtttggagtttctatcaagtgcggttgggaaaccagtaaagcggcatccaaaaacagaggcttatgttagttttgaagaagctcagattttggttgaagcggatctcactaaacatttaccaaaggaatattatattactggtgaagagcaaggcaagttagatgtagtaaaccaatacttttatccatggttgcctccacgctgtggcaagtgtaaaaaatggggcatcaaactgaagtttgtcttgcagtaggggtgaaaatactacagcccaccacgggtgaaaatactacagcccaccacgaaaaaaacgtccaagtagaaatagtgaaggaagtagagaaggtaggagatgtttccgttaaggatactgagaaggtaacccaaaacaaaactctatcatcgatgcaaaaagttgatgttgaagggatgggagacaaggaggaaggtactcttgaaattgagcaggatggaggatggattactccttctaagactggtcgtagtccaggaaaacagatcgttggtctaaaatatggagaggtttccatattatctaactcttattcagctccaagtgagaaggtagcggatgaggaaaaaagtgaaaacttagaagatgatctccatgcaaatagcagtagtgataatgaacaacatgaaactttaaatgcaagggctgcagatgtttcagtatattcggtattagcagagaaggttgtgcaagcaaaaagggaacaaggctacgaaagaccgaggtcttcctccacgcaacatctccctcgagactcaaagtcaactcataaatttttcccaaaccgttcatctaaatatgctagggatttccctagagacaggagtaatggttccacacaaaatctttaaatgttgagcttcttctggaatttttgtggtttaaataaaaggtcaaaacactctgttgtaaaggattgggtagcaaaagcaaatttagaatttggatgtcttcttgagacacgagtcaaagaaagaaaagcggatggagtatttaaaacagtgtttccagattggtcatttctgtataattatgattctcattgattaggtcggatatgggttgtttggagttcaaatgtgagacttgcccctgttttcacaagcggtcagatgattacagtatcagtattaatggaaggcatggagaatgaatttttctgttcattcgtttatgcttccaactttgtagaggaaagaaagatattatgggaagatttacgtgctcaccaagcttctcctctgttttttaataaaccatggatgatttatggtgattttattgaaacactaaagattgaagaacactctctgtctcagaataatcctttaatcaaggcaggaatgaggaattttcaagatacagttcgatactgctctcttagcaacatgaagtttcatggccctttgtttacatggtgtaataaaagagataatgatgagcttatctgcaacaaactagaccgagttctagttaatgatcagtggattttggattactagcaaacatatggagtttttgaagcaggcggatgctcagatcatcttagatgccgaatacaattgggggctgagaagccacgcactcgtaaacctttcaaatttacaaattttctcgcaaaggatcccgattttttgtagttggttgaggaccattgggggaacacaaatgctctattccattctacggtggcgatgtataagttctcaaaaaaaaattgaaacacttaaaaccaaagataaaagctatgggaaaggataagcttggtgacttgacgacaaaggcaagggaagcttttgcacaactctgccaatgtcaaaaagatactatgacgaatccatctcctggcgccaagcgaaaagaagttgctgcttatgctagatggtcacatgtttctgcactagaaagagaaatttttgaagcagaaatcaaagctacaccggttaaagattagagatggcaacaataaagtgttccataaagctggaaaggttccggagatcagaaatgttgttaaagaattaatatactcggatggcacgactcttgacacacaggaggaggttaaaaaggaggtagaacgttattttcacgagtttctaggctacaaacctgaaaattatcaaggtatctcagtggagggtataacaaagctaatataatattgttgtcgagaagcagatggggaaacacttttaagggatgttacagaggaggagatccgtcgtgttctgttttcaatgccaagtgataaaagtctgagccagatggttacactacagagtttttgcgagaaacatggccggtaataaagaatgattttgtggtagctgtctatcttttttctctacggtttcattcctaaaggtgtgaatactactatcttagcacttataccaaagaataaagaggtaaagcagatgaaggacttcagaccaatttcctgctgtaatatcatctataaagtcttctctaagcttattgcaaatagattgaaagtcattctcccagattttatcactatgactccgtctgcttttgttaagaatcgcttattgatggaaactgttctcctcgcatctgaaattgtcaaagactatcataaagattcagtctcagctcgaagtgccataaagattgacatttccaaggcatttgattttgtgcaatggccgtttcttctcgccactctctactttgaatcttccatcaaaatttaccaaatggatcgagctttgcatatttatagcctcattctcggtccaaattaatggtgaactatcaggcttgttccgcaatgcaaggggtttaaggcaaggttgttccttatctccctatctgtttgttatatgcatgaatgttctttctcatatgctggacaaggctgtggtggaacgacaaataggctaccatccaaaatatcataatctccatttgacacacttgtgttttgtagacgatttgttggtttttacatatgggagaaaaagctcgatggaaggaactctcaatatcttcatacaatttgcagaaatttcgggactgcaaattagccttgagaaatcgactttatatatggttggggtaaaagcgagcgataaggaagccatcctacatgcatttccttttgcttatggtgctctacctgttcgatatcttggtctaccacttttaactaagagaatgacttcaaatgattatactcctctcatagacaaaatcatagactgaattggtaaatggacgacaaggcacttatcctttgcaggccggctccagcttattagttatgttattcagagtctcactaccttctggatgtcttcttttcatttaccaactgcaggcattaaggagattgacagattgtgttcggctttcttatttggtcttgagtggagttaaacgctaaaaaggcaaaggtggcattgagtgatgtatgtacatcgaagcatgaaggaggattaggccttcgttcactaagagaagcaaacaaggccagttgtctaaagctcatttggagaattacatcgtcaacttcactttgggttcaatggttacacttatatttgttgccgaaaggttctttttggtctattaatgagaactcgaccttagggtcttggatgtggaaaaaactgctcaaatacagagagttagcttctggttttatcaaaacagagatacaaagtggaagatcaacttccttttggtttgataattggtctcatcttggccgcttgattgtggtcacgggacagagaggttgcatcgacatgggaatatcacttcatgccacagtttctgaagcagtaatgcaacacaagaaaaggcgacaaagagttgatatcctaaaccaaatagaaaaagccctagaaggctctcgttctaaaaggctcatcgaaacagaggatatagtgcgttggatgggaaaagggaacatattcaagacaagattcagcaccaactaaacttgggaaggtactcaggaatcaaagcctaaggtagcttggtataaaggtatttggttttctcacgccacacctaaatactcatttctagcttggctcgctcaaaaaaatcgtctaaatacctatgacagaatgcaaagttggaatgttggagctgatcgcacttgtgttctttcccaagaccctctagaatcacataattatctgttctttacatgtccttattcagcagagatttggtcgggcctcactcgaaaaatcctctcctcaaagttttcaacctgctgggatcctatcatcaagattatctcagacacaactcttaataaagaaaacttgttcttgataagatatgcttttcagcttgtagtaaactcaatatggaaagtgataagtatgtattttgcatgttttgagcatctatttgtcatcactttagcatcatatcatcactgttttataccatttctcatcatttgtcatcactttacatgtttaggataggtttgcatgcatgttgcatatttgtgttgatttcaggtgatttggagttgttgacgagctaattggaagaagcggacctgatcatgacaaatggctcgacccagaggtcgagtaggagcttcaagatttcaagagaccactcgacccccatgtcgagtagaagacatcaccacatcacctcaccactcgaccacgaggtcgagcgtcttcatctccatcacctgatcatcactcgatcacatcactcgaccctgaggtcgagtgtcttcaccgccattacctgatcatcactcgaccacatcactctacttggaagtcgagtatcaccttcaccaccactcgactacaccctcgatggcaagtttcagagtcttcttcattccgcactcaaccagacactcgagcacaaggaagaaaagaagactctagttattcactcgacctcccactcgaccacttgggtcgagtacagttcttaatccgtcccaatacttcgtcgttttgagtattagggtttcagaatatttggctataagtagcatgtacttcacattttcgcagacaagtttttatctagttttattccgcagaccttgtgttctagaccttttgtaatccggatttctctttatctatttagtattcagtattcagcttttgttcttgatttcgtttactgttgttcattctgttatcatcctgctgttacactgttgttatcatgttttcaacttgtttaacgtttatgctttctgttatgatgtctgagtagtgaataggtttctgaggatgggttagagtagtgtagaattctcagtatgctaggtgattgagtattgattgatagatcccttctggattagttgttcttaatgtctattgctttctgatcaactggaatttgagccgagacatttccgcgtccaaaaggttttcgatgaaatgtctgaaccactaattccagagattcgtgaccctgtaccatggtattggttgcagggagcgttttggctttaacttgttgattcgtaatgcctgttaggttagctctcgtcaatggtgattgagtctgggactaggttaacttgagggtctctgttgcggtgacacttagatttggttaatgaacttgttgtctagggttaatttattgagcatgtcaatcacctgtaaactgagaaaacgaaactactcaattaccccatcctcgggaattctttatctgattgaattctttgtttactctactgttgtttactgcatcttgttatgtgtcgcttaatttatgcagttctttcttgttactcgacctcatattcgaccacccagttgtctggcaacagactatgcagtcgagtatctgtgttttattttctgtctgttactcgacctgtcactcgacctcacctagtgctctgcaaagagctgtgttggtcgagtgttttattgtttctgcttgattttctgttttctgcatgttcactgttagaacacaccaaaacctgttattgcttggcttgacttagtgacttctgatcacatcttgattgttagcatcacacccatttggattgacaacctgcagtattacaacgacaagatagtgctttaggtttaattgattaaaaacctattatcagaaggaaagaaatggccgctgacatggaaagcacctattccatcaactcagctcatccacaaaatcgataagcaagttcgaaacagaatctcatccattaaagagcaaggagacgggagatacgatggttgtatggtgaaatggtttggttcgagataattcatccacttcaatttgttttaatcttttattttcaaaatttgtatattaaccacacgctgcatctaatgtacccacgttttcgaataaatttttttaaaaatatagtttttcctacttatttatatccgtgttataaaccggataagtatggatgtgattatccatctctcatctctgtctataagatatggattatgtttatccattacttcctccctaagatatggattatgtttatccattacttcatccctaagatatggatgatgtttatctattacttcttctctaagtaatttacttcctagctaagtaagctctactatatatagctcatttcattcatttgtaagttacagagaaaacagagagaaagaaaagagaaagagaaagcaataagaaaactcttgtttcgagttttattctctctagtattcattcttctttcttactttgatcttttataacacgttatcagcacgatcgtctctccgggagttatctaaccaactgatcgtctatttgatcaagcatcttttgaggtaacatttaaattatcttaaattcatcttaattcatttataaaaaattatatgctttatattttcggagtatgaggttatacctcctccttaatcgaatggtaagctatgcctcttcgaaatgccataaatggctcattaattgaatgattatttatttctatagataatcatgtcaaatctagctaagctcgatgtcgttgcccttgatgtatctggtaaaaattatagtcatgggcatcagatattaagatgcatcttagatcaaatgggtttcttagcaccataaatgcatctgaaacgacatcagatgagagcaaagctaaagccatggtatttctacgccaccatctccacgacaatttgaaaaatgaatacatcacgagagaagatcctgtggatctatggtaatcacttaaagattgtttcgatcatcaaaaatatgtgattttgccaaaaaccagacatgaatggctaaatctccgggttttggattacgaaagtgttggtgattataattccgccatgttcagaatcacctccaagatgatattatgtggtcaaaaagtgagcgattatgatatgattgaaaaaacgctctccacctttcatcttggaaatgtaatccttcaacagcaataccgggccaaaggatacactcgttattccaagttgatgcaagtcctttgggttgctgaataaaataatgaactcgtgatgatgaatcatttatctcgcccacctggatcagctccacttttagaagtgaatgttgctacatccagtgatgataattggcgaggacccaaaccttgtcgaggtcgtggtcgtgggagaggtcgtggtcatggccaaggaaaaggaagaagtttccattccaatgatttcaacacggaaaaaaacaacaaaaataatgttggtcgtgttaagaaaaggcatgttgaaagcacttgccacggatgcggcatgaaatgacacttctaccagacgtgtcatataccaaaatatttagtcgatctttatcaagcctcataaaaggcaaaaaaaagggatgttgaaactaatctcatctgtgatgagtcggaaccttcctttaatggccaagatgatgatagtcatcttgatatggcagattttctcgattaatcatgacaacgagaaatcaatgtaatatattatagccatatgtattatcatgctatgcatgacaagcattatagatgcttttgtaattctggaataatgttatatattatgacatatggatagtctatgtcaaagtttcatgaataaatattttattccagaaaatatgttatgacatatggatagcctatgtcaaaatacgagattgaggatgaagatatatgtctggcggacagtgcttatacgcacactatcttaagagataaaaagtacttctcctctctcaaaataaaagactccgctagaagcgtgagtactataaatagccatgcaaagataatattaggctttggcgaagccaattttacaatgccaaggagaactcattttaaagtaaatgatgcattatattcccctaagtctcatagaaacttgataagtttcaaagatatccgaagttatgggtatcatatagagactatgaataaagatggcattgaatatctttgcataaaatccgagagacaatttatattagaagaattgccaatgctatcttccggattatattgcacaaaaataaatatcatcgcatcaaatgttttagtaaactcgagtgtcacactacactcaagtgagtttactagtacatttaagatatggcatgaaagacttggacatcctggttcagtcatgatgcgaaaaattgtgcaaaattctaatggccatccattgaaaaaccagaaaatatataaatctggtgagttttcatgtaaagcatgttctcaaggaaaactcataataaggccatcgccaaacaaaattaggaatgaaagatttgaattcttgtcgagaagtcatggtgatatatgtgggccaattcacccaccgtgcgggccgtttcgatattttatggtattaattgacgcatctactagatggtcacatgtatgtcttttgactacacgaaacacggctttcgcaagattcatttctcaaataatcaggttaaagacacaatttcctgattatgccataaagaaagtcaggcttgataatgctggagaatttacttcacaagcctttaatgactattgtgtatcgatgggaatcgatatagagcatccgctccctcatgttcataaacaaaatggcatggccgaatcattaattaaacggttgcaactcattgcaagaccgtgaatattgagaacaaaactcccaatttctctatggggtcatgctatattgcatgttgcggctttggttcagattagaccaagcgcagataatgaatattcccctttacaaatgacttatggtcaagtaccaaatttatctcatctccgcatttttggatgtgcggtatatgtgcctatagcaccgccacaaagaacaaaaatgggtctccaaagaagattggaaatatacgtcggttatgtatcaccgagtataataaggtatcttgaaccacaaactggtgatttgtttacgacacgttttgccgattgccattttaatgaagatgaattcccagctttagggggaggaattcatcaaatgcatatgcataaagatatagaatggtgcgtaccatctttaaaatatcttgatccccccccccacgaagcatcgtgagctggaagtacaaaagattgtacatttacaaaatatggcaaatcaattaccagattcgttcaccgatacaagaaaggtgacaaagtcatatatccccgctgcaaatgctccatcaagagttgaaattcctagtgagctggaattagatgggagcaaaattaatgaacctaaggttcaattaaagcgtgggaggcctattggctgaaaagataaaaatccctgaaagaaaaagaaattgggaaaagaaaatgaaaaggttcttcaagaagaaccaagtcctcgggacgatagagaaaagtatgagatttccattaactatgcccatgatggtatcatatgggtagagatgatattgatgatgataatggaatattcttcttttctttatctaaagagatcgatcaagagaatgatgatccagatccaaagacattatccaagtgccagaaaaggccggattgggagaaatggaaaaatgtcatgcaagttgagttgcactcccttaataaaagaaatgtctttggacctattgtcactgcatctgagagtgtaaaacatgttggatacaagtgggtattcgtgcgaaaaagaaatgaaaaagatgagatcacacgatataaaacctgacttgttgcacaaggtttctctcaaagaccaggagttgattatgaagaaacatattctccggtcatggatgcaattacattcaggtacttaatgagccattcggcatctaataatttagatatgtaccttatggatgtagtgacaacttatttatatggatcgcttgataataatatatatatgaaaatcccggaaggattaaaagttcccgaggcattagactcatcaaagtctaaagatatatatggtcaaattacagcgatcactttacggattgaaacaatccggacgcatgtggtataatcgtttaagcgattatctacttaagaaagggtatgtgaataatgaaatctgcccttgcgtcttcattaagaaatccctttgggattcgtgatcatcgctgtttatgttgatgacctaaatataattggaactccaaaggagattgatgatgcgcgaactcatatgaaagaagagttcgaaatgaaagatcttggaaagacaaaattttgtctagggctccaaattgagcatttccaagatggtatatttgtgcatcaatccaattatacaaaaaggattttaaagcgctttaatatggataaagcgaatcctttaagtactccaatggtcaatagatctttaaatgttgaaaatgatccatttagaccctgtgaggataacgaagattttctaggtcccgaagtaccttatatgagtgctatcggtggacttatgcatcttgcaaattatactagaccagatattgcttttgctactaatttgcttgcaaggtacaattcatcccctacacgaaggcattggaatgggataaaacacatcttccgttatcttcaaggtactattgattttggattatattatcctagaaaacccgagtttggtctagttggttttgcagatgtagggtatctatcagaccctcataagtctagatcacaaaccggatatgtttttaccattggaggaactacaatctcgtggcgttctcaaaagcagactatagtcgccacttcatcaaactacgcagaaataattgctcttcattaagcatctagagaatgtgtttggcttagatctatgactaatcatattcaagaagcaagtggattagtcatcaaaagagagccaacaagaatatatgaagataatgctgcatgtgttgctcaaatcaaagaaggttatatcaagagtgacagaacgaagcatatccctccatggttcttctcctacactcaagaactcgagaagaacaaggaagtagaagtgcaatacattagttcaagtgacaatgcagcagatctattcacaaaggcgcttccaacttctacatttagaaagcatgttcaaagtattggaatgcttcatctacgagacctgtgaagtctcttcgagggggagctcacgtcactgtactctttttcccttgtcatggtttctatcccaatgggttttccatgataaggtttttaacgaggcagtacgtaactcatcaaaagtgatggatactcaagggggagtattataaaccggataagtatggatgtgattatccatcactcatctctatccataagatatggatgatgtttatccattacttcctccctaagatatgaatgatgtttatccattactttatccctaagatatggatgatgtttatcaattacttcttctctaaataatttacttcctagctaagtaagctctactatatatagctcatttcattcatttgtaagttatagagaaaacagaaaaaaaaaaggagaaagagaaagcaataaaaaaactcttgtttcgagttttattctctctagtatttattcttctttcttattttaatcttttataacaatccgatttttatagacaaattacttattttgttcttataaccatgatatcaggtatgcgccgcaataaacaaaaaatacctaatctactatttttcttcaattgaaacgtaggctaatttttgaaatgagaaattattattcaaaataacctcttttctaagttgaatttgtcaacattcactgtgtctcaagctacacatcacgaatatataaactgtaatagcatggtaaaaagataatcaaatatataacgtacgagatgttgttgtagcgagcgattacaataaatatatggattagttagacttagataaataataaaattttggttcaaatttgaccaaaaaagaagagagtagtaaatttgtaattaagcgagataattttattgcgagtgatatatatatattgtgttatatttggagataaaatgtactattgaaatatatagagttgtaaaatataatgtcatcgaataaaaacaactttgttttgacgggctataaacgacactgttttgataaaaaagaataagcacaaattatatttctttttttttgttaaagggttaagcaaaaaatatatttctctaaaataaaaattcgtaaatttgaagatagagtgtttaaagcttacatattgtgttatttcatgtgaatatattagtttgatatatcaatacatttaggttacaactacaaataaaaggaaatcgtaagaggattgcaacgaaagacaaaagatttcagatacaagaaaagagaaaattagaatgagaatatatatcgacacaaaagataagcaaaccctttaaacgtagcagagtcttttaattattttccagatatgatttcaccaaaccaagtcctcttgcttcttttgacttcaaccgacgttaatcactgaacgaatattaaaccaactaaaccaagtcgacatcacggtaaaccagtaaaattggatcactccattaacaatacctataaatattactatgtgtttagacagatttgattctggttagttgcccttcacggagtagaaattaagtcaccgttattttaataacaatgcagatatgtatttaacctatgtagaaagcacatgctcaaattcacgagactcaaaccatttaaatccaccgactagtaactaatgctctcaactttaaaaaataattttcacagaataataaacgaaattttttggtcttgactttaatttatagaatatttttaaataaatagatcaagtaacacgaggacgtcaaacaaaacaagcctacatatgaagaaataaaagcagccaacgaaaccacatgggaaacagatccacccggaagctcaccaatttccaccgacactaattttttcttaaaataaaacagattgtttaagattagatttggcaaatataaattgctaagaaagttttagccgtaagaaatatcgacagaaaattcgtacatatacttttttgttagaaaatacgtacataatcaaaaaggtaaaattacaaaaataataaatttactacgatgtttaatatgaaacagatgaaataagtgatagtaattatatactttttatttttttattctcttaactcttttgtttctgattagtaacaaaatttatttcatatcaattatgtaaataatatttttcaaaattggcttttttaagctgtaaataaaacctgattacaataaaaaaagattagtaagaaaattaacactgtttaattttatttttttgggtgattaatgttggaaaagtttttatacttttgataataatgttgtagccatttgtcctttctttttactcttagacacccttgtagcattaataacagtccgtgtttataatgaaaaacatcaataattttaatttgtaatttaaagttcaaaccacttacctactcaaattgctcactaactataagatgaaaaggaaatttattcaaatcaagaaaacacgtagaacagggtaacaaagtttgatttcctaattataagatgaaagaaagtttggtaatacaaaaaaactgctaaattacaaaaattaaataccaaaaatctgaacgatggttgtgaaaacagtcaatgcggttttacgacgaaattaactaatattacttcgattaattagattattttcttgaaaaaataagaattcaaattattcttcacaatttaagtcaacgcagtaatttttttttaacttgtatcaatgtatttaaatactcaaatatttatactactattttttttttgttggggccaagtctatgaactccactcgtctctccctcgacgcacttaaatttacataactaagtgtgtgtctattcatatcactcactctctctcttcctcacacttacattctccctctatttttttttctctctctccacaagaaacgccgtcgttcattaaaaatgatggcggtgggcagatccggaggcaccatcctattgttctgcctatcattcttcgccgcggtaaccgcggagagtccataccgattctttgactggaatgtaacatacggcgacatttacccactcggtgttcgtcagcaggtttttcattttctctactccactcacatttcatttcatgttagtaacttgatgttacaaaaaaaaaaaaagaactctttgtttaactctttacgtatagactgcatattacttctttacttgtgaaaaaaaaatgtatcttcgagatgatttttgttccttaaagtgtatcatttgtgtaatgattggtttaaaatgtgcagatcaatactttataaaataagttactcttttttatattgtgacaatgaaggttagatccggtgaactgaattaatcgatgatgctaattgtttttttatattattggtatatgaaaaatagggaatattgattaatgggcaatttccgggaccagacattcacagtgtgacaaacgacaatctcatcattaacgtacacaacagcttagacgagcctttcttaatctcatggtaacatctctttttttcgttatttggaactacttactttgtcctctttgccttctgtggttatatgttgttgacttgtcgaagttgaatagttttttttttttttaacttgaataagaaaatacctttattttttttgtttttatccattttttgtttaaattgtttttattttgaagaacctaaaccaaataaaagatcttcatttcctccattagatattattatctactatcatctccgattcactaagaccatgtgtactaatatgtcaactgtaggaatcagatatttactttgtaatctagattgttagatcacgaaaatcacggatagaaaatttatgtatgtaaaactgaaatggaaaaattaaaggctcatctagcaaagaaaagtctttaaaatgcctgaaaacagttttgtttttgcttttgctgacaaaaattaaaagataaaaaaaaaacttttacggctgataacgtaaataaatatttgtggaaatgcgcactattacgaaagcaaagcatgtgaatgttataaatgtagacttggggcaacttgaaatggtccataatgacgtatgtggcatacgtctataaacaattaccgaaaatctagtaggagtattaaaacagtttcctaagaaagactaatcaaagataactaatagtgagactgggttttgccattaatcgggtggcaatcaattctttattttttcaatagtatgcattctactttaacaaaaaagatagtgacatcaagtaataatgatactaatacatattactatgttatatgtttttgatattactaatatagatatatataaatttatcaaagtagatatctgtaaatattataaaattttttaaatatttaaatatttagatatttaaaaatttattaattaaaataaataagaaaatcaattatttaattaaaaaaatcgaataattaaaatcattaatttttaaaatatttgttttctgtccattcctaaacattagcgacaataatatgtatatattttcctttttttaaaaaataatagtacgattttatgatgaaacaacaatgataacagaataatattgctctccacattttgccacgtctctccctaatttactagctgtcttccaccggaccacccctttcggtgaacaatgtcggcgatgtcgtcgaatttacgttgtcttttagaataggtcccacccacatccactaactaggccatcttcatgacatttttcataactaacaagaaaaggtcacaaagggattgaaattattcaatgcacatgctttagttttaccttgtagtatagagtttctaaagttttattatagtatagatttttaacgaatcacataagataaaaacaaaaaaaaaatagaagtgtgtgaattatattcgttttttattctaatgaaaaaaattggatggacaggaacggagtacaaaacagaagaaattcttatgttgatggaatgtacggaaccacgtgtccaattccaccgagaagcaactacacatacattttgcaagtgaaagaccaaattggaagtttctattacttcccatctcttgcctttcacaaggcagctggtggattcggaggtatcagaatccttagccgtcctggaattccagttccatttgctgaccctgcaggagattacactgtcctcattggagattggtacaaatttaatcacacggtaataatatgaatatatgatcctaaacaaatatacaccttttcaatctcatgcaaacggttttttattttattttatttttaactcatgcatgcaaacgttattgataaaaatactcacaactatttgttttttgttttacaggatttgaagtctcgtcttgatagaggaaggaagttaccttcgcctgatggtattcttatcaatggccgaagtaacggtgctaccttaaacgttgaacaaggtgtgttagcatttgatgtttgtcaatctcctacaatttttgtccttccaaaattaaaaagaaaaacgtttttttttgtgtatgtggttgtaataggaaaaacataccgattgaggatatcaaacgttggattacaagattctctgaacttccgaatccaaaaccacagaatgaagcttgtggaagtcgaagggacgcacacacttcaaaccatgttttcctctcttgacgttcacgttggccagtcttactccgttctaattactgctgaccaatctcctcgtgactactacgtggttgtttcgtctcgattcacggataaaatcataaccaccaccggggttcttcgctacagtggctcgtctacccctgcttctggtcctattcctggcggtcccactattcaggttgattggtccttgaaccaagcacgtgccatcaggtacttatctttcttgcatatgtgattaagtgttttatgctcctctccaataagtgctatgaataatttttctttcgtagaaccaatttgacagctagtggaccaagaccaaacccgcaaggctcataccattatggtcttataccgctcattaggacaattgtgttcggtagttcagccggacagataaacgggaaacaaagatatggtgtcaatagtgtgtcatttgtgccagctgatacccctctaaaactggctgacttcttcaagattagcggtgtctataagatcaacagcatctcagacaaacccacatatggaggtttataccttgacacctcagttttgcaagtcgactatcgaacctttatcgagattgtattcgagaaccaagaagatatcgtccaaagttatcatctcaatggttactccttttgggtggtcgggtatgtctgtctattttcacgctcttcatttattattttctttgttttcttacgagttaaacaaagtgtgttgtggttggatcaactgcaggatggatggtggacagtggaagacaggaagcagaaatggttataatttacgcgatgcagtttcacgttccacagtccaagtgagccctttttttttccccctttcattgtcaaattaacacattgtgttttcttgttctaattataaacattatccatttacgggaattcaggtgtacccaaaatcatggacagccatatacattgcattagacaacgttggaatgtggaacttaagatcagaattttgggcaagacagtacttgggacaacaactttacttacgtgtcttcacgtcatctacgtctttgagagatgagtaccctatcccgaagaattcgcgtttgtgcggccgggcaagaggacgacatactaggcctttgtaaggaagatatacgagcttacgtgaaattcgtcatatccatacacgtttaagtatttcttgggaagacttgcaaggttacaaacaatgagagaggatatatgtagtaacaatctagtttgacgtgatctcagctcgaggtctaaatttttatgtaattcgaatttgaagttccagtttttctttatatgcttttgtcattcatgttcttttaattttctttcctttttctacgaagttataaacttataatattaattgaattttactcatttggatcattatgagtctatatggtaagacattcagccagattcagaaaatctgcagtcaccaattccataaaactaaattaatctgttttttttttcttttcttttttcttacgtcgttattataataaatcaaataaagagaatacataagagaaaaacagagcatggtagaacaatctattacaaattcatgacaactaatcttttcttgaaagaaaattcttcattccaagttaaagcttccaactccgattgtagagggaagggcacctccgaagacactttgcaccaaataatattctatgattattctttgaaccaaccactgctaagtgataggttttacttgttttatttagtcttttatcaaagaacaaaccattcttcgtgtttataaggctttttaggaattc

SEQ ID NO: 20 - DNA, 108061 bp, Arabidopsis thaliana
  unsure (1)..(108061): unsure at all n locations
gaattccaaagctgaatataacctaagatttcaagaacataaacctaagaagatttcaagaacacaaacctaagatttcaagaacacaaaagactaagctttctttgcaaaatcatatctttgagtgggtagcaaaacaaagagatataaacacagatcaaagaagacttacatatgtcttcgttagttcaaaagaatctctgttcttttttttcttttttttgatctctctgattttctttgctgttttttctcagtttagttagctaaccatttcttgtttgtaaagagtcgcggatttcaagactttatttaaatacagcacaattttatgagcttgccaagattttttgtttagattttatattttgtaaaaagtaattttatttgtgattcttaatcagtaaaaatacattccattattttgtatgattcggtaaccaaaatgacacgagttagattggcttgtagccaaggtgttgaagggtcccccctattaattcttctttctgaaattgttaaagcatagactaaagaacaaattttgttacaatggtatttttaacaagtaggaaaattaagtttaaaccaacaacaaatggtatttatagaattgaccaacctttactcgaagttcaaatcctatttttgcacccccactcaattgccatatttttttatatatcaatcttattcttcttctatcaatttcctgaatcctatattaaatattttcctaatatatcaaattttggtaactggttatattattcccctaaaaacatgaatttagatatacaaaacaattaactaatgtgggtactaatccttacgtttagataaacaaattaaaaatttcgaataacaaaaaagatgtataccatttttcaccaaaattttagtaaatttttaaatagaaaatgatgaataacatgtgactactcgtgtatttaccacaaacaaaaaattaagtatttctaaagttacatagtacatactatattttgtcggaaaaacaacaataatttatgaagttacaacactagtgatatcattttttgttctatttttttatatagaaaacttgttttataaattttttttaatagtatttagatatatatatatataatataattatttaattatatattaatattgatctccgtaatatatatttctgccttcgccactaagtactcatggacggtggatttaaggatgtgagattagatgccaaaaactggctaattgtagccaaagttgttgaagggtcccaattaattctttttttgtaaaattgttaacgcatgtaaagacaaagtcttgttacaatggtatttttaacaagtaagaaaactaagttaaaccaacaaagtaagattattgtagaatctgatacaaccagatatgagaatctaatactttaattaaaaatcatttataagaaactttaaacgtgttgaatatgatgtaaaatgctattacaatacaatagattatgagaatctaataatattaaattaaaatcattttataagctaagaaactttaaacgtgttgaatattatgtaaaatgctattacaaagaagaatattttaagaaattcgttaagggtgaaaaaggtaatcattttcttttcctagttgtttagagaagaataaatatatacatgtggaaattgtgtgtaggttttcaactttaaaatttaatcttgaaataaggtaaatgtttttattttggtatgattcgctgaccaagggacacgagtactcatgcatagacggtggatttactaaggatgtggattagatgtcaaaaactcgctaactatagccaaaggtgttgatgtgtccctattaattctttctatgaaattgttaaagcatgtagtgacaaagtcttgttacaatggtatttttagtaagtaggaaaactaagttagatcggaaaaaagtatattctacatctagatatatgagaatattttaaagggaacgataaatagcttcaatttaggtagttactccttcattttcaactttttgagttggtgaatggctacaaatctactgcctctaatcgtcactaatatacccaatatgttacctcattatttaatcaataaaacattacgttgaggaaaagaaaactccacattaatatttacacattacatgaaaattagacattattcatatgataactgcgacaataaaagtatcaaaggacgtggaatatgggtgtactgatgccttttgagatgcaatcctagacgatgataacttcttctataatttctttttggctttgcttttcaccatatctttgtatttcctcttctttagttttaccccatagaccaaggtatagtccacacaccaacaacactgccccacccacactgcaccagtttatatccccaagtccaaacacaaacattctcaatatcaggttctaaagacatgtagatcggaacttatgtttacatactttagcaaaaaaaaaaaaaaaaaaaaaaaagacaaaccttccaaggtaaaatgtttccttgaaaaggaaagatgagacaatgcaagtaaggatgagagctaaaggagtgtatagtgcagtgaatactggccctttcttctctattgcccatacttgtaaccaatatgtcagtccagtcaccataattccctatttaattttctttgatcattcttttaataaacaagaagaggaacttcatatttagagattagagataggattaaacgtacacaataagccattgagagaagaggtaagccgaattcgattttccaaactgatgggtttctgttcaccgcgactgcccaaactgcgctttgtatgcaactgaacaagcattgaagtgctaccaatcgcaacttcgctggatattccttcatcaccttgctctaacaacacaatcaatcaaagttgttaaagaatgttttacttttcttttaacgaaaacaaaaattcagtgatgaaagtattaacataaaacagttctcttgagtagtagtctctatggacatatatttgatgtcatacctatgtcacgtctgtaaataatggtgttcttgtttttactgcctccgtacaagagacattacttatggtaattaatgatatgataaattatttatgcttaaatttgactcaaaaaatttgtctatccaatatagacgtaaactggttccaagtaatctctaaacagaaccctacaataccattactccattaccaaccattatgaaagtgtataaacgactagtcgtttttcataccatggtggaggtccaattacgtaacatcggagacttgctttcttcatatatagatttagtgatctttccaaaaatgtaatatttcatgaaaacgtttttttaagcgaaatataatcgaagtttatatgggtccgttgaaaaacatcttaagaatttgatattctatactttgtctacctaactaaaagtatcccacatataccacaaaagtatgtattttttaatttcagactacccacaaaagtacgcatatacattaaaaacaataatttcttgttgtgatatgtatagatatatgtttactagttatatctttaaagccaaacattttatattttattaagtcttatgtaactttttaattgataaaatacatgcataatttcattgaaaacgacattccgtttttatacgagttagtttataattaatatcctaatagtgttttccacactaatgagataaaacaaattaaatagaggaaacaaaggagcaatgatttaaaaattaggaggcaactagtgaagtgatgaaagtgaagtagtgagtggcatacctgcatgataatccacaaacaccagcaagtattggcagcgagcattgtgattgaaccttttacagaatttttggttgatggaacggtgccgtttgggatggtgctgctgttatagtggtttatcaaacttggcccttttacaaaagcaaacactaatgcgcccaacattccaaccattgaaccagtgactttggccactccgtgtgacttcttcaaggtcaccgtctctaatcttttcattatacatataaaatgtaacattagattcgaaatagtggttctaactaaagcttagataatttgattccatattttatttgacccacatggtattcaatattgaaagcgtagatgattcaatagtcacatccattcctttaacatttttctttatattttttttatcctcgttctttatttagacaaatcatttgagtcaaaactcaattcatgatagtcaatttgttgtttctcctgcttactttttaattatattatcataaataatttacttctacacaaagcaaaataacaacttggtatattttatgcataaaataaactatattttaaaagtaaccaattctcgtccacacttataattgacaaatgatataaaaataataatatggctatcatttatgctttaagaatataaaaagaaacaataaaatagattaaagtgatttttattttatttgatttttttaacgattctttagctttttatcacaaataatttaaaattaaaataaagtattatgcccccaacacccgatttgtttttataaaacaaacacaacctttggatcatcgcagggcttatatgaaagagtgagactcttttgtgtagtatacctgaataggagagccaagacgaatgtgatagaggggatggcgttggtggtggctgccgcgaaggtggcggtggtgttctcgatggccacatagtagagattaagactcagcgtgagtctagatttttagaacaatatttagttaataaattaactcaatgaatcagaatttccaatttttagaaacattagtcatatatacccgcataaggagataaagaatattttgagcagcaagataaacgatagaggagaggacttggagctgcaaaacaacgttaagaatttgagagcttatcgcagtttttttgtttatagagttatagaagagaagaacctttcaaggaagaatgcgaaaggggacaaggcaagagccgcgaaggcttgtctataaaaaacaaagacaaaagggttggttccttgagagatggctactttagagagcaatggcatgcctgcgtatacaatctgtacaaacaccattgccatgttggctttgtgctccatcatcatcgtgtaatagtgatgtgtgttttgtcttttgatgtgatgaagctcactttgcttctctcccgctatttatgcatttgtgttggtggcaactttaaagattttctcttcttttttttttttaggtcactacaacagtacagctaatatagacacgtgtatttccattgaaaacgtttcaatcaaaacagctcccacacatccatttttttgtttcctctcaagattttagtgattttatctccttataaaattgcataaattactccttatagcggtgcataaatgtcacaatagttgtcttatctatatctagcgaaacataagtacgttgcaactagcttgcaagtggtttcacctaattcaacgttgatatgattgagttttaatccaagtactaacctccacaagaactattctgttccaaataattaattatttggaccctaattattttgtaacaataggttaaaatctattagaaccatatttagttttgctaacactataaaccttgccatgaagggatcatacaatagttagtttatcaatactttaagagaaaataaagccgaagattcgaagtagcgagacaaataatttcgccacaaaagaaaagcaaaagcacacaacttcgcgttgataatttacaatatgcatatctgctgttcaactcttttttgttttctttaaatgtaattgtcgaaaagataattttatttattttatacactatacaattggtccgcattgcgtaaaaagagtttaatcttaatagtactgctaaaaatgtgcgacgtataattagttaaatatttattgctggttgaaataggtaattgataatagttgagagataaaattttaaaaattagtatagtataacttctataaatagaattgtgaatactagagttatatttcattaaaacttttttttttgtataaacccttgtgtttagaaaaaggtttttttatttattatataattaatattattttgaaccacttacaaggaatatttcctgtaaaattattaaaactgaagtctacgaagaattaattcaaatttaaagaaaaaacaatattagagtcatatttcagtaaattgttttacatataataaatatattctaataaatttgtaaaattattaatttataatatggataggatactagacactaacatcatggtagtttaaccattttcatagtaaatgtttgcaatgagaataccaaccctgatacctagaggtgtactgacggaaaatactatcatcacacctatatttgttttcaatttaaaaacagaaaaaggtatatatattcattattaattaaaaagaaaaaataacaaaaataaaatgataatccaaagaaatcaagatattagctaagagatgcaaccaacgagtctttaattgtgcatacacttggagatgctcctaaagatagttcaataataatcaaatgaactcttattcctgattccaatactaaattaagaagaaagaaaacagaacattaatatgcaattaaagtgaggcacgactagatcaaattatttataatgataatgtagcataggataaaaacaaagaaggttacatgtaaatgtgaagtttctattatttatcaaatagtttagatattacctcttgttcttaagatatataattcgatcaagccatctaaaatgataaattctacctcttcttcatgacgcattatgatattcctacatcaatatctttcaacacatgctccatttttcaacttttaaaagccacatgtgacaaaaagaatgtaatggttctaatgcaacgttttttttatcttcaagtaggtgtctaatcaaagggagataatgatatatcagctactgttttatgaaactgttgcaacaaatcagaactgaaatattttgtgttgatatgtaatgaaagaacgaccagtgagaactattcaactattattaacgcatgatgtcgtagtaccaattatgttgacctttcataattctactcatttcaacacgtgtgttatagctttttcaaaaacttaaattattgtttacatatgtggtcgttcctattggacttacaaaaaataagttaaaaatgtaagagatatatttggcagatttttttgactgtgtgatattttgtaaatgagtaggcatgaaatgtaattagccttcaacgatttgtgtcagtgcgatgtatgatcggtcaagacaaacgaaaaatagcattctttacagattgttcagatttggtgaaaatggtgtcattcccataagagtgaccagctttctcaacatccctgaaggcgatacagagcgacatggaagagtttggttttttttctttatccttacttctatgaagaattcgtacctatctgcatcatatcacctatgtcaacaatttccctcatcattgacttgcttgagttaatctaggtagatgtcgacaaaaaaaaaaaaaaaattgtatcaatgggaattagataaagtttactacaagaagtcattccaaattcctaacattattcagatcaaagtaactgttagaaaaatgtgacaaatttttcagccacattttgatagaaggaatattagttgaaattggtcataatttttggacaaaataaagatggtcggacaattgtcctataattatttcaaaattttggaaatattttttgatagataataaagggcgtcagaaatttgttggaccgacgagttatagactttacaattatcaattaatggtagtacaacgctttttagatgttattagaaattggtcgaaaatataatttatcaacttgaaaaaggtcaagtcaaccacattaaattattatcatcgaaaaattcaaaaaaaactaaattaaaaacataaacttttttcaactttggataatcagatttttaaattcgagcattatagaaatagagtcaaaacatgccaacatgataagacaaattactaaagcttagatgagggctttcacatttcacattcttcacattcttcttcttcttgtgaaacacatacagagattgtcatcattcctcaggcttatggtaagctacgatttgataagttttatgtcagttttgcggttatgagaaactaatggaaaagatgttgtaggcctattactggtcttgatggagcatttctaaagtaggagttaaaaggagagatattagcagctgttggaagatatgcggataaccggatatatcctataacatgggctatattgagaatagaggataatgatttatggggttggtttgttgactagctgaagcatgatctgggcttagggttagacaatgggtttaccatcatttttgacaagcaaaaatgattgataaaagttgtcacacacaatcttccaaatgctgagcataggcattgtgctaggcacatatttgtcaattggcaaaaagtgtatcgggagaatgactatgaacattttttctaggctgttgcttttagtggcaatgaaggtgactataactacaatatgagagcattgaagagttatgataaggtagcacatgaagatttgttgaaaacagaacctaggactaggtgtagagctttcttcaatagcaatgcagtttgtgaggatgttaacaacaacttgtcaaagagtttcaacaaaacaaccaaaaagtcacgaaagatgccaattatggacatgcttgaacatatcagaagacagaccatgcagcgtgtcttaaagaggtatgagaaagcaagtaagtgtcattccaagtttgcaccacggataatgaagttatattaggcaaaccgcacatctacaaagttatgcaaagttttaaaaattagtgagaatctatatgaggtacgagagggcaaagcaagatttgacgtgaatcttagtcagtgtcattatggttgtaaccagtggaacatcacatgaattccttctcatgagcacaaccgtgatccagatgaataagagtttctgatttcatttattttctcttttatctaatatgagtgatgtgattatgtgttaactctactctacaattgtatgtttggttagctatgtggataagcacctcttgacaagttggtggcaaaaaacttactcagacaacgttaaacctatgaggggtgaaaggatgtagaagtcacaacataaagaacctatttaggtacctgaaaaaaggaagcaaagaggaaggccaaagaagtatgataggataaaggagccttatgagtcgtcataaaatccagacaagctaacaagagatggaagaactataacatgctccaattgcaagagaactggacataaataagggtacatatgataaaccagatgttcacacataccctcaaaaaaaaagagggagaccaaagaaattaatatatatttaaataataattatgtattattttttgaatgctttttcaaaaagaaaattattaaataaatacataaataatttctgactaaactttccgacgaattttcgagtaggaaaacttttctaacttaagtttgtcaaaaatttatcggaaatataaaaaattgaaactcataatatccgacaaattttctgaccaatattttcgaccaaatagtaaaatgtgcagtgaacaaacatgtgttcaccggcttctttacgacaaagtttctgacaaaaataaataatcagaatttttccatgctttccaaagaatcattccgacgaagttgtggtcgtcagaaattttttctctttttccgatgtactttagtcggaaatggtcatgttctatttatagtgatatgccgctttctcctttactttggtcagagccaggaaggaaagaaacaaccgcgataaaaactaatgtaattaacttcatcttcatgtcttttaccttattatttccttctatcaaattctaatcttttatttttgattaggaaatgtgaaaatattgattattaattggatagggaagatatatatatagtagtaatgttttgcaataggcaaagtgtatattatttaggtagtgttcgatctttttgattaattgtttagtgcatttcatatgtacatatggcacatattattggaattaaactatcaaaatttgaaagcagttttttcaataaaaactgcaaataatgttataattacattttggatacgtgtaataataattatatatacatgtaaattgatggatttaattataagaaaataaaacttatcaattcagatatatatatatatatatatatatatatatatgtatatacattttagatatgtgtaataataatttatgtagaagtttgatctgaaaaaatgaaattcattctatgaaaatcttcaaatatttaattgtaaataaaaaataaaataaaaaaataaataataataataataataataataataataagtaaaatatctgcaaatctattaaaaataaaattatgagaaaataattttcatacatatttagaggttgtgtagttaggttagccgggtttcggttttaaattgtggtcaaccggggatgggattctagctgaaagtgtaaaatcggtgcctctcaaacatttagagaaggatattttaataattgacgcatgttttcaagatttatgcacttctcattagattctaactttttcatgacttttagttttctattttcaattcagtttaaatttgctcgtttgtttctaagaatgatgtttttttgtctgtgtcgattcttgttaaaacaaaaactcacttttaaaaaagttttatatatgtaatgtctccaaattcaaacatataccacacatatggatgtacaattcccgtaaggatccatatatgaacctttttacgagagagtacgaacaaggccttaccaaatatgtgaattgccaccaaacttaaagttaacgtgtatttctaaaacaatatatatatatatatattaatgagagaaattcccacaccgaaagttagaaaaattatcgagtgatacataaaggtttagggtcaatccaactcaaaactaattggcaataagtggattggcattaaccctttatattgataatttctccaacttttgatgtgagactttctctcattaacactcccctcacgttcatgcatgaacatctgaagtgtgagcatgtgtaggaactacatccactgggtgatgtgtggcttttacttcaatagcatcctccctcaggttaaagcatgaacatttgaaacatgggcatatatgggaacaacatccacaaggtgtcccaacgatcaagtggctctgataccaaaggaaggctcgattctgtcaagatagctagaaaagcattagcttgagcagaagtgatggattatgtcgaggttaatgggtagaagagccattatctcgaagggacatagtggagaaatatctcacattgaaaagatgaaaaggacttgagtagtatataagggacgtggacttctctacccattgctaattggttttgagtttgaaccccatgaaagttaacaaacacaaaacgaacaccatactgaattaagttacaccatcacattatagagtcccaatgatcaacattattacacatgattttgataacttcagttttaacattgataattattttctaaacatttaaaaatttaacacctaggataaggcataccacatgctgcaaatacttttctagctggttcaagatacttttcaatcgatggattttccatgtaatcacatagacaagacttttgtatttttaagtttttgcaacattccgctgatggtgggattggggtctctaacgctgataggcatacttgaagatctgtcacaatgcaagccacttttttgtcttcacttaaaactctaagtgcttgggtaggaactagaaccgacaagacaaaggcgatgaccattaatgtagtgatgaacttcatgtcttataactttagcagctgccacaatcaaactctagttcttcgtcttcttcttttttttgcttagaaaacgtttgagattttgttgaaagatggaaacgttatatatatggactaatgtttttcaataggcaagtgtactttaggacgtaaattttatctttttaattaaaattttagagcatttcacacctatatgacacattatctatattttaatattgtggaaatactttaaaaaaataaccttactctttgtaagatattattaaccaatgccattagaaaaataattttaaagattaaattagtttagctcattaaggataaacaagtcaatttacttaagatccatttgtttttctcaggggttacgaaatctatgcacatgttgttttagattttctaatcaatatatataatatttttaagatttccttaacaatttacataagatttttaagatttacttttaaccatatacataatctaaacaaattgatggggatttgatttacttccccatctatatttatatgacacattatatttaatgtattctacataatttatatgaaacattatctatattttaatattatggaagtacttaagaaaaaataaccttgctctttataagataatagaaccattgtcattagaaatataattttaaagattaatctagtttagctcaataaggataaacaagtcaatttacataacatccatttttttcttgtgagttaagaaatctatgcacatgttgttttagatttactaatcaatatatataatatttttaagattttcttaacaatttatgaagatttttaagatttccttttaaccatatacataatctaaacaaattgatggggatttgatttacttcttttcaattacttttttattttttgattatttgataaatattgattggttagttaaggcaatattagtaaaaacaattttccttagtttgtttatctttaatgtttttgattaagttgtaacttgtaaataaaccattgaaataaatattctgttttttgtaagatttaatcaatgattatatatataaaaaattagtttaatgattggtttagttttttctctatttgttatattttataagttggttagagataaaatagtaattagattttacctttttaattatctactttttgataaatacttattggttagttgtattcaatatttgtaaaaatgattttacctaaaattctgttctttaatgttttataataagttgtaaataaaatttttgagttatgtacttaatttttttttaaagattttatcaggaaatattttagcgattggtttaatagtcttactttatttatgttagagaaaatataatgatttgattttatctttttataattgttcatgataaattaatgagaatattacgtgttaaggcacttttctgaaagtttagccgtaattaggcacttcacaatcattagacactttttctatgtgaattgacatcactaccctctaactatctctcccttttatcttttcgttatctctcttcttttagaatacaaaaacatttttggcctctcttgttcttcatctctctttctagaataaaaattcaattttttaggacactctcaatattcaaaatcaaaatcaaaactgaatctcttaaggtttatcatcatcttccctatctctcaacaatctgttgcttctcttcttcttcctctctcgagatctttttcaaatatattctcaaatccacctttctccgctggatctgattccaaaacatgtgaaagtctctggtcacagaatttccgtcagaagtttcctcgaaaattataacaacactatcgacattctctctttcgattttgattccatgatcgtgaagcctctcccgaatttcaacaaccgcatcaaaattgtaaccatttgggcaagttacgtttctctctttctctcgaagttctagaccctatctattcgccgctccaacaatcatacctccgtcaagaggacgttatcctctcaaacgtggatctagctttgattctcttcacttatatttcgcatattagtttgttttttacaaaggattcgagataattttggaaaccatgaccaattaatctggttaatcttattaaatgaacaaaattaaccatacaattacatccacaaggttaatacattcacatattatactatataaactctaccataaaacgttggatatgtggacacacatcataatgacagtcagtgttgtggacaacctttgctaattttggttcatgaactttagcttcatggatacaacgtgagcctttgagaccttgtagagatcttcagtaatttcagtaaaattaaaagctggatttaacaattataaccatccacaaatgtgtgtatgtcttgttataagaatctatctttggatccaatacaaaaatgttgacaactaatgttttctcttttctgtctcttactaatcgttttatgtcgtcgtgtcaaaacaagaaactaaccaaagactagagagaatgagagtgaaggttctttttgtgcttgtgttaaaatgagtgagtgaagcaaaacattaaagagaaatgagagatgtaagagaagtgaacctctaaaagttaaataaaggaagaaccctaaaagctcaacaattttttatcgacgattactgttcatgtctaaatttgtgcattgatatgaaacgacatgtgagttactaggtgaccatttggacttgattttttggacactcgtcaatgtcctctatccaccgcgtttcagccactgttctgtagcctttgcagcaagtgttctgtaaccaccaattaatatggacataatcttaacaaaatcactacatatagcttgtttttgggattgttcacctattactcaaacatgaaacgattcacaaatctcactataacaatccataattcacaatccataataagccatccataatgcacataccaataacaaaagcagaccgagctacaaacacacttttatccaccaacaaagatttaccaaacaaatccatcaacgttcgatatatcaatttgggcttctctatcagttttcaaagaaattaaacccataacttcaaaattttcagaaaaaacatgattagcaaactgtaagagcctaatccactaattgttcgatttaatcgcaagtaaattcacgatgaacagggatctctaatctctgtaacatcgtaatatctagaatttcacgatgatataaacagaagaaattagtagagacaataacaaagaaacttattgttagaggattctgagaatcgcaaggatgatgatcatcttcttcatgggtttgttgtcgtggatctcaaacttggagattatgaggagacgacaaatcgaaagtttatgaggagattatttatggtataatgaagattggtgatttcttattgaaatgagagaaagttaatgggaacgactatgattttgtaaaaaatatacagaacgacaatgattttgaaagagagaattgaaaatgatgaaaaacaaaagaatatggaagagagagagagaggtgataaaaagaggataattcctcacccacacgatctcatcaataatgagtttaaaattattgcgtcatcactacttcaggagtaaattggtccaattttctctcaaaaagatggcaaagtgcccactccctcataagtgcctcaaaaggaataatattatcaaaaagtgcctaaacgtgtcacaatcccaaaaaagagaatattacactctaagacacttttctcaaacaatttccgagatacgacactttcaaaacacaaggcacttctaatataaaaattgtccattttgccctcaaaccaatttcggtttaattctctaattttaatttctatacgaaaatcaatttgtaagaaacctctctttctcacccaatcccccacgacgactttacaatttctgtttgtttcccttttctaatagatggttcatgcttctctttggtgatttcgctttcaaataatcccttggcatctacgtaattgttgttttctcacttctcaatgtcaatacacatcgatttctcctcccaataccgtttcaatttcctcgtactactcccttacgactgacaatgatcaatccttcttccattacttccaccatcttcttcgattatgcgtgacggctcaacaatgcaggtaagtgcatgcccaaataattttatccgatttcatcttctgttcttggtcattagctgcgaatctcatatttgtttactctcggtgaggactcgtcctcgatgcctgtaacgtctttgagattgtttctcttgttttgttgtcggatttgcgtttgtggaactcgattcagaaagctaatatgtctcatgggatatacgagaatgcttttgagctttacataggaatgcgtgaacgagatctcacagagtaattgtcatgtcttgattagattttgacttttcattgcatgaatcttaagtcactgtccatttatacattgttaaatgaaacagttgatcttatattctctttgattcaattatgcagatgattccttgcactacattaaattatatcacaaacgaacgtattgtgcatccatgaattcaacttaattcaaatgattggtgaccatagatgatagaacaaacaaatatggttagctggatgcttacttattgatgtcatccaagagaatctgtccattcagaagcaaacatggatattgtgctcattctattcactatataagtatatatgtttcttgttatatttaggattagtatacaattttggttataatgatgggagtttccatacacaagtgaataaatggtcaaagaaaaatgaacgatgatgtactttgaattggcgtttgaattggtgattattgttcatgtataaacttgtgtattgaaatgaaacaaccccgtaagtcactagatgaccacatggactagaccgcttgaacagtcatcaatggacacctgtgtctttgatttgctttaaatatgttttattcgtcggtaaaattaccattttttgtatgagtttagtgtttgtttttacggtttcagatttagtggagaaagattatgggttgagggtttgggtttaattttagggtaagtaaattaggatttagtgtaaaccgttaagggtagagggtttacacacttgtatgaaccatttttgaatataatcataagaatatcaccatacgaatgatcctatattttacagctcttagattgaaatgtcttagctgcacaaatagatacacgaaagatgagtaacaccaaatctaaacattgttcaccaaaatcaaatacaagaacacttcgttagttggagaacatatattcaaagagtaatggacggattcctatagctgacagtccgcaagtacgtgttcatatatgatatagtgtaaaacatgactgtgtatccacctagcaccgaacaaatggatatacatttttgtgtgtttctcgtaaacctttctagacatccatgagccaccttaatagatcggtgttgccaatcagatccctaacccaagtcccatgcactaaatcgaaaaacaaatccaatcaacaatcaaaaacacatataatcgagatccaattccacaataagaatacaaacatcgtttgaattggagttagagatgattcataccagaggacagatccatgacgaagagtttctgacgagaagagatcgaacggatttctaagtggaatcttgtaatgctagggtgtgtttaggagaatatcacaatctgaatgacgaccgacgactagaatctcttctacttcgccatcatcattgcttacagtggaaccgtttctctccggcgacgagaaatcgcgactgttcacaacgaagatgttcttgagaatcgcgctatttttcagaacggtgaacacaaggatcgtcttctctggcaatcattgctcttcctccattagtttctcttctttgacatccatgaataagtcttagatcgaacgattgagagattttcgaaaattgaaaacgaataatatttttttgacacgttcagttagttttattagataccaaatcaaacaaaatccctagaaccggttaatcaattgatggtttaatgtgggaaggatagaattgtccttttatcctccaaaaacaaaggaaagtgtctcatccctgaaaagtgcctcaaacggaataaattttcctaaaagtgcctattagtggcacattcccttaaaaaaacttgccaaaaaccaacggttatgattttattagatgatcggatcaaaactcgttaaaaccggattaggcaaccccggattttcaactaaaataatttaaatgagtttttataccctaaaacattcgccgaaatatttgcagttgcattatgacataaattcaactgtaatgattatttacaattaaataatcaacgcaattcacaaatctacaatttcatatgcaaaataatataataaaaaatatttctaaaaactttacattattataactatattaatttttttaataatattctctaccacataactataattattttctaaacaaaacttaatcaaatttaaaacagaaacaaaaaattatcatcgtattatgaaagattcattaaaatcgagtactattcaacaacaacaacaataatttaactaaattaatatttaacaagaataagatataaatttaattgtttactacaataacatcactcacgttttttaaacataaattcacaaatacgaatctgtaaaaaatcattaattcatgatgtagcacgggggtaatatatatgaatctagttatcttataatttcaaagaaatttacatgtgtatacacataagattttgttatttttagtacatatcatttttcaaattttgatttgaaaagatgatgacttgctaaaagccactctgctaaagttccaaaccagtcgttatattttgttggtaagacaagagattggttcatatcacagagtgggagtcggagtcatgaaatgtcgtctatgatgggaaatacattactagattgcttttagtcaagatgggctgccatattatcatatttcaattagtgaactgctaattaactctttctttttatatgatagttgatatgtttgtttttgttcttactaaaaaaatatgtaaaagaaaatgttcattttaaagaatcatcatctgaatagccattacatgacaaacttccaataatgataaaacatatcaaatatcattttgagaattataacattatgaacaattaggaaaaggtataccacaagcccttatgacccttttagcatttccaatatattgactaatcgatggacttatcaagtaagcacacaaacatgattgttgttcttttaacttttcacaacattcttctgacggtggacttcctgttattatttccggcttgcagacttgaaattttgtgaaatcgcatgtcgctttcacttcttcccccaaaatcaacgttttggttagagttacagatgacaagatggagacaatgaatactagtgtaatgaatctcatgtcttgtaaccttcacgactcccttctatataattctattacgattgcttgaaaatgtttgagattttaataatgagatgtcgagaaggatggtgaagctatatacaaaaggtattaatagatgaagtaatgttttgcttttcttgttaagcaaatgtgttttttagctagtgtcttttgtttttattttactttactaactctagtgcatttcaaatctgtgatacaattttttttgatgaaaatgtgtaaaaaagagtattaagattgtaacacatgttagcaattcttaaaaatacaattcaataaagacatatatatatatataattataataaaatatcaaaacttttaaaacaaatccatttttattaatttttactaatgtatatagaaatattattttaaaaaaaaaaatcaaaacttttgaaaatcttcaaacattaacttttattattaattataatttttaagttaataaatagaaaaattaaaaatcttgtcaaggttaatccaattacggattgaaaaaacctgaaatcaaaatatggttcgtgacgaatgacaactcattgcctttagtaaatgggctcacatgggccaatataaactgatgggtatcggatccaattaggtagagcgtgaacaaggtgttgcaattttaaccttagcaaattttcttgagctaaaacaatgtttgagatttttaattgtgagatctcaatgagggtaaagctatatacacactttttaggccgcgaattttgtttgtgattatattgaattgcatttaatatttatgtaacacatactgttttcttattttaaaaatgttttatttgtcggcacatataagtggcattgcattaaaaatttgatatgaatagatgaaaacttgctaattaagaagcactctattgatcgatttaaggttttatttgtgagcattacttttacgtaattcacgacaagactgcttcatttgcaaaggtaacgtgtcaattcagcttaaaatatctttttcatattttgttaagaagaagttgctataatttttggtaaaattgttaacatgtgacacaaactaatttttcgtttatatttttcgttaaactaattgttcaggttatttttctattttcattattagtccctgcacgttttaggtcaatatatatagttttaaaggtcattatttactttttaccaagtctttttctaagcctcttgagaagcaacttgttccaaagcactttcataagctatgcatcccctgttttcagagtttcatcagagatttcaataacattgaaaaaatcttttctaactcttttctctattaatctgtttatgctttcttactcatacatgttgtttgtttcatccttcatgtctgagtagtctgcttgttagggttagggtttctcattagggattcatatgattagtagattgcccccatcctaggtataatctgtaggattcttcatctttggttgttcttaatgctagttctaaagtaattaactagaacttgatcttaggtaataggtatacccaccataggtacatgttactggaactactatttgatgagccaatgtttataggcgtctcgaataagattggtctatctacttaggtgaacttatcaatttcgtttagaatgcatgtttaggtataggatttcacggcacatcaccgagaatcttagctctaggcatagtgagtagcacggcaaatcactggttactcaataattacggtttgagttcaagaacggttcgataacaacctggctatttctagatctactaatcatctgtttcctgataataccttaacctgatgttttattatcttgttttacaaccaactaaccttttatttgcttactcactttctttttattttttttactcatctagtttaatcttgatactttagcttattgtgtgaacaaaagaactttgtggaattctacccttaagtactttcgacgatctcttatttgagagagtggtcttaaggcaatttgagccatatcaatacccttacttcctatttaagaatttttaaaaataaaaataaagaaaacatgtagatattcaaaaatgtagttgatatgtaaaaataaattggtgatttagttgaacaagatgattttttgatagataatgttttgtctaaacttgtttgaaaacattttccgtgttctactaatatttgagtttttcttttaaactgatatttagactagagtttgttctaacaaatttagaaaatcggataacaaatttctaagacctttaaaacatgtattctatgcttttcttcatgttcaaatttttgtgtgaaaatgtattctacgatttactatatgttcttaaaatgttagaaaaacattttttacttttagaattcatattcaaaagaatttagattttagaattccaaaaagtttagaatttctagatatagaaagtgtatcattgaaaaagaaaactaaatattgattaaatattacgtttatatagtctattattggttaagattacaatctaaggggtttagaaccgggagggtaagtgctctgaagcacttcaatgcctctgtttttttcgccagagttcagagatgagtgttatgtttttcatcacgatgtcggtaatgagaaagaaagaaaaaaacaggtttaaattaagggtttaggagaagtctccatttcaactagagagtttgaaaacccataaatttatctggtttttgtaaataacttaggaaaattatattttttttagaaatttggttagttaaatttttgaaaaatagggataaaatagtgggttttattattaaaaaccctatttcaccaaattctttatatgaaggtatatatggatattttatccatagaaatcttttttatttccaagttccccaaacatatagaattaaataaactacataactataatatacaaaaaaacaatgcaatttacattcattgtaaatatttaattatcaatatgttggatttttacaaaactaatttatatataattttgatatgaaacaatgtttttttttttttttaagaatctacaaactttaattttatgtcagtaaacgaaaagaagaaaaatatatgtaaaggctattggtttaggttaaccggacacaatgagaatttattccagtcatgaaccttcaagtcacaaaaattattagtccctgattaatgttactttacttcataagttttgaattcgaaagcttgattttcgatatttaatcatgtacgcttatggtattcgaagttttggattttggcatacattatacaaatcacagacccgtttttgcatctaaaagttttagttatggatagtcagatttgtttcagaatgaaatttaagaattctttttcatctttgtgttggtggctattttttttatctattgaatgtgtagttgacgattgcttttttcatgatatctacgtatttgatgcatttgttgaacaacaaacgaatacagataattctgctacatgtcgaggttataagaaaatgaagattctattgaatcaggttaaatcatgacatcatattaatagactccaatgatcaacattattttatatgatttttataaattttacattattaatgactattttataaatatttaacacttcaacaattaggataaggtattttacaagccgctaagatttgtttagcagctgtaatatattgactaaattgtgggttttgcaagtaatcacaaaaacatgaattttgttctttcaatttttcgcaacattgagttgatggttggcttccgtctatcaccgatggtaggcatggttgcaattctgtcacggtgcatgccactttcttctcgccccacgaaactttaacaatccctccatatattggagccaccaacgatagaacaaagaaaatgaatgctaatgttgtaaatttcatgtattctaatataataaaagactcttatctaactgtagttttttttgtgcttagaaaatatatgtttgagattttgatgataagatgtttttgagaaaggtgaagtatatagatggagtaatgttttgcaataagccaaatataggtagtgtattttgtcttttggattaaattttagtgcatttcgtatctatgtgacacataattattttcaatataatttataagtaataaaaaatgtttaaaactttttttagtgttaaatatttttcaattaaactaaataattataattaactatccaaatctaaaagcaaatcatttacataatttggaaatatttgtttataaaccatcaatgcacacctaattttggatatgagaaaaatgatttgaaactatcaatgattaattatagataaaaagtaattttgtaaagtgagaaaacaaacttatacaaacgaataaaaatatctgtaaatcaattttgttgggttagggttgaccggttgtttgggtttaaccaggattcagagtctgggacttgaaaacaaactggaggctaattggattgttctttaaccaattggggaagtagaggtgtaagtgtttaacaatggtgcctctcaaacatttgaagaaggaaaatccaatcatcgacgcatgttttaggatctacactacatcgttataaacatactctctccacttgaggcaaagggacggattcattgcttcaaggtggattccgtgagggttagtttacagaacttgtaagatgaacttcgtgttctagtaaaacacaagtatgtccctgttaggcatttctttatccatgtcttgtgtggggaaaaaaaattcttcatatatactatttttcaagccttacatacacattgtgaattgtttcatttcaaatttttaagctgcagccaagaatgtaaaacatagattgttcctagagaaaaaaagttttgtctttgcttagcctttttgtactctcttttcattgtgtgatttcttctcaatgaagagttttgcatacaagctattgcgagtgtggctgagtcttgtatttagacactagttttgttagagaatcatcttgacaataattttgcatgcaaaccagcggtgttactatcggaaacctacttttggcattctcatcagaacaatggcgattgagaaaaatctagaaaagccaaaaaaatattgtttacaaattttgtagggtttccaatagtaacaccgctggcttgtttttcaatatggaccaaggttaaataagtaattggaaacaccggagacacattgttgtattactgaaaatactgaatttctcatcgatgatagttactaaatgtttattgtttggttcgcgtcctattcctatccagctaaaaatgaaaattcaatttttttttgttggaatattaattttgttgaatgaatgatcatatatattttaaaacatttttgtggtgttagcttaagaagagttaaaattttttaatgttttagttaatacaaattataaataacacaaccaaaaaacatctcgtgtaaaatagaagtttcgtgtaactatcgactgctactacgatgccatagtcatgctaatcatatgcaatgcgtcaaaaaatgaccttaccaaaaggttatgcatacgcacaaaaatgaaccaggagaagttggactagatataaaaaaatatcgatggaaaaagattggaagaggtaataacggattatgcaaaggagaaacaatcaaaacaaagagttatgttcgagaaaaagctacaagtcatcatcgagaaggtaatcaataattatcaaggagattactaaaggctattgagaatgtcattacttgtcgagaatctttgtaggattgacaaagaagtaataagtactaacgttaatatctttttttttttataattttgagaaataaggagagtatatcaagataaaacagaccatctgtttttagcttaaattagatgaattaggactaagcaaaaaacctgggatcgattatccgaactgaaacagatcaaaaaaattagaccgaaaaccaaacctgaactcgaagattttttttatttgattttaaattcctctatccgaaaaacccgaatccaaacatgatccgaacctgaatctaaatacccaaatattttatttaaaatctaaattttacgtaaaaccccaaattttacccaaaaaatcgggtatcaatcccaaaaaagggcttaaaaattcatacccaaaccgatattttggatttattctattaaatccgacccgacccgcttctctgaatgaccacctttaatattttgatgaacttattttgctttataaaaaaaaaaggaaaaaaagagtacgtcaaaaactcaaagaagagaaaatgacgaatctttttcttaaagatgaggcaattgtatcaagatacgaggacgaggttggtttgtttaacattatcccaaacaaagtttacggccaaacccgtcactgccacgtgtcatccggatctccttttggcttcgtctgaagacgttcgatgctcaccggtcgcgtctttatcctctcatcatcatcctcgaaacgtgcaacacacaaaaaattgactataaaagattgcaaatttctctctaaatatctgattcaaacgcatttggtaggctgagagaaagaaagaaaaagataaagatggatcacgcagcagatgctcaccgtacggatttgatgaccattacaagattcgtgttgaatgaacaatcaaagtatccagaatctcgtggtgatttcaccattttgcttagtcacatcgttttgggttgcaaattcgtttgcagtgctgttaataaggtaaaaagtttcgatctttagatgattttttgggtcagtgctttaaaaaaagatgtcgctttcgatttatgttgggtaaaaggtttgatttttatgggttgttgatgaatgatgatctggaaattctctttttctagatatgtggagttgtctcaatcgtctttagtgttatttaggatggcccattgagaaagttgtaatctttatggttgtttgttgcaggctggtttggctaagttaattggacttgcaggggaaacaaacattcaggcaagttttgtgtgtttcttcttcttgttattttggtgtctctgagattccattttttgtggtattagggtgaagagcaaaagaaacttgatgtgctctctaatgatgtctttgtcaacgctttggttagcagtggtagaactgtaagtgtttatgaagttgaaatgatatagggatgttttcattttgtgtctcctcactgtttttggctattgaaactttgtggtagtctgttcttgtctcggaggaagatgaggaagctacgtttgtggagccatccaagcgtggaaagtaagtttagaagtgatctctcattgatttagcttatgaaaatgttattgtttagcgtaatctgattattttttgttacctataggtactgtgttgtttttgatccgcttgatggatcttcaaacattgactgtggtgtttccattggcacagtatgtttcattatctaacccaagttttccttttttttaacattgaaagagggcttggatagtgaatcatgtgaaaaagtttgtcgttttgtgtttggtttcattgtgtgtagatttttggaatttacacgttggaccacactgatgagccaaccactgcagatgttctgaaacctgggaatgaaatggtggctgcaggttattgtatgtacggaagctcctgcatggtactgaaaatgagattcccaaaggcaacattagtatcaattactctgattagttgtttccaacattgttagtttaatgtgatcaactctcgcagcttgtgttgagcactggaaccggtgtccacggatttacactggacccatctctaggagagttcattctaactcacccggacattaaggtaatgggaactagtcaacataatgttactccctttttgtgagtttctcaaggttcattagatcttcttgtgtacagattccaaataagggaaacatttattcggtgaatgaaggcaatgcgcagaactgggatggtccaactacaaagtatgtagagaaagtgattaaatctgattcaagtctagcttgcttgatatattcatggttttcgttttcggtttcggtttcggtgtaggtatgtagagaaatgcaagtttcctaaagatggttctcctgcaaagtctctgagatacgtaggaaggtattatataagatcctttatctattttaaagctctgtcatagtaaatagcatatgctttggtccctttttggttcatttcattttgttaacagtatggtagctgatgttcatcgtacactactttatggaggaatcttcttgtacccggctgacaagaaaagccccaatggaaaattgcggtaagcttaggataaagctagttcaaatacataaccactaaaaggttgttctggttttgagatcgataaaccgttaaccccccgcagaaaacttaacactgttttggcttatatatgtggacagtgtcttgtatgaagttttcccgatgtcgtttttgatggagcaagccggaggtcaggcctttacgggaaagaaaagggtatacattttcctctataccctgattttattgtcacttgacagaaatttaaagattttctatacggtttacgtttcctgatgcaggcgctagaccttgtcccggagaagatccatgagcgttctccgatatttcttggtagctacgatgatgtagaagagattaaagctctctatgctgaggaggaaaagaagaactaagcttctcattcttcttttattctcttactgtctctgtctctcttatttctatatacagtatcttcttctgatgagaagaacaatataactcatttacaaaaggaagatctttctttatcattaaatgcacataaaaatcttctttctttcatatcttcaatttgtcttcagctaattctaacatccaattttagatcattccaagcttgtcttttgattattgatcccactttagcactttatgtcacaaagaaagaaagaactttatttcaagttttttaaaaagcttctattgatttatcagaagaaaagcagagatgaatgaagccttattaaaggaggtcactattgaggaaatacgtgaagcgcttttctccataggagcaacacgagcaccagggatggttttaacgctgcctttttccaacgctattatgagatagtgggagaaacgatagtctcaaaggtcaaaaacatttttgcaacttagtaatgcaaaaagggtggaatcatacaaatctctgttctccatagctgtcgatcttactctcacgtagtttccttgtttgaaggtaagattaagagctgggaatgggcagttgagaggatgaaaagtttacatgtacagaaagtgacttttggggccaatacaatggagataatcaaagtccttcataaaccaaaggactgtccatcacttgtaagtcatattttcccactgttatctatggctgatgggatggaagattggttcattttatttgaacctaatgggtgtaattagggggcctataaaatagctagaagtgttacttctgatataagagtgaactcttatgtggctcaaagttaccctaggtggatgaaagcttttttaatttaggagaaaagtattgccgatggttttaggtacttattttcattataggtttttatttctaggggatttataattgtagattttcttatttttctattgagttaattcggttttaggaccttcctatattttatatatctcagctattatcttgttagctgtaatgttggaattgtgaatcctagattaaatcctgcaacaagaaaagcttcatgagaagaagagaagaatagagaagaagcttcaagcgtaaagaaggagcaaaatgaagaagaagatgtcgtgacaagaagtcaacgaaacatgaagaggaaggaacaaagtcaacagaatagatgttgggcattgtgttttgttgtaatgggttgcagatgaattaggcccaagtatgtttagttaatgagtgttgtgttcttagtctaagatagagtctaagatgttgtgtaagagtgaattaaggagttgggagttccaacatagtagagtggctgatgtaagttttaggtctatgatgtggtctagagtctaagtatgtgtagtgtagcaagtggagcaaaaccactgtatgtatgtgtgtctttgtgttgtgtaagattatcaagtttattaacaatgtatacattgaagtgtttaaacgtgttcttgtatttttttgttttaacaagaacacaaacagaggttgtgagcaaaacagagagtttgtggtgagcattacaacatgtaaatatctttaagggattactttgaaaagatagaaaaaataaaaggtttagtttctctagacttaagcggtgggttttatgctttatactcaaattttcttgggttgagtcattaacttttgattattttataattaaggttattccctttcccttaatcggtaactagtagggtttctttcttttacttctgtaacttttagctttcatcatttcaacaaaaaaaagattaaaaaaaaaaacacaaaccaaaagatgagtgatgaattatggaatgacatccaacatatggaattgggtcgtgaactctttattccatatcatgcttatgctggagcttttgcttctaatagattaagtcatcttggaagaattcttaatcctcaaactcaaagtgttgaaagagctatactggagttaccttatcagtggggcctaggttctcaagttcatggacatatccttgatgacaggtgctttcaatttcgttttcgttctgaggcatacctacttaatgtcctaaggagagcgccatgggtgtataatgaatggtttacttcagagatgggaagattttgctacagaggatattcttacttatatagactataatttcaaattagaggaatacattcaccttatgtatcagagaggacaattgagttcattgcaagtactttaggtgaggttgtggctatggatttcaatgaagaaactacaacgcagattaccttcattcgagtcaaggttagaattgattttattgagccactacgtttctttagaagagtgcgctttgaatctcgagaaggggccatgaacggttttaattatgaaaaactccaacaagtttgcactaattgttgccgtgtaaatcatcaagtcagccattgtccgtaattagtgcatcatgaggatttagatgatgaatcagaagtgatggtaattccagagaggcatgatggtgaaggctccaacagcctcaatcgatgggatcaagagattaactcacaaaattctaatatctcaacgtattcacctctgcatgattttcctgttgtaagctggaatttttatactgcaggcaacctacctcatcgattctcatcatcttcaaactcatctactcctatagcttcagctagttttcttgcagcttcaggatggagacctacaactagacctacctatgaatttggtgagagttccaagcgaaagaaaggaaagcaagtgtgggaagatcctgaacgcaacatccgacagagacgtatggaactggggataaggttttatctggtggatggtgaggctccttaaattcttacatgaagggcttaatattagagtagaatcggttttatctactctaatgatacttgtttatgggaatcaaggtttcagtaagttactttaggtaataaagatccactttaaacaatagggtggagttgttacaaaaaattttgaaggacgaagatggttataagatgacaaaggaagatttgtatagcagctttatgatcttccatgactacattttttgacttgtatattactcataactcttatggtgagaagatggtgtgttcgaaggatccggaatcaagcaaatggtgaatggttattgacaccagttatgtctgaagactaagacgcatcttttattttcatcagttattaatagttacagctgttgtaatattacttgggttgtttttaaggttccggttgatgtaaagagtactatgtttctccaaaatggttctccattattggaagatgcttttaatgtcatatataaaaatggttttgcgtgaaaaagaaagaaaaaaacatattagaaactgttttcttctccctctccttttgacgacaaagaagcgactttacaaaactttttctctttggtttcacagtcgtcgacatttttcgatggattctttatatttcttagttaattttttccttctgtttctaataattatgatgggaagaatcctctctaaccaaattttgtctagatctatttttcattttggatggtgatggcttttgtggtcatgtttacaacagagtcaaataattgcaaaattcaagtgaagccattactagaattcaaataagaggattccagcccaccaatatctttcgtcacatatcatgtcaattcgattgaatcgtgagttattgtcaattataatatttgtttatggtgatctttttcatcagcgtcatctccggttctcgaccgataaatctactcctgatcaatgcatggtttgcagaaatcatttgggtatttgattcggggatcaatagacaaatatttttgatcgaaggaattggcctctatgatgacttcttttttctaaggatacgatcgaataatggtgacattctttttgtgccacatttgaaatgaataagttttatggaaaagaaaatcatggttactaatctacgacgatggatatggcgttacaaaagacatgatcgaggaccatttcaaacaacatataagtgtgtttgtttaatcaatgtgatacaaaaaacatttgggaatttcatctataagatgttagcatttcacgaatatataaagagaaaattttacagatttcatatgttgcgtgtaaaacttttttttgggaaacaggattactttaatttttgaaataattactaggatagaacacaattgtatgtttattcctaaaatataacacatcttttttttattactcacatgttttcaatacttgtgtaattacagttaacacccttgattagttttaattaaatattattattaaatttgtttttaattaaaaataaattaaaaacaatgattatccatgtcaccaatccatgtcatttaccctgatccacgtcatccgaaaccaaaaattctcctaaaacttccagtttctcattttttcagcatgtttcactgttcatccgcgcaaaaaaaaaaaaaaaaaaaacgtcgcactcttctatcgttcagtcgacggaaccctaattttgtcgccgttctctacttatctcgtctctttcggccgaaactccttcggtggtgtcgaatttcaaatcatcaaaaatcaaaactcaaatcaaagagatctatggtattttatatgattcgttacaggtttgagttgaatcaggaataactactcttttactttgattttatatgtttctcgtttagttttcctctcaatcgatctatatatttagagatatttttacttctatcaatgttttgattcatacggtttcgtcttccttctatgtatccctcaaacatattcttacatttcttaatttgattgttgttatttggccaataaatttcatattgtcttccccagaaaaatgttgatttcggatctgtattataaatcagccgtaaagtgatgtaactcagccgtaacgtgatgtaactcagacgtaacatataatttacacaacctttcgtcttccctgaatgataactcagccgtgacatgtaatttaccgaacctttcgtcttctctaaagcatataactcagtcgtaacatataatttacactcatctttcgtttccccttgaacatataactcacccgtgacatgtaaatttatagatgtcttcccttaaacaaataactcagccgtaatgtaattttaccgaacctttcgtattccctggaacatataactcagtcgtgacatgtaaattgactgaacgtttcgttctcttttaagcatataactaagctgtaatgtaattttatcgaacctttcgtctttcctggaacatataactcagccgtgacatgtaaattgactgaacctttcatcttcccttaagcatataactcagtcgtgacatgtaaatttgtcgcgaaacaataagagatgcaacatttcgtctaactttatcatcgagcgacaacttcacaagtttgtcgtgcgttgtttccgcatctatctgcacaagtctacaccctctttcctcagtgttaaatatgtttttgtgtttctatacccaattcccggaaacaacaattacggaaccggatcaaccatatcaggagaaggatgaaagaaattgaaaaaaataaggaaaacgatgaggaattagaagttccggtgatgtaaaaaactcaggtgaagaagacgagttgaaaaattttggccctatttttttgtcctttgatgatgctctcatggaatgatgacatggaatattacatccgacgtcgttttgaattgatgaggtgacaagtaagccaccaaacgaacatttgataactcagccatcaagcaaatctataagtcagtcgcaacatgaatactattacagtaattaaaaaaggtaagtcagccgtgtaatgtcgtaactcaactaactcagccgtaactgcatgctattatagtaattaatcttttgcacataagtcagccgtaacaaggctgagttatttagtaatcgagctctttacaactgatttataacactcgatcataactcaactgtcacatcatcccataactaagccgtccaaaaatataactcaaccgtgtcgaggtaataagtcagccgttttctcataactcggccataacgttatctgggttatgctataaattcttataactcggacaacattccttaactcagccatacagttacctgagttatcgtataactcaggcaacattttttataaaccagccgtaacgtccggctgagttatactcatactttgccgttttgttattactcatatatttttgtcgtaagtcagccgcaacataccgtaactcagccgtaactgccgctgtatcgtgttacggctgagttcatttaatccacgtcagcaatttctgacgtggcagtggcattccttgtaattacgtttttttcgtaatgtttagtaggagcacgctgggtattaaaaaaaagacgacaatatgacagtaataaaacaaagttctgtctgttattgtaataacacctaatttgtattctatcacagtaaatctctcttcattttttcgtgaaaattgttttcaattttctttatttagtttaatggttgtatttaaatggttttatgaatcatgtatcatataacacttttataatataatattattgatttggtgtttaaaaaaaaaaatggttgcccatttaagctgcccatcgttcttgattaatcatatacagtaaaacctctataaattaataatgttggaactccgaaattttattaatttagagaggtattaatttatcgataaattaatattttaataatttatagagagattttcctaatttggtaactttttaaaagtttctataagatttccttcatatagaaaatatctttctaaaaccagttacaagtaatatataataataatgtatagaaaaaaacaccaaaagttttgatacagtaaaatataaaaactatagtcaaacaaagaacaaatatgaatttaaccaaaaaaatattataaagaatttttttacatataatatatatatatatatatagttgatacatttatataattattaatttatgatattgatgggacaatagatttacatatgactttcaaaaaaattattatcttattaatttatcgatttatgtcattttttacattggtcctaactcgggaccggaagaatttattaatttatagaggttattaatttatagagtattaatttatagatgttatactgtatatgaaagttggccaactttctccatatgattgacacatcatcactttagcatttgccatgtgtctattaaataattaatgtaagctcttcaacttctaatttataggttaatgatatttttattatttaattttatatattatttaattttacatatttaattatactattactaaatttattttaatattacatgattttttaataaaactattttaatagttttctcatacttgaagattttttttgtaatccaaattcaaagtatgagtgtatcatagtcgtgaattacttaatgatttgagtaagtaaaaattatatttaaattaaacaatacaaaaaaattcgaaaaaaccgcggcgtatcgcggatgataaaaaaaagataataaaggtaaataaccacttatagaataaaccagctttcttttttcttctttttgcgaagaataaaccagcttatttaatatttttccatatttttttccttgtcgattttttttatttctttttgccctaaatcgttcgagaaacccaaaatccaatcccttgtctaattcatcgatgcccaaaccaaaattgaaaactttatcctcaagagattaggaaaatctcattcattatgttaaaaatcccttttggggattatatttatcagagaaaaagattcgaattgagtgtcttcatgatttgggcaaagctaatctgatcttgcggagacaacaacaaaaattgtctgttttttttaccaattcgtaacggaaagtgttcaaagttccaatctttggatcctccgagcaaaatctctatcttttcaatggcggatcatcaagaagacgaagatttgaaattggctcttaagatgagtatgcaatacaatcctcctgagccaaaacggagcaaacccattgaagaagaagaaactggatccggatctcaatctggtggtgaatcaccggaggcgaaatctcgtcggttgcagagagagcttatggctgctgctgctgagaagcgtatggttttgtttcctaagagtccttctcctgttaacaaagctagggttttgccaattagtgttgttggtggtgataaggatgaggaagttgtgggatcttgtttggggaaggagttgtctgtggaagagtctgatcagttgttttcgattgtgtttgggaatgaggtttcgaaaagtgttcttgctcaatggactaatcaaggcataaggtatgattcttgaatttggatttgtgttgttctttaaattttgtcattgggtttagtgcattcatatagtagctagggttttgaatttgactgtatatagtttctagagtttaagaagtatatctctttatctaggagagaaggtatggtgttggttgtgaataagtagctgagaattgagaagaaaagatttgtgattgttagttgtggtgatatggttgatgtctagctgtgcgaatgtgtgttggatccgttactgagccgttcaaaccctctaggtagtgatatcgttaatgactagttggcgcggatatgagttggattcgttagaaagccgttaaaaccccgttgggtggtagttaatacagaagctagactaagagtgagggtatcatatggacgtttaaggcattagtttaaattcagctatctgatattggattcttctcaacaccagagcagctagattaagagtgagggtttcttatggccttttgaggcaatagttttatatacgatgtgggattcttctcaacataaaagctagattaagagtgaaagtatcgtatggccttttaagacattagttttattatctgctatccgatatgggatccttctcaacacctaagctagattaagagtgaaagtgtcttatggccttttaaggcattagttttgtatcgcgccctttagatagtgacttacacgttgctgatagtcaactgacttgcattcttgttgggctctccccactgagccttttctcaatctagtcttctctatctttagctcctttccatccccttgttgcttgttgggaatcttttaatttcctgttagttaaatgaattgatagggtaaagagtcaaggaggaaatatttacatacatagaaattgtagaaaaagcatagaaattttccccacacggaaagcttcatgcagttggcaaagcttcctaacaagagatgaacgctcttatccctcggaagctatccgattatcaccctcttgttccctattgataataaacacaaccattatccctaattttttcgaaattatagataccaaatcagtcatatgtcagttaatatccagcaaatatttgctgcagatctatcatatcagattgatcttttctggagaatatgtttccatgaaaggcaattaaattttgatggctatacctgtaaacacgctctaattgcttatgattctttcttccttcagctctaatttcaaaaatcaaatcagatttgcatagtctccgaaaatgtttggttattccagacattttgttttctcgtaggtatattgatataatagtggaccataatctatttgtatcagacatgtcataatgtaacttatttcttcagtgaaatatggttcctcacgctgcgagtttccatgttttttttgttattgtatcgtatttcataattaacttaatgtgcccactatgtaactaatgttttgactccttatttatagatttagccctgatcctgaaactactataggattagtgcagcatgaaggtgggccctgcggtgttttagcagcactacaagtaattctcttaattttcttgttgtgatctgttcccgggaacattcttacagttgatgctgactgttcctttttctgtgtaggcatttgttcttaaataccttctttactttccgggtgacagagtagcttccccctgtatgggtgtctggacattatctaaagatcgtcatgttgtgtctgactccttctcttctgtaactgaagaagcaaaaacaaagtgatttttctcagaatagttaagactatgatttacttccgaaatttagttatcatgcttagtactcagcatatatcgttgtttgtcccgtattttgcagggcccttgtcagaagtatgtgtgagattctatttatgtgtggagacaacaaccgcgctgtaatagcaagtttcactaattttgaggattccagtagtaatcaaaaagatgaggttagttgaacttgagtagttcttcatatctggtgcaagcattggttttgctgcagtaatatatatgtggtgtccttatcagattccttctaatatattgttgcaggcaatggctggtgggctccccattgaatctgcttcagatttgcagaagatcttaaggttcgagacattcacaactcaagccagtgcccaaaataagctagaaggcacaataactgcttttcaaagtcgcatgggtgctttgctgttcctaatttctgctttactctcccgaggactggtatattgacgcaaccttgatccttattactcttttgtttgttaacatgtgtgcaaggaggcaaacctgaatgatagtaggggattgaacgaatttgaatcctttgatttagtcctgtggttgtgtgggatcctttgattagaaaaatgcttagatgtttaggtcgttgactagtttggggccttgagagccttggggtcaatatgctctaggattgattagtaataaagcaagattttgattcctgatcttaacagaatcattgtggtagataattcatttcatttctctaggtcagctcgatggatctctcctttgtttcttatgtgtctattactgcctaaaatagcgttaatggataattttgtgatgaacaggattcagttcaagccgacagggatgatccaaacctccccctagtaactgcaccatttggacatgcctcccaggtaatagaacaaacacatttcagaatctagactggttaattgtttctcctacttctatcctgtgttttgagttctactgatttttctctatgcctctttttttattaggaaattgtaaacctgctgctgtgtggagaagcggttcctaatgtatttgatggacggatggatcttggaggcggcatgtttctgaaaggcatatctaagaatgtagatgtgggcttcctcacgttgctcgagtctctcaacttctgcaaagtcggtcagaatctcaaatgtcccaaatggccaatatgggttattggcagtgagtctcattacaccgtcttgtttgcacttgacccatccgtccaagaagaaaacgaacttgagctgagagagtctcagataagaagagctttcgatgcaagagaccaaagcggaggaggaggtttcataactgtggaggcctttcaccaagttgctcaggaaacaaacatcagactcccaatcaagaagctcgacgacatctgcgccacgggtttcatcgtgtggagcgagttatggcaagttatcttggaactagaccaaaatttgggagggataaaagatgcaacaggactgatgggaaagaaagtgtttgatatctatcacttcaacggaattgccaagtccgatataaacggtggtggtcaagcaatggctgtggaaggtgggatggttcctatgcaaaggccaaggctgacaaaactaaacgtatcggttcctccaaaatggacaccagaagagtacatgacatgtgcactgccgccgagcagctctgagaaagactcagaagtgaatcagccaaaaccggtccaacatgcaccactggtggattgtatcagaactcggtggtcgcgtgccgcttgtagctggtctggagatcctccaagtatagtctgaagaatgttgtattatgagaaagcttgagcgtttattctggctcattggattctaaagaaagaaaacggaaactgctgatctgatttggcggttaacacgcgtctgaactttctttgcgttgtccgtttttttcatgttgtgtattgatgtagaatttttgttatctattattgaacattattgagacaaatgaatatttcaattgttggataaaattgctttcaataacattgatcatattctgatttaagactaaggtcttgaaatggctaagaaactatggtttcatcccaatacttaaacaattacatataaattttactttttgatcatgtatatttacttttgttattatatcgcggtacagcatgcaccacaatagtagatagtattttatgtttggtaaacatcttttaatggatttggttatacgcacttctacaacatatccaccttcttaattttttttataataaaaaaaaagtgtttccaaacaattgctgcttatttccattcaattagatcaaaacactatttttttcatttgctagcaatcaaagtcactatttatagataagggtaggaataatatcaatgtttttaaacatcatccagaaggcaaactggactaccttccggaccatcgagtcgaaccgcaaatcaattgatatttttatattatgtatttatagagattatatagttttataaatgaaaaataaaaatgagtgtgtcatgtttaacaaaaaaattgaaatctaacgagaacagtaatgtaatcaaaaattttaaatccaactaaaagttaaaaatatatattaaaataataaaaaatcaccaatgataaaaataaactaataaagaaaaaagactctccacatctgtttgtttttatcttgatttagactttgtaaattttttttgttttttttgtgctatgagtctaggaagattggttcagattagtgtatttgtatgtttggggttttcccatttggtttgatcattgtctctggaagtctacatatattcgccggcttaagtttctggaaggtttgaataccttgccggctattgtattccgatcttgtatcaccaatataatctatatttctaatgacaaaaagaaaaaagaaattcttaagagactaaatattcataaaagacgagaaaggtatgttggctcgtatgtggccgcttgaaaagaattgaaaaggttttatacataactgatataaaacaaaactttaaatattttcaaaatcaaatagatttcgtaaacaatcatccaacccgtttaatcggttcaccggatcattgatcatggatcaaatagatttttttttttttttttgggatttcccgttttagaattactgaatattagcagtaatcatgagcggttgttaattgaagttcttgtgtctttatattcgattagttacataattccttcaacttttgatccttgtagacacatgttacaatgtacaaaatataatctgttgaagtaaaccgaaacattattcaatgtgagaaccggataagattattagtattatttatttatatatattgtttttttaaaagtaaataagttggtaaatatcgagaatataggttttcagaccaaacacatcactttggtcctacttagtacttacctgcccctctcgacaaaatttcttttgtactttcacatttctctgtaataaactcggtaggtttgcgaaaacctcgccgccgggaaaaaaaaaaatcaatggaaggaggaggaagaggaccaaatcaaacgattctcagtgaaatagaacatatgcctgaagctccacgtcaacgtatctctcatcaccgtcgagctcgctctgaaaccttcttctccggcgaatcaatcgacgatctcctcttattcgatccttccgatatcgatttctcttctctagacttcctcaacgctccaccaccaccacaacaatcacaacaacaaccgcaagcttctcccatgtccgttgattcggaagaaacctcatcgaacggtgttgttcctcctaattctcttcctccaaaacccgaagctagattcggtcgccatgttcgtagcttctcggttgattccgatttcttcgatgatttgggtgttactgaggagaagtttatagctacaagttcaggagagaagaagaaagggaatcatcatcatagcaggagtaattctatggatggagagatgagttcggcgtcgtttaatatcgaatcgattttagcttctgtgagtggtaaagatagtgggaagaagaatatgggtatgggtggtgatagacttgctgagcttgctttgcttgatcctaaaagagctaaaaggtatataatttagtgttgttttttacttaaagcttgtaacttttttgtgatttgattgaggtttgaaatagtgttttgtgatgggtttttgataggattttagcgaatagacaatctgcggcgaggtcgaaagagaggaagattaggtatactggtgagttagagaggaaggttcagacacttcagaatgaagctactacattgtctgctcaagtcactatgttacaggtaatgttttgtattactttgtcattgtgtttatgcaattggtgtgactagtgaaggttggtgagtagattactaaatatctttaaagctttgtgttttacgaagctgatgtgattagtgaagattactctaaggaactatttctgatatcttgatttgagcttggcagcttgtaagcttgtattgttgcttagtgtgtttaagattgcttcttggtgtatagagaggacatgtgtttgctactaggaacaagtatagatgcagtgttataagatatgttattctcatgttaatttagctgattaatcaacatgtgagatatgtcaatagtgtaatgtatacacttgcaagagtgtaagttttgtttccactttagtgataaaagcaacataggagtaagataaaatgattcatgtctcttgcatctctaatctgtgctttttcttatattgtgtagagaggaacatcagagctgaacactgaaaataaacacctcaaaatgcggcttcaagctttagagcaacaagctgaacttagggatggtaaagccattttctttttcattgggtcgttctcaatatgtaaaccaaagtcctcattacgatatatattgttcggtgtaattttcagctttgaatgaagcgctgcgggatgaactgaaccgacttaaggtggtagctggagaaattcctcaggggaatggaaattcttacaaccgtgctcaattctcatctcagcaatcggcaatgaatcagtttgggaacaaaacgaaccaacagatgagtacaaacgggcagccatcgctcccaagctacatggatttcaccaagagaggctgagttcgtgtcacctatatatgtttgctgagttataaatacgttatattcatttcgggctgcaatatttgatgtatgtaaaaagtatgtatgtatccatgtataatggcttttgtgttgttagcgtctatgcagatatgttcatggcgacatcggtctatctttacaagtagtatccattgtaatatactacccaaaaatctttatagtaagcacttttcctaggcattaagcaccgatcatcaaacacgcagctaaatcagcggcttaaggcacatacttgctgttacgataatgctaaaactcggtaaacgattgcgaacgacgaagtgaaggttgatcatgctccagattgagctacaaattgtaaacactgtttgaaaccttaacttgtaaataagagaaactgacaaaattttacgatgattgaaaccaagttcaggaatacagtgatgaggaatttaaactagatgtggcttactagaaaacaacaataccaacaaatgagaaatggtgccgtcacttgtgagctggacagatgcagttgttggttcctacctccgatgcaaggcaaggaggctgagatccatcctcgtaccagatcaatctgtgtttgacaaggtctttcaggaaattatcaagcttctcgattgtaacacttggcataaccaccacatgagctatatcaccttggcaagcaagctgccaccttctaacaaactcttcatctttaggccgttcaaagaccacagtgctgctaagctcattaagcatggcgctaatcccagcttcacgaagtcggtctttgaggtaatgcgcgtttctcaagcatttctgaacttctttctggaatcctttgtaacctttcctgtttaaggtgtaccagaggaacaaaggagcatgcccgttacgacttcccatgattgttgcatcccttgaagcaaggtactcaacgttactggagaggactttgatatgttccattcttgttatctgaacaccacatggcattggacacccgacaaatttgtggcccgatacactcacactccctatcggtttattaaacgtcactttcggtgcctacagaggagataaaacaacaaatctcagagcagaacaaagattatcataacgatttcgcttagactgaagactatacacttacacgtttgacaaaaggcatcataagtccaaacaaagctccatcacaatgaatatagaacctatcatgtgagaaaccacactcttcaagagttttgataacaaggtcaagatcatcaacagctcctttaaccgtcgttcctaaagaaaacaagatttcaaccattagcaccaatcctaacacaacaaacaaagccaaagtactaaaacataaaccaacctatgttaacattaagaatcgccggtttatctttattagccaacaacttcttcctcaaatcatcacaatcaatctcccctgacataagcgtatcaaccttctcacactccattcgatacattcgagcagctttaaacaccgagtaatgcgattcacgcgacgcatacaatatcccatccggaaacatctccctcctacaaacacacatcaaatcaaacaccgttttttttcggtttttcgaatgaatcaaaacaccgatgattttcgaaaaacgtacccgactaaaatgccatgaaggttgccttcagtaccacaattggtaatgtaaccccaataatcatctctctcaatctcccaaagacgagcaaaccaatccaacacaccaacttcaaaaggtcttgagtgtacaccatagttactttcaataaacggatctccaagattattaatcgaaaaatgttgtaactgaccaagcgcaccatagtcgaaatccaagttataaggataacctacaccagattccgattcagattccgattccgattcaaaaaaaaagatcagatcagatcaaattttacctaaatggtttttggttcgttcaaccaaagttttccggtaacgagcaagaacactagccatataagcttctttatctccggtgaattcatcgttaacctccggttccgttacagcgagtgacgttgtgtgtatattcctaccgagaaccatctctctttctcctcctcctcctcctttatcagctccgattccattagttaccggaggaggtaacggttcggtgactacggcggttggatcgaagtcgtcagataagatgtcgagtttttcgattaaggtggccattgaaagagtttgatcagattccaaagatccaaccattgttgttttaaaggaatctgtagatctgagtgattggaggagaagcggtgaaaatggtgggacaaagagagagacacacagaaaacgagagcgacgcttcgtcgttgatttgatttatatagaagaggcaaaatttgattctctttttggtttttgccctttcgtagtcacttgtgtgtgttgttgttgttgttcgtgagatttttatatttttctttttttataataatgttttttaaaggtagtcatgagatttgatttatttctttatgtaaataaattaaaaggttaccaacttgccatgagattcatacatgattatttttttaattaattactaaaactaaatcgagaagagttttttgtttaacaataattaaaactttggtccaaatttcaaaactagtgatttgaaattaatgtacgtttagtttgattagatatgaacgtttaggattttagtttatggtaacaacaaaaaaaaaaaaaaaaaattgaataacgaaaaacattttatatttcttaataaaaattatattaatcgatataattacactatgcaatatttttttatctccaatttgaagagttttatgaatctttgagaaagttttaaacttgaactttagatttcattcatttcccttaaggtttcatgcggcttacattttggtatttatataagagacattataagcttctaaatcataggtaactctccagatttcttcatcctgtagtctctaagtcatcaagggctgagaattgattagcaagctgtatcttctccttacaagctttcgtcacctctgttctgtttcttttgtctttaagcgagagtggagaagaccgttgcacagtgcacgacgatgtttctgttttggccttaagtgttctgtggcccaattcatttgtttctgtcgcaggcccaactgatgaagttgacaaaatgctgtcgttttgaagaggttgtctgatactccccctcaaacgcggtgtgggtggcaaatccacgtcaagtttgaacctgagatcacataaagctttaaatgacaatgacttggtgaacatatcaactatctgttggtgagcaggaatgtgtttgacaaccaaagaccccaaagcaactctttcacgaacatagtggtaatcaaattcaaagtgtttgcttcggacatgaaacacatgatttgctgttaagtagacagaagaaaggttgtcaccataaagctcaggcgtaacggtaagaggtatccctaactctcggagaacatgacaaatccaagtcatttcttgagcagtttctgaaagtgatctgttctctgcttcagtagagctgcgagagacagtcggctgcttcttagaagaccaggaaatgaggttagtgccaaggaacgtacaatagcctcctgtagagcgacaagtttctttacagccacccaatcactgtcagtgtaagcttgaagattgaaatcagactccgtttcaggctccttttcattgtaagcacgaagctgaaagtcagagtttttggagaagtgaattcccatggctagagtacccttgacatatcgaaggatccgtttaagaaggttgtaatctgaaactgtaggttgatgcatctttagacacacatagttgacagagaactgaagatccggtcttatcaaggtcaaatactgcagtttccctacaagacttcgaaaataagtaggactagagaaaagttcttcttgatgaggaaccttgttgagttgaagtggcagaggagtaggcattggggagcagtcctccattgctgcaatagtgagaagatcctcagcatacttttgttgagagaggaacaaaccattttcatggaaatgagcttgtattcccaggaaatagtgcatttgcccgagatctttcatccggaagtgaatgttcaaatcctctagaagtttagccaatgttgcagagctgtttcctgtcaacaccatgtcatcaacatagagaagcaaaagtataagatcattccctttgatatagatgaataaagagagatctttaacactgcaactaaaaccaaactcaagcagatagttgctgaatttatcaaaccaagcacgaggagcctgcttgagaccatataacgctttgtgtagatgacagacatgagtgggtttgttcttgtccacaaagccagcaggttgaagcatgtacacagtctctgtaagatctccatgcagaaacgcatttttaacatccatttgtttcacatcccaacccatgactgtagcaacatgaagcaccattcaaactgttgcagatcttaccacaggactataagtctccaagtaatcgataccctcttcttgatcaaaaccttttgcaaccaaacgagcttttagcttgtctaaggatccatctgcattcagtttggtctggaatacccatttactgccaagtacattcatatctggagtgtaagggactagactccatgtttgtgcctcttgacagttgtcatactcttcatgcattgcagcagtccaccccggatgtttaagagcttctgtaacagtcttaggctctgcattcttgactttatgtgtaagaagtccataccggggattaggcttgatgatgcctttctttgatcttgttaccatcggatgtgtagactgagttgcaggagctgctggcatggtagagctagtttctgactcagaaacaactggtacacttggtgaggatgctgtagagcttgaagcagaagaagtatcagtgtgattcgtcctgttactaagcaaagaagagttgttgcctataggtaagagatcagtgctctccgtacactcagaactcttttcactagcaacagtggacaacactaaagagttcttcactgaagacaatggaggaaaatcagtagcagggaacaaaggtgtggtacttgatcggatttcactgcaaacaaacggagaagcctgtgtgcctgcaacacttaaagaagaaggtctatttgaagagtcatcagatggagctgtttgtttcggcatgaagctttgctgccaagatgaatctttgagaaagctttaaacttgaactttagatttcattcattttctttaaggtttcatgcggcttacattttggtatttatataagagacattataagcttctaaaccctaggtaactctccagatgtcttcatcctgtagtctctaagccatcaagggctgagaattgattagcaagctctatcttctccgttcaagctttcgtcacctctgttctgtttcttttgtccttaagcgagagtgcagaagaccgttgcacagtgcacgacgacgtttctgttttgggcttaagtgttctgtggcccagttcatttgtttctgtcgcaggcccaactgatgaagctgacaaaatgctgtcgttttaaagaggttgtctgatacaattttcgttataaaaaacgtgtgtaaatgtagcatttgatgtgtacaagaattgagtgtgaaaccttttttgccctttcgtagttacttgtgtgtgtcgttgttgttgctcgtgagatttttatatttttctcttataataatgttttttaaaggttatcatttttttaatatacagaaattaaaaaattaccaacttgccatgagattcatacatgattttttttaattaattactaaactaaatcgagaagattattttgtttaacaatgattaaaacttggtccaaatttcaaaactagtgatttctttcggaatatagcatgatgaggaatatagaaactaatgtacgtttagtttgaatatgaacgtttaggatcttagtttatactttaaagtaacaacccaaaaaaaaattaaagaaaaattgtaaaacgaaaacatgttatatttcttaaataaaattatagtaatatatacaaaaatgacaatttggggacttgaagtcgggttagtatggggcagttgttgctggaaaaccatttgagctaactgaattacaatgtttagtagtagcttgtataatatttaaaagagttagtatgggacacttgccccacctgcctccaacgtgggtccgccactggttatgtatgatgactaaattatattctgtttaatgaattattatttagacaatagatttactagagataatgagacacccaagttagatatattttttatgaaaaaaacttagatatatttttctctatatcagaaatcgtttaaaaaataaagcaaaaaactaaatttattttaaccaatcatcattgtttctatttttactttacttgctttataaaaagactaatcatttgtttggttgttttataggtgaataatgttttttgtttacagttgaaacaaatgaaatcgaacactgttctacacattgtggaaaaaaataatttattaactcgttaagaagtcaatggttcaagaagcccatgatgagactatggtccgaatgatacccgcgatttttgttgtatggggaaagcgttatttcagtgcggtacagttcaactgcgatacgtgcaagaggaatataggtagtgattggcgacaacaaaaaaacggtattaaaaaaaaattactttgaaaaccgcattgggtaccaatcagcaataaaactacatagtacatttttccaaaaaaaaataataatataaaaagactgcagatttcaaagataaataatgcaaggaacgcttatcaaaacgcaatagcctctaatatccaacggtttctgaatttccgcaatagacaatatatatatatatttatttttttctagtttcacttgctaagtatatcagtagaatctgttggagaaaacacagatacacaagcaaatcgaaactgtgatacattacttttttaaatctttttttttataaaaccttaaaatgaaaacaaatttttttttaaagaaaaagtttgatatcagaaatctttgaaaatgcaagtcttctgtatcatcgacttcagagtttggtccggtgaaattagaccttcctaaatatttctaaaaggtaattagttgtatgtaacttctttttaatattttgtaatgacacaccactatatttagtgtcttatacatactccaattattctcttttattcataagttcacgagttttattaaaagaacaatttatcaataatttgactaaaacatgcttatacaactaatagattaaaactaaattcttgtaaaatctcataataccaattacataaaaacatttgttatatcttggagtactttatgtcatccataattgaaagtagtaatctaatttaatatttatcaatcaaaaattttaaatgtaaatcttactgtagtaataagttatgtgttgtatttaaatagataaatataattgacatatatagtattttaatatatgtgtatgttgcatagtaagtatttttaatttcattttgaaacgaatttgttattacaaaattatttagtgtcaaagttaaattaattaaaagattgtttttcacattcttatttggtgtcttataaacacaattagtattatctcttatttatatattaatagattaataaaacaattataataggttatgtattttaataggttaagtattttaatttataataggttatgtatataataatttataatagattatgtattttaataatttataaatagataaatataatcattatctacagaaagtttgtaataaaaatatattctaatgatagtttattcaaaatcttaatgttaattattttcataagtttaatttaatattatttacaaaacatttattagtttattcataaaacttttattctaatagatatataacaaatatttatatacttgtttttataatggaaaattatacaaaaccttcattatttggttttgcaactgcaaagtttattttttggtagtgtatagactagcttagtttgtcaaataaaattaatgatctatatcgtactcttatatataaaagtgttgttgtaatatgtataaagttataaaaaaagaagagaaattgttactacaagactaaaaatacgagacatacgtatgtaataatttattttctaattcataaattgttggattttattgaatgtagaatgacgtccaatcgtcgatggaacacaaacccttccagatgaacatattcaactcatcccactgaaatttctactcctcccacagaaacaacaatacgggtaaatttagtaatatatatatatatatatatattaaaaatttacttaaattcgatagaataaataacattgtattcacgaaatttgtagaacaaagacaagtacaaatggacgtacattcatgaaataacattaattcagttgttcgacgaagcaattgccatgaataattatactctcaagaatcctactgctatcggtagagagtatatggttgaaaagttcaatatagcattcaacatgaatataagttatagtttttttcaaaaacaagcttgatgaattcaaaaaaagttacaagagatggaaagcttttacgcacaaaacatgcatcacagttgatcttgatacatctttcataaatgcaactgacgcatgttggactgaacaagagtttgtaagtacatcaaatctttgtattaatcaattatgtttcaaaattttggtatcacgtatctaattgattttaaaattacagggatgcaaattaacaaaaagcttgaacggaaaatcgcctgagttttgagacgtgatgcaacgatgtctcgtattacatgatgttcaatcacaatctcaacattctgctcgtcaaagaagagaacaattgatccacgagcatggagttgatgaagaaggtgaagattactcagacagtgatagtggtaacatgccagaagccgaggttcctgaaacgcaagaagaagaagaagtgtatcgtgttaccattgatgatgatgaagtattccaacattctgctgctagaaggcaacaatgaggtaggccaaattcgcagtcaaccgctagacgtggaagtagtgcacaaagatctggaggaagctcactagtttctataggaagtggttcacgaagaagtcatagacgacaatcctttgaaacaacaatacaagacagcatcactggcttcagagaattccaacgacaaagttttcaacaacttcgtcctggtgcttttgatcaagatgattacgatgaatttaaaaaggcggaagcgatatttatcgcgctaaatcttcctaagcacactagatttcattgggcatgcattaatgcacttaaggagctagtattttggcgtaagtatttgattgatataactgcaagcaccgacgaggataaggtccaactgttagaagctatgactggtgtttcacgtaacaaccaagatgtgccaaaacagttaggttcaagccattcatttgggagtccacattcaggaggtatatcatctggaagtccatcctctgtgggtaattgggaggcaaaattcacccagtttttggggtcccatttatccatagtgggaaacaccaccaaacgttgcacaatggaaaacaccaccaaatgcacagtgggacacgccaccaaatgttccacagtggggatcatcaccaaaggctccacaatggcggcaaacagaaaaattttaacaaggtggttcaagcggaacgactccaacaaatgttcaatatggattttcagttggaagtcaaggagattgtgtaacaactgaaactccaccgatcattcaacaaacatcatcatctggtctcggtttcacaaattattttgaaactggacaaataccacaaacacctagaccaggaggtctttttaatatttggggaactgcgcaaggatccaatgcaagtcatcacaatgatgtaggagatgaagattagtttgtgttatttgtggtttatcaatctcatttatgttttgaaatgatttatgtattttttttagtttaaggttgaattttatttaatttatgtttgtaaaataatctatgtctaatgcaagaaattgtttgtattgaatttcaggcatttcgtatatgtcagttgcgatcacaagaccttacgaagaaagaattgaactgtggaatttggaaaataaacaatttgaagagttagtgattcaaccagcgttgaattattatgaccgatattttcaaagagcaccagtccaaattgatagaggtttgggatggagaaatatatggcgtcgactacagcaagatgctgctgcttgtcttcagttattacggatgtcacttccatgtttcacaacattgtgtaatatgttgcaaacaaattatgatcttcagcctacattgaatataagtattgaagaaagtgttgcgatgtttctacggatatgtgggcacaatgaagtttatagagatgttggtttaagatttggacgaaatcaagaaactgtgcaaagaaaatttagagaagttcttacggcaactgaattattagcatgtgattatattagaactccgacaagacaagaactttatcgaattcctgaaagacttcaggtagaccaaagatattggccatattttagtggattcgttggagctatggatggtactcatgtatgcgtaaaagtaaagcctgacttacagggaatgtattggaatcgacacgataatgcatcattgaacatcatggcaatatgtgatttgaagatgttattcacatatatttggaatggagcaccaggttcatgctacgatacagctgttctgcaaatagcacaacaaagtgattccgagtttcctttgcctccgtcagagaagtattatctggttgattctggctacccaaacaaacaaggacttctagctccttatagatcgtcacgaaatcgagttgtgagatatcatatgtctcaattctattatggtcctcgtcctcgaaacaaacatgaattgttcaaccaatgtcacacatctttacgttctgttatcgagagaacttttagaatttggaaaaacaaaatggaggattctttctgattttctaagatataatgttcatgttaaaaaaagagtggtaatggctacaatgggattacataattttatcagaatttcaaacttctcagatgcagattttgcagatgtaatgacagagacaaatataaacaacagagattttgattatgatttagatgataaagaagcaacagagattacagatggagaacatataacgcagataggagataatgttgcaaatatgttatgggaaaatcaaagtaatagataaaaaaattttttattgatttttacgatgaaattagtcaacgcatgtaacgatacgtatgttacaaaattaaatttatatttttataaatttttgtattagtgttttataaatatctgttattgtttatttattaacacaaaaaattaattaattattaatatatatatatataatctataatccgcaccgcaagtagttttttcaccaatcaaacattattttgtaccgcttattttgtacaaaccgcacttgtcttgcaaatatatttctccctcacgtaccgcagttgaaccgtactgcactgtaataacgcttttcccgcacaacaaaaaccgcggttaccattcggacccatatatgcgggacaagtgcggtttgtacaaaataagcggtacagaaaaatgtttgctgaaagaacttattgagtatatttatgataacattgaaaatgtgattatgaaacaaattatgaaaaaatatttaaccttcgatcgttaaaatttgatgaacaaacccgtaaaagatgaatgaaaaacaattaacagaatatagctaaagtaaatataaagagagaataatacagaaagttttttttttttttcttaccaagtatgagaatccattatataagagagaaaagatgtatatggctacaagaattttttttgtgaaaaagagtgtgagggaaaagagggagagaaatgatgtatatatagaaaaatatatatatatatatatatatatacataatgatttataacattaaaaaaaatcaaaagtacataagtggctattgtccattgcatttttcagttggaccgtagggtaaggacctgacttcattttgaaatgcggtccatgccattttatccctttttttaaatccgcagtttacacttttttttaaataataaaacacagatttctgaaaaggtgttgaacggtgacatatatgcggttttcaataataaaaatatgaaaaacggcaaaacgcttcccccattcacaacctatgactttgaatggtaacaacgttttagagagtgcgggacaagcgggtatagaagcgtggtgcggttttaccagaatgtagttaactaaaacgtagtatgttgaacaagtatggttagtgtggaacaaacagtgcagcataatgtatgaatggtaaaaaacgatatgtggtacaataaaaatatgtgaatggtaaaagccataataatcggtacaaatatattataaatatatatttcgaaaataaaaatagattagtgatattattattatgataaagtaaaagttatggttttgcgtttaattaacgattgttttttatattttattacgaactttaaatataagataatttaaatatttgagtttagaattttattaaaaaaaaaatatttcagaaattaggtgaaacaataattatcaaaacacaagcaaaataatattaacgagtattttgagttttgcacaacatgtctgcaatattgtctcttatttgtttcataagttctccatctgctacatcatttgcttctttgtcatctaactcaggctcccaatctgtattgtttatgaaattgtgtaatctcattgtagtcattaccactctcttttgtatttgaatattatatcttgcgaaatctcaaagaattctccatttcttcaacaaactccaaaagttctcttaatactaaacgtaatgatgcatgacatcgattaaacagttgtttcttatttcttgtaggtagtccggaatagaactgcgacatatgatacctaacacttctacatcttgatgagctgtaaagagccaaaacattttgtctgtttggatagcaagaatcaacgacgtagtacttttctagcggaagcaagggaatatcagaatcacttcattgtgtcattgtaagaacagttgtgtcgtgatatgatcccattgcttcattcaaaatatatgtgaataacatattcaaagatgcattatcgtgtcgattcaaatacatttcttgtaattcaggcttcacttttacacaaacatgagtcccatccatagctccaacaaatccactaaaatatggccaatatctttgatctacttgaagtctttcaggaattcgatgtagatcttgagttattggagttctaatataancncatgnnagtaattcaattgccgtaagaaattccccaaattttctcttccatggtctcctgatttcgtccaaaatgcaaaccaacatctctttatgaacttcgttatgcccacatattcgtaaaaacatagccacacttttctctttgaactttgttgtagaccgtaatttgtttgtagtagaccgcacaatgttgtgaatgctacgagtgacattcgtaataactgaagacaattcataataaccgaaaacaagcagcagcatcttattgtagtcgatggcaaatatttctccattctaatcctccatcggtttgcgctggtactctttggaaatatcgatcatagtaacttaaagttggttggattattaactcctcaaattactcatcaagtttttttttttaaacaaataatttttattcatgttaaatacttggttaaatttctcaaccatgtattctcgaccaagaggcgtaggatctttaaacgtataattattcatggaaattgcatgatcaaacaactaaataaaagttttttcttcttcataagtcaatctatgcttcgatgttctctacaatttttataattttttgtactaattagtttaatatattttcaaaaactatacttaatatgcatatgtaaaaaaaatattttaataaccaaatttacccttgttgtcttttcggtgggaacatttgtgtttttttgcctggaagaatttgtgtcggcctctagacgacatacctacatttaacaacacaatacaatataacattaaactattaaaataatttatcattagattatatatattattggttttttcaatgttaaggtatttattatataaatgtttaagattgctactaccgtatatattatttacttaaattttttgttatatatcttaaaataaaaaatgtaaattggttttaatatttggatatggagagatttttatttttattcttactttaagtaggagtttataataattttatgtaataatacacatatatgtgtattaaaaaaagaaacttacttatgaaaacagatggatcggtgaatgcgtattggatagaaaagttacttgtgcaaatagatagattggttgacacgtacttgatagaggagtgttttttttttgtaagatggtagaggagtatttttaaagtagagaagaatattgtatgatgtattgtgaatagcacatagagaaaaaggtgttatatagtataatttttttagtacttttactttttttttaaaatattgtcaactatctacagtcttaaaacacacctcttccacaacttgtacttttgaagtatggttctacgtgtatcggtgtacaattgtcctgcaaatggtgtgttctttttctctgattttttaattaaaaaaaatagaaaacacatctgtaaatggtgacaaaaaattaaacataccctgcgatttttgaaacgcctcaaacattcagggcctagaacgtaatatccatgcaatttaattaaattcttataagaaatcatactaaaaaaacatgtaaaatagtcgaaatagtacaacctggaaataaatattatgatataatcataaatagaactaaggacatgaaggttagatctgagaatgaacttgaagttgaggataagcttgtatcgaaagatgatttagagccaagaaattcaacaaagcagtaggaggattggttaatcctatttggaaacaatcaaatcacttggaaaattatggagaaggtcttattaaaagtttcatgaacaccacatatttgacaacgaccttgatatcctttaccttgagagccacgattgttggagcgggaatgttgtgtttgattctgctgtcactggttgttgttattaccacgagcagaggagcgattgttacagttgttgttgttattgtaggagactacgttagcggtaaccggagtagaggaacaagggatcatcgcttgaagtttaagctcataattaatgagcttctcgtgtatcatagttaatgaggaacacgtccttcaatttgatcgatgacgcgcttgtagtcatctttgagagaccgcctagtatgtactcgatttgatcttcatgtgggatggcgccataaattagtgccagttgatcaaaactagtagtgaggcctagaacatattcatcaatggaactagatcatttcttccattgtttgatttgttcacggatctgttgcttgtgtccacagctagggttggcataagtgtcaacgattttacgccatatctggacagaggtggtagcttggaacaagagaggttgaaccgcaacagagatagcaccgatgaggctacagtaaatgagtttatcctggcacttccagagtttgtagtccggattgggagaggtaacgccatggacagtgattgtggtggcaggttctttgaccgaaccatctacgtagccgacaaggtcatatgcacccaatagagcatgaacttgaagatgccacaggagaaagtttgttgttgtcagctttgtgacataggacatgttcacattgaggagagaggtggaatcgatgacggcaacaatttctgtggagaaagacatagccggatatgatgacgcttgaagaacaagcttgtagagaaagaaggggatcgagaagaagaagagaggtagaaaagagaggcggcgttttttgtttttaaaaatatttaggtctatatagaatcactgctctgataccatgtaatctgagagtgaattgtcttattatgatgaatgtgttacaacatatatagtacttagtctagggtttacacaactactaatgacaattatatccttaatatatacaacttcttatattccaaacctctttggttttgatagaagcacaagaagatcaacaaataggcatataattcatttgtactcttttttttttcttttctttgattttatcccaatgagttttccaaagaaaagtttaataaagcaaataactcattatgttgattaggctcaagagaaattcgaccattgaagtggaagggtcattttaaacactctactagcctttattacttgattattttcgagatggtcttgtgagtgtctttcaagacttttctcttctttataaacattgcacacaaaaatttcatgtattgagtgatagaatataggaatattctgttacaatcaagtagatactcgtatatattgtttcttgtatcccatattttgttgaacttctatgtaattcctttagctatttaaagtcttgtaaatcaatgaatcccttgagagaattattccactaacatggtattagggcctcatcgcttttgattttttttttcttcgtcttccgcttcatcttctctttcattttctcttcctttctttcttctttcttttttcatcaattaatttcaatagatgcccctgcggcaaatcagacacacgaacgtgcatttggtgttaccaacatcaaatctcacatcccactcatcctcgttctagatgatcataattatgatgtgtggcatgagttgtttcttactcattgcctcacgtttgatgttctggggcatctcgacaacactttgcttccagctgatgctaatgatgtcgcttggtaaaaacgtgactgactggtcaagctttggatctatggcacacttgctccacctctgttccgatcttccttccaaactggtgacgcatcacgttatgtttggatacgagtagagaatcagtttcaaaacaataaagaagtaagagctattcagcttgacaacgagcttcgtacccaggatattggagattgatcgatccaagtttattatcagaagatcaaatcactcgccgatttgcttgccaatgttgatgctccggtcaatgaacgtaacttggtcatgtacttgcttaatggtcttagagaaaagtttgataacataattaatgtaatcaaacacaacgatccttgtccaacttagagaaaagtttgatgctggaactgtaggagagtcgtctcaaaaagccacaccaccttattgcaacccacaacgatcattcttcatcaaccacagctctcaccattgctcttgcaccgccagcgctttgttcatcaaatcaacaccaacagtccaataacaacaagggcaacaaaagcaacaacaaccactacaaaggtggaggtcccaacaacaacaactcacaattccaacccacattctcaaattgtgccacccctccatttttgcaagacccatttccagcttggcccgactactttggaaattggtctccttatcaacaaagctcatttcgaccaccgactccgtcgtcttcaccacatcaacaggttcaacaagcgcatctaatggaaattcaacctagatcacaaatgacggagacactgacggatcctaattgggattcttgggtcttggattccggttcaacggctcatctgtcttcttcgccaggtaatctccactctattcttaatcatagcaacactcaatcagtaatagtgggtaatggttccaatattccagtaaattgtgttggctcttcctctgttaaaagcctttcgagatcacttactctcaaaaacgtccttgtcactcctcaaattgtcaaaaatctcaattctgttagacaattcacaaaagataattggtgtactgttgagtttgacccatttggattttctgtgaaggaccttcaaactcagatgatactgctttgatgtgatagccaaggtgatctttattgtctcccatccttgttcaataaaacatctccaccatcaactgctctcttggcttctactccatctctttggcataaacgcttggctcatacaattaatactattctccgttctgttgtttcaaactctttggttcaatgtaatacagacaaacttccatcttcttgtgaaccttgttatttggtaaaacaaataaagttaccatttccttcttctcaatccaatgttaccaaactgtttgaaattgtgcattcatatatttggaccttgccggtttcaagcataagtgggattaagtattatgtcttattcttagatgaattcactcataatctacgggtttacccaatccgcagaaagagtgacgtttattctaagttccttcacttcaccactttaatcaaaactcaattcgacggtcaaattcaatcttttcaatgtgacaatgactgagaatacaataacaaccaattccatgaattttttgataaaactggaatcaaggttcgtttctcaagcccacatacctcccaaccaaatgggaaattctgaaaggatgattagaactattaacaatgctattcgagctatcctatttcaaactcgtctatctccttgttattgggttgaggcactaaatgttgttgtacatatcctaaacatctttccctccatagctttccaaaatcaaattcctcatagcctcttctttcataaaaatccaacctatgatcaccttcgagtttttgggtgcttatgttttccaagcttgaatcattcaaatctgtcaaaactatcaccgaggataacgccttgtctgttccttgggtatccatctcaacaaaagggtatcgatgccttgatttaaaaacaaacaaaattattatttctaggcacgtttactttgatgaggatacgttccccgcagctaatcaaaatttatctcaagtttcttcgtacacattcctagacacagttgatgatccttctccattgttcaaggaaattctccaatcaccactacctcaaaatcaaccaccaccacctcaaactctctctctgtgccacctccgctacctgtgccaaacacatcaaatgtgccttctattccttgttactcaatgaacacaagatcaaaatccgacatcactaaaccaaaaaagattttgtcacttgtcaccacagccaaagcgcctcttcctaaagctcataatcaagctttattggaccctaattagaatccgacaatgactgatgagtatgatgctatgactaaaactaagagttggaatttggtgccacgacctcctcaggtcaatattgttagatcgatgtggcttttcaggcacaaatatgatgcagatggagtgctttcttgacataaagcaaggctggtagcaaactgtaaatcataggaacacggtgttgattttacagagactttcagtccagtagtgaaaccagcaacaatacgtgatgttcttgacgttggagtagcgttaaacttgcccatacaacaactggatgtcaagaatgctttactacaaggtgatctcaatgaaacagtttatatgcatcagcctccaaggttcgtgaacaaggaatttcctaaccaccaaccatgtctgcaaacaagaaaaagccatttatggactcaagcaggccccacgggcatggaattcatggttcaccaaatttttaatgtagcttggtttcatcatgagcaaggcaaacaactctctgttcgtcttcaaacagggcattcaaatggcatatgttctgttttacgttgacgatataatgttgaaagcctcctcaccaagtctcattcagaaaatccttacacaactcaaaggcgagttcccaatgacagacatgggacccttgtgactttatacatacatgcagagttcattgtggattatgttcctttgacaatttctttccggtcactcaagattttgagcctttatcttgtgaaattctcaagcggtgaaatccttgatagctttctctcaggctaccctctcctggaagatctcttagtggttcgaggcagcaatgacaacgtgaaaactttcaatatcgcagttccttcattgcggattttaagcatcatagacttgaactatggttcacatggtctacgagatgatgttgggtttgttatcaaagctccttctatgaactcgttaacgattactacacatttttttggtattcattagtgaaaatgccttacctcttgaaggccgatatcaagcttagacttggtgactctaagaagtttgagggatgtcttatctcagccaaacatgtttccttgtgtttacaacaaccaatggtaatattatgtgcttttgctttcgcgtttgtgataatatattctctttatgattacaaaatagttcgattcacttatgatgtctcttgcaggattcatgtccaataggcgtcttcaatcagctagtgtttctaagtctttgtacatgctctttatactggtgtcgtcttgtactcaaccatacacctaagctccaagttctcagattcgaactaaaacaagcaagatcgcgtgctacgctaacacctcaacagatatgttgcagcaattatgttgatgtccaaactcaatgggagcagcagagtactgttccttaatgtttgatttcgactcttaaagctattgagtggattggttataaaggaattcaagtagagaaaaatgtggtgatgtatttattagagaactctccacagctaaagacaatggccattagatccttgaaatggagcaatgatagtgagaaactcaagatgatgcaagagctgtcgtctatgcagaggacttcaaccaaatatcggctttcgtttacctaaagttctccggcgaatcatatattgaaacagtcgatcgtttacatttttggagcatcattattagttatgtttgtttgataactttacaagttttcaaaaactttgaaaggaatggcttcttataatcaagacactttttctctcttttgtgtgtgtctaaagttattggtgtcattttgtaatcataagaactttaatttttagaatttcacccaaacgaaaatagtgttccactgtataaactttcaataaaatttgatcaccaatcgtgtcagatagtaaaggaaaactcagctcgtgagtcttgttagagtgtagatcagtgtctgatacagagccaattatactctggcttaggcttatctagctttctctcaactttaggaaaatgccaaatatattgtctacagatctaaaaaagaatcgacttagctttaaattaagtaaacatgaattatgtgtttaatatattaaatagatcttccaaaaaaaaattatgtttcaaaaaaaaagaacgaaaaaccagtagtaattgggtgttgttgtactcccaattaccaacggcgtcgtatgatcaagacgttatttttcctttttgttttcgtttttgtttttcttcgtttcttttttgcttctgattaggatttagggtttcccttctgattagaatgtagggttgctctttgactaaaaaaagacgacgaagttagaggttaaacctttctcgttgatttccaatttttctttagtatatatatatatatatatatatatatatatatatatatatatattctcctaagagtcgaggatggtttgattttgccttcttgcttggaaaattgatacggaagatgcttttaaccctttttagttttactcttttatcggcaacaaaatccactaaggcaaacttttgggatattgaagggttcgtttacaatggatatgatcagtttgttgctagatgatgtagtctttaagatattgtcattggttccaaccaaagatgtttttttttttttttcataaatttccattaaaaagaaggattacatggccaaaaagccttacatcaggcttgtaggcccccgaaaggcacgcaagcccaacaactaaaacaaaagcaaagaaactagaacatgcccaaaagcccagcagaaaccaaggagaagaaaaacaggccaaacagggaacggcccaagaaacaaccaaggaaggaaacctacaacacaaaaaaccacagaaaacgtcctaggattggaatagagagaaccaagtcctcagaacagaaggcgcagaaggatgaagttctgtaatgcgagagataggatccaatcgagcacgaatagtaagctggatgtccttcaggaccgaatcaaagacgcgagcgactccggtgtgaagacacagattcctttcacgccaaatagcataaacataagcctgaaaagctagcctgataatgagagtagtgttcttatccctcgagggattgagaagccagattagacaatacatgagctgcgcaggaggaaatagattagccctacccgtgaagaaccgccacacggctccacagaaaggacactcaaagaagagatgagctctggactcatcatgagagttacaaaggagacaaactgcaggaatcgagagcccccagctccgtaatcgatcccgagtgtgcagtctattccaagccacgacccaacaaatgaaagcatgttttggaacatgattcttaaaccagaccgccttataccaagggacaatgtgattctgcgggtggagagcaagcgaagtcttcgctgtagagaaaatgttcgaaggagcatgaaggtccgttttccagataaatgagtcgtcatgctgacaatcaatcaatccctccgcgactggaagaagattttgaagctgattgatgatcgggcttctactgcgactagattcgatccatcaggacctgttccttaacgcatctctaaccacagcatcaataggcagacccaccgtttgcggccctaacggaccaactaaatcaataagaggaccgtgtccagtccaattgtcatgccaaaacttcgcagtgaccccagacccaacatcacaaacaacaaaaggcctagccacttctctgagcttacacaacctcctccaaatccagctgtctgaagttgtagagttaagagtccaaaaattcctctgaccaagaaaattttcgactagctccgaagccaaaaggacgttttcacataagaggcgacccttaatgaaacccacctgattcccttgcaccacatcagggataaacatcttgagtctcttagaaatgaggcgagtaattgatacaagtgttttcagtgtgtcaattccctaaatgcatcttatgtcattgcagcatttaaggtgtcaatccaaatgggtgtaattgctatcaatcaggatatgatcagagaatactaagtcaagccaagtgtgaataggtttggtgtgtttctactaaacctaagcaacaagttaacatgcaaatcaaattcaggaataaaactatactaagcagaagataaaggactcaaatgacaagaacagaaagtaaaccaagcactaggtaaagcactcggtcgagcaaacgagtaagaaggtcgagtacaatactaaaaacaccaattttgcacgaaacgaacagagtactaaaaacacgagttttgcacgaataaactaaacaaagctcttaagaatggggtaattggtcttagtggactcctcaatccattaggtaactaacaaactcaatcaagttatccctagacaatagattcaaaaccaaatcaagccacttccgtgtgaatgattctcataactttagaacttcctaatctcaatttccattgatgaaacataataaagcaggctttaaacaccaatctattaaagtcaataagcagtctaaacatccaatgccttgggctagaatctacaaatctctgaaattagttggttcagacatttcatcaaacaccttttggatggagaaagtctgaaatcaattttcaattgatcagaaagaaaatagcattaagaactcctaaaacagaagggaatcatgcatataatcacttagctagctaaagaagagaggaatccacctaaacctaacccatcctcaagaactttgaagaacactactcaagaacactgaagaacatcatagaacaaaacccagaaaattcataaaacccagaaatcattataaacttagcaaaagatagatctcaatgagataaacaagtttgcagaagaaatcaaatccaaattctcaacacaacaaccagaaaatgcaaaagaaaatcaaagaaccctaatatccagcggacaaagctcagatattttgggcaaaaacataagaggtctatttataggcaatcctaggttgccctaattgggaataagacaaaatagataagtcggcgcaggagcgttcggccctaggccgagtagaaaagccgagtggcttggtcttggtcatacagctcggccctaggccgagtggcttggtcgagtggcttctcttcatccttaagtgcacaactcggcctccagccgagtgccttggtcgagtaggctccttgttcttcacgtgtgctccactcggcctccaaccgagtacataggccgagtatacttcaaatccttccttaggtcccccgaactcgagtctgtccatcccttgtgctagaaacctccaagttgagtccaaaagtacctaattcatctgcaaaacactccaaatgcaagtatgctatgcaatgcaatgcaaaatgtgcaaaagaaggaaaagagactaagaatgcataaaaagagacttgaaactaaactaaatgcatgaaaaacaagggcttaaaaaggttaaaatctagtgttatcaacacccccaaacttagctctttgcttgtcctcaagcaacaatagaactaggctaggagtgaggtttgaaggtggggattcagaaccaaaatatgcatgtaaaatagatagtctcaatgtccatgttgctagttctagagtgctaggttgaatgatctctacttaaaaactttagccatcttcttcacaacacaacctaatctttcacttagtctattcaagcattcaaatcagcatattccctttaacattcattaagcaagaaccatggatcatactatacaatgcatactaaactcatttggctaagggcaaagggtcaagagacaaaaatggtctcttaaagaataggctttagtaacaaggaatctctcaagaatgattaagctttagtagaatgctaaaggtaagtcccaagttatgcatacaaagataagatctcatctacccaaagtataatcaatgaagacctaatggcaatcccctctcccatcctaattaagaacttgactctacccttttgcattcataatcttttgaactctttcttaacccattcttttctttttttcttaactctaggagaagcttttcttttctctttgatacttctagcgggtttggctttctttagtactaaggttctgtttttgatctctattaagcttagggctttttacccttctttattagctaacaataacccaatctctttctttaacaatctcaaaccctttactagactttttctaacttctttagcttacttctcctagaattcttttcccttttcttgtaaacaatgaactcaaccctttttctattttaaactcttcacaacccatagaacaagtacccacctagtcctatctagtccggataacgcgaactagaactacatgagatactatctttgtcgttacaaacctaacactttctaccaagcttaatcgaaaatagacctcacaaacactcacaagtgatatatggcttgaaagaaggcttaggttagggtatggggaaactgctctaaaggtgagagacagctatttggatcaacaagagtggtgaaacgaataagaagatccaaatattttaagggtgaccatgagtttaacaaacaatgcatagtatgataattaaaagtcaaattatggttcaaattaatagggaatagcttcaaatcacagcaagtttcgactaaggaaagatcaaatatatgaattcaaaagatggtgcggttttacttcaagatcaatcggttaagcactagacaactaacaacaagggcattgaaactatctagtgaacattgcaaatttacaaggctatgatcatcattattccctatgcaagtgcaaaatgcaacaacctatatgataacattctaaaaacagtcctattaatgcaaatgcaaactatatgacactctatttttttggaatcattttcgaaaattttcaaatttttatgggttttctatgccttagatgatgcaaaatttgaataagaaaacatgaaacaatgttagatacatcttgaaccctccccctaacttaaattacacagtcccttgtgtaataaaaattcaaagaagaattcaagagaaataaccacacaaagcaagaaataaaagaaatgcaatgatatatacagtgaaatggagtgatacctcaacatttaaacgaagaggttctggacaaactcgtccaggcggtcttgtgtgtactcaggatcacgtgtggaggtgttggggttgttggggttgtactcggttgacccgtcgggcatgtagcccgggtagtactcctctcggcttgggttagcgttcagaaccaactggttcactggaccgggaaggcggctgttgaaacggcgatctgagaaggtggagctcctcccgagctcgtagtttgaggctcttggcgggtcgaaacgagcgtcccttcgcggtgccacactcgttgagttacttctcctgaactcgggtcgaggtggtggtgatctctgtcttcgttgcagctcctgaatctgaaccgtcatgccgtccattgctctcttcatctttctcaccttcttcttcaacccactgaacaacttcctctgaaacttgcccaaacctttgagcattcccaacttcttgtgaacttgaccgggatctctctcttgatcggactcagcataatcctcaaagaaaaactgctctgctgcagcttcgcacgaatcttcttgttcatcaaactgttcagcttgactgaactcagcttgttcaaactcggcctggccatactcggcctggccatactcggcctgctgaaagttactcggccgagtataggcttcctgccagcttcttcttcattccactctgctccttcttcttgagactcactccctatgctcggctctgcttgtaggggcgcaaggacattgactaagatcgattgaggaggattaaagtcaatgttgttcccaatcctaatggtggtgaacttcttgcaagggagtgctagcctagagagccctagcgtggagtgcttgaacttgaaatagagttgatccgcttgagcagacctatccaagtagcacttcctcttcaaatactccatatcgatgtaggttgctgtgtgagttggggtatgaagaggaactccaacggctattaggatgggcgtgatcactcctccagcacataagcttcctccatagtcggattggtggattccggctgcatactccctaaaaccaatcaagtgatcaatcaacaccaccgaaagggatgtatcagccctatccccttccatctctatcccattccttgtgcgccccaaaatgaagcataaggtgagatcaagcaacttcagctctccctcattaacatggccggttgtcttcttcgggaagaaagcacttgcaatgcaaaggtggagatacctaagcaccgggctccttatcaacgaactcttggccctagatgacttgtaggggagtggaccggcgattgtcaaccatagatcaaggagctcgtccttgctaaagttttggcggattccatacttggtggggaacttgaaaacaacatccaactgcctaatgggaaccgagtattgaattccaaacaccatgaatgtgatatagccaactcccttatgcagctctctctccctttcttcagcatagaaatgaagcttcaaagtggctaggaattggcagctctcagttttgtacccttcacacttgtaggagaaaaaggtctccagcttggccatctccatgaggttgtcaacatccctacatatccccaaagcttgcatggtagatctatggagatatcttgtcccctcaaaactcagctccatgagatattggtagtgctcttcaatggtaggttctttctttctcctcatggtgttccttcttctccttgtaggaactatcgggacctcttcatcaacttgcgcatcttcctcagatgcttccttctctatctcaggcacttcttcttctgcaactggctcggactccaagaccctcttgcctcttgctattttctcttgagcagccgcagaaagacccatagaggactccggggccatactcggccattgtactcggcctgtcatccgagtaaaaccaggactcgcagcttcctgattctttgactgattcttctcattaatcatctcataccctcttgccacggctcgagcagaggctctccttcttgattcctcgggattcatgatcttgggatgatttactgcaggtagtcaccacaaaataaccaaaggtaggtcaaagtagaagagaaattgatgtttaagaatgaacaaaggttgcaagagaggttttgaaaaggtttgtaacaagagattttggtaaaatttctgagaaatctagagaagtgggagtaagaacttgaaatgtttggagagaaggagtaaaattcgaaatttttgagcaaagagagagtgtgagtgacttagcttgttgagtgtggttttatagacaagaagatttgatcctagccctccaaacaccttagatccgcacccttcatttggtcaaggggacatgtctcactatttgcagaagaatctttgaagggctttggggagcaggatttgattggtggggccgagcaaattcgaattcaaatttgaatttgaattgtgttaacctcgcacgtgtgaactcggccgacatactcgacgcgcgtgtcgagtacagtgttgggcctgatgggcttctttttctgactcggcttcgggccgagtgctgcatcttgttgggcctttgaacagtgaggcccatactcgaccttgggccgagtggtgtggtccgagtactattcaatcttgggcctttggtcgattgaagcccacactcggcctacagccgagtagtacggtcgagtgtgacctgaaattctccagaagtctttttccctgaaacacttaaacaaaaacatcaaaaataacaagaaagcaatatatacaaggatagacatgggatttcctcccaagtgagcttgtttaaagtccttaagcttgactctcacaatgtttaggtagagaagagattgaggagaggaactgagaagtcctcatcctcacttgctgaatcctcaaagtctgaatcatactccgcattttctcttgatagctggagtgtggagtactcatttgatctttcctcaaagtaagcctccttctcatcagtactatagtcctcttttccaagatcggggttcctcaaagtattcatcaatctcaggacctgggtaacctttaatcatctccttaagctccaggatagcgtagttcagctcctccatcttgaggtccaacttttccatggtctctccttgagctccatactgtttcctgagctccataagctctctagcaataggaccaacatcaaaatggttccccttagtctcaacctctaagctaggtcctccttctatcataagaagctcctcgggctctcctaggtggtgagtcggaatggagtacggaataggattttctaacccactcaacaactcagcatctaaatttccttcttcaatgaagaaaagctgcccttctatagtgggcttcttcatcttcttagcaatgtcaaagctcatatggagattcttaccaaggttcaagtcgatcttacccatttgcacatcgataagagcgcccgcagttgctaaaaatggtctcccaagaatgagagggtctttcggttcctcatccatctctagaaccacaaagtcggttggaatctcaatcgatccgatctttaccggtaagtcttctagcatcccatgaggcactctcactgatctatcagctagaataagatgaatgctgctaggcttgaacttattaaatcacaatctctttgcaacagacaaaggcatcaaactaactgaagctcccaaatcacaaagactattgttgaacactaagggtcctagtgaacaaggtagagtaaaggaacctggatcacctagcttctttggtatcaccttcctttgaatgatagcgctgcactcaaaactcaattcaactatttgctgagcttcttggggtctttccatgattacttccttgggagtatcaaccaaaggtatcttctcttctaactctttgatacactttatgaacatcatcttgtgtttctggaagatccttgcattaacttgtgcaatcctttctggaaagtatggtttaggttcataggcaggtggaatacggattgggttgctcgggtcatatgctcgttcgacaagccaagcaaagaagtcgagttcaatctcctgtcttgatcttggtctcaaaacctccccttcttgaatcccactgtccgcagtggcagaagtactcactgtggtgatagcatgggcatactcctttggattttgaacagagtttctaggaagttgtccagggtgcttaggagctgaagtagaagcaatgtgtccttccatggtcttgactctagtgttaagtgcgtctatctttatattcaggtcattataagagcaatcaatcctggtggtgagctcagctagcttcttatccatggtcatggagcatgaggcctgtccttgcacaagctgatgaagtagagtcttcatctctgagtcttgtgctgaagtttgctgtggctgctgggtgaagcctggaggtccaaagttctgcttttggttgtagccttggttatagggtataaagggcttagcttgaggtggttggttctgtggggggtacacttgatcttgtgggtttgccacattgttgcttctgtaagagagattagggtgagggggtttgtagttgttgaatcccttgttgtagccaccttgattttgtaggtagctcacctcctcaatagtaagattctccccttcttggagttgtgtaagctcttcttctgtaatgtagtggacatttctctgttgagcaagcaccaatttgtcaatcttatcattaagagctttgttctccttttgtgcctatcctcagaatcgctactgcctctgttagtgcgatcgtagttctcattgtaattcccatcagattgtgctaggttttcaacaagttcccaaccttcagctacatctttgttgagaaagttaccattggaagttgtgtccaagagcatccggatctttggtaaggcacctcggtatagagtactgagtagggaagccttcttgaatccgtggtgcgggcactgagtgctatatcctttaaaacgctcccatgcctcagcgaatgattccgaattcttctgattgaatcccgagatctcattcctcaatctagccgttcttgagttagagaagaacttggctaggaaagccttcttgcagtcatccaaagtgtctacagaatcaacgggcaaagtcttttcccaaagatgagctttatctcctagtgagaaagggaataacctgagcttgaagctgtcttcactaactccattgatcttggtgagactacagagtctatcaaagttatcaagatggtccaatgggtcctccattggcagtccatgaaacttgttgctttgaatcatggagataagaccactcttgatctcaaagttgttgttctgaataggaggtgggacaataccagctctctgatggtggtttctaggtgcatcaccagcaccaatgttgcctggcaactcattagcattcacctcattagccatcactactgggtttgaagtggcttgttgttccctgagttcacgctgaatcctgtcgatgtcgtctctgtatagcaggagattaccagaaccttgagaacgagtttgcatacgttttgatcttactcggttgatgtactcgacgtgctagtcgagtaggagtacctgcaagacaaaaacaagcaaatgaagaaacaagtgagtaaccagaaagaaagaaatagaacttgatcttaataactcagaaatcctaaatgtaacaagaaaaacacccaaatggcaacggcgccaaattgatacaagtgttttcggtgtgtcaattccctaagtgcatcttatgtcattgcagcatttaagttgtcaatctaaatgggtgtaattgctatcaatcaggatatgatcagagaatactaagtcaagccaagtgtgaataggtttggtgtgtttctacaaaaacctaagcaacaagttaacatgcaaatcaaattcaggaataaaactatactaagcagaagataaaggactcaaatgacaagaacagaaagtaaaccaagcactaggtaaagcactcagtcgagcaaacgagtaagaaggtcgagtccaatactaaaaacaccaattttgcacgaaacgaacagagtactaaaaacacgagttttgcacgaataaactaaacagagctcttaagaatggggtaattggtcttagtggactcctcaatccattagctaactaacaaactcaatcaagctatccctagacaatagattcaaaaccaaatcaagccacttccgtgtgaatgattctcataactttagaacttcttaatctcaatttccattgatgaaacataataaagcaggttttaaacaccaatctattgaagtcaataagcagtctaaacatccaatgccttgggctagaatctacaaatctctaaaattagttggttcagacattttatcaaacaccttttggatggagaaagtctgaaatcaattttcaattgatcagaaagaaaatagcattaagaactcctaaaacagaagggaatcatgcatataatcacttagctagctaaagaagagaggaatccacctaaacctaacccatcctcaagaactctgaagaacactactcaagaacactgaagaacatcatagaacaaaacccagaaaattcataaaacccagaaatcattataaacttagcaaaagatagatctcaattagataaacaagtttgcagaagaaatcaaatccaaattctcaacacaacaaccagaaaatgcaaaagaaaatcaaagaaccctaatatccagcggacaaagctcagatattttgggcaaaaacataagaggtctatttataggcaatcctaggtttccctaattgggaataagacaaaatagataagtcggcgcaggagcgctcggccctaggccgagtagaaaagccgagtggcttggtcttggtcacacagctcggccataggccgagtggcttggtcgagtggcttctcttcatccttaagtgcacaactcggcctccagccgagtgccttggtcgagtaggctccttgttcttcacgtgtgctccactcggcctccaaccgagtacataggccgagtatacttcaaatccttccttaggtcccccgaactcgagtctgtccatcccttgtgctagaaacctccaagttgagtccaaaagtacctaattcatctgcaaaacactccaaatgcaagtatgctatgcaatgcaatgcaaaatgtgcaaaagaaggaaaagagactaagaatgcataaaaagagacttgaaactaaactaaatgcataaaaaacaagggcttaaaaaggttaaaatctagtgttatcaacacccctaaacttagctctttgcttatcctcaagcaacaatagaactaggttaggagtgaggtttgaaggtggggattcagaaccaaaatatgcatgtaaaatagatagtctcaatgtccatgttgctagttctagagtgctaggttgaatgatctctacttaaaaactttagccatcttcttcacaacacaacctaatcttccacttagtctattcaagcattcaaatcagcatattccctttaacattcattaagcaagaaccatggatcatactatacaatgcatattaaactcatttggctaagggcaaagggtcaagagacaaaaatggtcccttaaagaataggctttagtaacaagggatctctcaagaatgattaagctttagtagaatgctaaagataagtgccaagttatgcatacaaagttcaacagcaaaagaaggatagcttgatcctcagccaggataagatctcatctacccaaagtataatcaatgaagacctaatggcaatcccatctcccatcctaattaagaacttgactctacccttttgcattcataatcttttgaactctttcttaactcattcttttctttttctcttaactctaggagaagcttttcttttctctttgatacttctagcgggtttggctttctttagtactaaggttctgtttttgatctctattaagcttagggctttttacccttctttattagctaacaataacccaatctctttctttaacaatctcaaaccctttactagactttttctaacttctttagcttacttctcctagaattcttttcccttttcttgtaaacaatgaactcaaccctttttctcttttaaactcttcccaacccatagaacaagtacccacctaatcctatctagtccggataacgcgaactagaactacatgagatactatctttgtcgttacaaacctaacactttctaccaagcttaatcgaaaatagacctcacaaacactcacaagtgatatatgacttgaaagaaggcttaggttagggtatggggaaactgctctaaaggtgagagacagctatttggatcaacaagagtggtgaaacgaataagaagatccaaatattttaagggtgaccatgagtttaacaaacaatgcatagtatgataattaaaagtcaaattatggttcaaattaatagggaatagcttcaaatcacagcaagtttcgactaaggaaagatcaaatatatgaattcaaaagatggtgcggttttacttcaagatcaatcggttaagcactagacaactaacaacaagggcattgaaactatctagtgaacattgcaaatttacaaggctatgatcatcattatcccctatgcaagtgcaaaatgcaacaacctatatgataacattctaaaaacagccctattaatgcaaatgcaaactatatgacactctatttttttggaatcattttcaaaaaatttcaaatttttacgggttttctatgccttagatgatgcaaaaatttgaataagaaaacatgaaacaatgttagatacatcttgaaccctcccccaaacttaaattacacagtcccttgtgtaataaaaattcaaagaagaattcaagagaaataaccacacaaagcaagaaataaaagaaatgaaatgatatatacagtgaaatggagtgatacctcaacatttaaacgaagaggttctggacaaactcgtccaggaagtcttgtgtgtactcaggatcacgtgtggaggtgttggggttgttggggttgtactcggttgacccgtcgagcatgtagcccgagtagtactcctctcggcttgggtcagcgttcagaaccaactggttcactggaccgggtgggcggctgttgaaacggcgatctgagaaggtggagctcctcccgagctcgtagtttgaggctcttggcgggtcgaaacgagcgtcccttcgcggtgccacactcgttgagttacttctcctgaactcgggtcgaggtgttggtgatctctgtcttcgttgcagctcctgaatctgaaccgccatgccgtccattgctctcttcatctttctcaccttcttcttcaacccactgaacaacttcctctgaaacttgcccaaacctttgagcattcccaacttcttgtgaacttgaccgggatctctctcttgatcgaactcagcataatcctcaaagaaaaactgctccgttgcagcgtcgcacgaatcttcttgttcatcaaactgttcagcttaactaaactcaacttgttcaaactcggcctggccatactcggcatgctgaaagttactcggccgagtataggcttcttgctcagcttcttcttcattccactctgctccttcttcttgagactcactccctatgctcggctctgcttgtaggggcgcaaggacattgactaagatcgattgagaaggatcaaagtcaatgttgttcccaatcctaatggtggtgaacttcttgcaagggagtgctagcctagagagccctagcgtggagtgcttgaacttgaaatagagttgatccgctggagcagacctatccaagtagcacttcctcttcaaatactccatatcgatgtaggttgatgtgtgagttggggtatgaagaggaactccaacggctattaggatgggcgtgatcactcctccagcacataagcttcctccatagccggattggtggattccggctgcatactccctaaaaccaatcaagtgatcaatcaacaccaccgaaagggatgtatcagccctatccccttccatctctatcccattccttgtgcgccccaaaatgaagcataaggtgagatcaagcaacttcagctctccctcattaacatggccggttgtcttcttcgggaagaaagcacttgcaatgcaaaggtggagatacctaagcactgggctccttatcaacgaactcttggccctagatgacttgtaggggagtggaccggcgattgtcaaccatagatcaaggagctcgtccttgctgaagttttggcggattccatacttggtggggaacttgaaaacagcatccaactgcctaatgggaaccgagtattgaattccaaacaccatgaatgtgatatagccaactcccttatgcagctctctctccctttcttcagcatagaaatgaagcttcaaagtggctaggaattggcagctctcagttttgtacccttcacacttgtaggagaaaaaggtctccagcttggccatctccatgaggtagtcaacatctctacatatccccaaagcttgcatggtaggtctatggggatatcttgtcccctcaaaactcagctccatgagatattggtagtgctcttcaatggtaagttctttctttctcctcatggtgttccttcttctccttgtaggaactatcgagacctcttcatcaacttgcgcatcttcctcagatgcttccttctctatctcaggcacttcttcttctgcaactggttcggactcccagaccctcttgcctcttgctatttcctcttgagcagccgcagaacgacccatagaggactccggggccatactcggccattgtactcggcctgtcatccgagtaaaaccaggactcgcagcttcctgattctttgactaattcttctcattaatcatctcaaaccctcttgccacggctcgagcagaggctctccttcttgattcctcgggattcatgatcttgggatgatttactgcaggtagtcaccacaaaataaccaaaggtaggtcaaagtagaagagaaattgatgtttaagaatgaacaaaggttgcaagagaggttttgaaaaggtttgtaacaagagattttggtaaaatttctgagaaatctagagaagtgggagtaagaacttgaaatgtttggagagaaggagtaaaattcgaaatttttgagcaaagagagagtgtgagtgacttagcttgttgagtgtggttttatagataagaagatttgatcctagccctccaaacaccttagatctgcacccttcatttggtcaaggggacatgtctcactatttgcagaagaatctttgaagggctttggggagcaggatttgattggtggggccgagcaaattcgaattcaaatttgaatttgaattgtgttaacctcgcacgtgtgaactcggccgacatactcgacgcgcgtgtcgagtacagtgttgggcctgatgggcttctttttctgactcggcttcgggccgagtgctgcatcttgttgggcctttgaacagtgaggcccatactcgaccttgggccgagtggtgtggtccgagtactattcaatcttgggcctttggtcgattgaagcccacactcggcctacagccgagtagtacggtcgagtgtgacctgaaattctccagaagtctttttccctgaaacacttaaacaaaaacatcaaaaataacaagaaagcaatatatacaaggatagacatgggacttcctcccaagtgagcttgtttaaagtcattaagcttgactctcacaatgtttaggtagagaagagattgaggagaggaactgagaagtcctcatcctcacttgctgaatcctcaaagtctgaatcatactccgcattttctcttgatagctggagtgtggagtactcatttgatctttcctcaaagtaagcctccttctcatcagtactatagtcctcttttccaagatcggggttcctcaaagtattcatcaatctcaggacctgggtaacctttaatcatctccttaagctccaggatagcgtagttcagctcctctatcttgaggtccaacttttccatggtctctccttgagctccatactgtttcctgagctccataagctctctagcaataggaccaacatcaaaatggttccccttagtctcaacctctaagctaggtcctccttctatcataagaagctcctcgggctctcctaggtggtgagtcggaatggagtacggaataggattttctaacccactcaacaactcagcatctaaatttccttcttcaatgaagaaaagctgcccttctatagtgggcttcttcatcttcttagcaatgtcaaagctcatatggagattcttaccaaggttcaagtcgatcttacccatttgcacatcgataagagcgcccgcagttgctaaaaatggtctcccaagaatgagagggtctttcggttcctcatccatctctagaaccataaagtcggttggaatctcaatcgatccgatctttaccggtaagtcttctagcatcccatgaggcactctcactgatctatcagctagaataagatgaatgctgctaggcttgaacttatcaaatcacaatctctttgcaacagacaaaggcatcaaactaactgaagctcccaaatcacaaagactattgttgaacactaagggtcctagtgaacaaggtagagtaaaggaacctggatcacctagcttctttggtatcaccttcctttgaatgatagcgctgcactcaaaactcaattcaataatttgctgagcttcttggggtctttccatgattacttccttgggagtatcaaccaaaggtatcttctcttctaactctttgatacactttatgaacatcatcttgtgtttctggaagatccttgcattaacttgtgcaatcctttctggaaagtatggtttaggttcataggcaggtggaatacggattgggttgctcgggtcatatgctcgttcgacaagcaaagcaaagaagtcgagttcaatctcctgtcttgatcttggtctcaaaacctccccttcttgaatcccactgtccgcagtggcagaagtactcactgtggtgatagcatgggcatactcctttggattttgaacagattttctagaaagttgtccagggtgcttaggagctgaagtagaagcaatgtgtccttccatggtcttgactctagtgttaagtgcgtctatctttatattcaggtcgttataagagcaatcaatcctggtggtgagctcagctagcttcttatccatggttatggagcatgaggcctgtccttgcacaagctgatgaagtagagtcttcatctctgagtcttgtgctgaagtttgctgtggctgctgagtgaagcttggaggtcgaaagttctgcttttggttgtagccttggttatagggtataaagggcttagcttgaggcggttggttctgtggggggtagacttgatcttgtgggtttgccacattgttgcttctgtaagagagattagggtgagggggtttgtagttgttgaatcccttgttgtagccaccttgattctgtaggtagctcacctcctcaacagtaagattctccccttcttggagttgtgtaagctcttcttctgtaatgtagtggacatttctctgttgagcaagcaccaatttgtcaatcttatcattaagagctttgatctccttcttgtgcctatcctcagaatcgctactgcctctgttagtgcgatcgtagtcctcattgtaattcccatcagattgtgctaggttttcaacaagttcccaaccttcagctacatctttgttgagaaagttaccattggaagttgtgtccaagagcatccggatctttggtaaggcacctcggtatagagtactgagtagggaggccttcttgaatccgtggtgcgggcactgagtgctatatcttttaaaacgctcccatgcctcagcgaatgattccgaattcttctgattgaatcccgagatctcattcctcaatctagccgttcttgagttagagaagaacttggctaggaaagccttcttgcagtcatcccaagtgtctacagaatcaacgagcaaagtcttttcccaaagatgagcttcatctcctagtgagaaagggaataacctgagcttgaagctgtcttcactaactccattgatcttggtgagactacagaatctatcaaagttatcaagatggtccaatgggtcctccattggcagtccatgaaacttgttgctttgaatcatggagataagaccactcttgatctcaaagttgttgttctgaataagaggtgggacaataccagctctctgatggtggtttctaggtgcatcaccagcaccaatgttgcctggcaactcattagcattcacctcattagccatcactactgggtttgaagtggcttgttgttccctgagttcacgctgaatcctgtcgatgtcgtctctgtaccgtgtgaatgattctcataactttagaacttcctaatcttaatttccattgatgaaacataataaagcaggctttaaacaccaatctattaaagtcaataagcagtctaaacatccaatgccttgggctagaatctacaaatctctgaaattagttggttcagacatttcatcaaacaccttttggatggagaaagtctgaaatcaatttttaattgatcagaaagaaaatagcattaagaactcctaaaacagaagggaatcatgcatataaacacttacctagctaaagaagagaggaatccacctaaacctaacccatcctcaagaactctaaagaacactactcaagaacactgaagaacatcatagaacaaaacccagaaaattcataaaaccaagaaatcattataaacttagcaaaagatagatctcaatgagataaacaagtttgcagaagaaatcaaatccaaattctcaacacaacaaccagaaaatgcaaaagaaaatcaaagaaccctaatatccagcggacaaagctcggatattttgggcaaaaacataagaggtctatttataggcaatcctaggttgccctaattgggaataagacaaaatagataagtcggcgcaggagcgctcggccctaggccgagtagaaaagccgagtggcttggttttggtcatacagctcggccctaggccgagtagcttggtcgagtggcttctcttcatccttaagtgcacaactcggcctccagccgagtgccttggtcgagtaggctccttgttcttcacgtgtgctccactcggcctccaaccgagtacataggccgagtatacttcaaatccttccttaggtcccccgaactcgagtctgtccatcccttgtgctagaaacctccaagttgagtccaaaagtacctaattcatctgcaaaacactccaaatgcaagtatgctatgcaatgcaatgcaaaatgtgcaaaagaaggaaaagagactaagaatgcataaaaagagacttgaaactaaactaaatgcatgaaaaacaagggcttaaaaaggttaaaatctagtgttatcagtaatgattttatagactacggtgcagcacgaaacaggtctaaacatagagagttgatctactcctgtaactttaggaatgagagtgattgctgtagcgttgaacctcttgaggagatgaccagttctgaaaaattctttaacagcagcaatagtactatccttgaccacaaaccaagattcccaaaagaattccgcagtgaagctgtcaggacccggagccttgttgcgaggcattgcaaagaccgcagcagttatctccttatcagacgggagagcagagagacgagacgccagtgtatcattgcagcgaaaaggatggatatctttgattctctgaaccgaatcgggagtgagaatgtcgctgtcagagcccaaaaggtgggtataataggctacaatcatttctttgacctgagtaacattctccactcttacatcatcatccatgcgaagaaacttgatcagatttttagcctgatttgcaagaatgactttatggaagaaccgtgtattagcgtcgccatcttgcaaccatttaattcttgatttctgtctgtaaaaagactctagagcagcagcaaagaagttccactttttcctggcaacatgctcaactctaaaaagagaatcagaagggttggttaatagctgagactgaatcgattccaaagaatccagagcctctttggttttatgctggatattgccaaacccttgcctgttcaaaagcttacaacacttcttggcagcttttaaatgttcccctaaagaaaacatgtgagaaccaacaggaatctgctcctcccaagcaacagtaagggacaccaaaaaggtaggatgagttgaaaggaaggagaaatatctgaaacatttcttagatctctttgggaggttttccaggataataatacaaggagagtgatctgaaacccctgacagctcaaagacagcaatcgcactaggaaaagaagagaaccaatctccattggcaatagctctatccaacttccttatgatcggattatcatcttgatgatttgaccaagtgtaatggaccccacgactaggaatatccaccaaatcactatctcttaaacagttctgaaactcctctaaacctctcatggggattgaagtttgaaggacagaatagtgatcagaagtagcagctatctggtcaaagtccccaaccaggatctaaggagtgaagcaaagaggagaggacggtgataaagtagagatgtcttcctaaagggttcgtctctaaatctcagtgttcctaccataaacaaacgctaccgcaaaagatgtagcaagacccgacagcttaacactacaaaccatcaattgatccgtcttcttaaagaccaaaaccgaaaccgaagggtcccacacgatccaaatccgacccaactcggaacaacaataattggtatctaatctccaactcggaagggttgaatccaaaatagcaggggcattactctcagctacatgcgtttccaaaaaacttccaaccaacaaattatttttattaacctactgtctaacagcgcgttgacgggaatggctattcaagcctcttacattccagcaaaaaaccttcattattaacacaaaaggggaaggggaaagctaagctttcaagcacaggacgatccacccgagaccaaagctcgtggggaccctgagaccttagaaatatggtcagcagcgctgcttctgctgatattccacttatgacgccatctcttcctggattttgaagacatagcaccccaacccggtggataaggaaaggaatcctccgacgggatagctgacaccaaaactgattcaggaagatgggactcaggtggcttgacaggacttctagcaacacctgtagtcgacttcttgacccaagcagagcccttggcataggactgtcctgcctcaaccaaaacagtagaaggaacaatctcaatattcttccctttcacgcagttctgagaggtgataagccttggaggggtactactggagcgcttcttagagcgtgaacgaactcttcccttccaatcaaagatgttgtatccactaatattttgtcgaagcgaaggcgttatctctggaagcaagtgccaaagcttgagtatcttgatacatctcttgacactgagcattggagagcttcacgttttgttgacaggtttttgcaactacacgaagctcctgtcttggaaacaaaactcaattcgacggtcaaatttaatcttttcaacgtgacaatggctgagaatacaataacaaccaattccatgaattttttgataaaactggaatcaaggttcgtttctcaagcccacatacctcccaaccaaatgggaaattctgaaaggatgattagaactattaacaatgttattcgagctctcctatttcaagctcgtctatctccttgttattgggttgaggcactaaatgttgttgttcatatcctaaaaatccttccctccacagctatccaaaatcaaattcctcatagcctcctctttcataaaaatccaacctgtgatcaccttcgagtttttgggtgcttatgttttccaagcttgaatcattcaaatctgtcaaaactatcaccgaggacaacgccttgtctgttcctttggtatccatctcaacaaaaagtgtatcgatgccttgatttaaaaacaaacaaaattattatttctcggtacgtttactttgatgaggatacgtttcccgcaactaatcaaaatttatctcaagtttcatcgtacacattcctaaacgcagttgatgatccttctcctttgttcaaggaaattctccaatcaccactacctcaaaaccaaccaccaccacctcaaactctctctgtgccaatgaacacaagatcaaaatccggcatcactaaaccaaaaaaggttttgtcacttgtcaccacagccaaagcgcctcttcctaaaagtcataatcaagctttattggaccctaattggaatccggcaatgactgatgagtatgatgctatgactaaaactaagattagaatttggtgccacgacctcctaaggttaatattgttagatcgatgtggcttttcaggcacaaatatgatgcagatggagtgctttcttgacataaagcaaggctggtagcaaactgtaaatcaaaggaacacggtgttgattttacagagactttcagtccggtagtgaaaccagaacaatacgggttgttcttgactttggagtagcgttaaactggcccatacaacaactggatgtcaagaatgctttactacaaggtcatctccatgaaacagtttatatgcatcagcctccagagttcgtcaacaaggaatttcccaaccaccaaccatgtctgtaaactagaaaaagccatttatggactcaagcaggccccacgggcatggaattcatggttcaccaaatttttaatgtagcttggtttcatcatgagcaaggcagacaactctctgttcatcttcaaacagggcattcaaatggcatatgttttgttgtacgttgacgatataatgttgaaagcctcctcaccaagtctcattcaaaaaatcattacacaactcaaaggcgagttcccaatgacagacatgggctggctgcatcacttccttgacatcaaggcaaattttaacaagcaacgtatgttcttaaatcaacatgtttatgctcaagatataataaactgagcaagaatgtccgaatgtaagccatgtgcaacaccagttgatctaaaatcaaagctctcggccggtgaaggcaacccaatacctgacccgacatcttacagaagtgtcgatggtgctctacagtattaaacattcacgcgaccggatatatcatacacagtccatcagatttgcctatacatgcatgaatgcgctagaaaggataatctgttacttgcaaggcactaagtcttatggtcttcacttggtcaaagataacatttcaacccttacgacttattctggtgcagactgggatggctgcccggatacacagcgatcaacttcagggtattgtgtcttccttggtccaaacttggtgccatggtctgcaaaacgacagcccactgtatcacgatcaagctaagaggcagaatataaaggggtcgcaaatgctgtagcagaacttacatggctaaggaatctaatgctggaacttcatctccccatcaccaaagcttctctactgtgacaatatcagttcagtatacttggccacaaatctggtgcaacatcaaagaacaaaacatattgaacttcacatacactttgtccaagaaaagtagctattggtgaagtaaaaggtcatccatgtcccatcctcactccaatatgcagacatcttcacaaagggtcttccgacatttctcttcaacaagtttcgaaccagcttaaccatccgggaacccgatgcttcaagtgcgggagtgtgatagaatataagaatattcagttacaatcaagtaggtagactcgtatatattgattcttgtatcccagattttgtggaacttctctgtaactcctttggctatttaaagccttgtaaatcaatgaatctttcgaggaaattattccactaacattgagagggtaagatttgtgttttagatcactattgatgtgccatatctagcaaacaatcgctctctttggtgtgtaatatccaaaagataactcggtatatcagaagtctttttgcagcttctatgcgatctctcagtccacctcccttataatcagagcttcatggtctcgttgcagctaggccttttcttttctaacctttagagtactgattcttggggaatcatattaaactaaaacgagttttattatgaaattcatttagatataattattaatatagtaaacgttattaggtataattttaccatcgaaactaaacggacaaaacctaaaataaatttagtaaccccaaaaaaattgaggaaaataaaataatattttaaagataccggctaagaccaacacatgttttaatggataaagctaggcttggaatttcggcttaacccgagaaaaccaaatcgagaaaaccgaatgtttcggttctcggcgccaacagttaaaagggaggcaaaccgttcggcaaaaatatttttatgattcaaattacggtttggttcggttcggcgagctaaaccgatcggttttctcggtttagaggcacaccatataataaagaagaaaccctagatctacatcatttcatgtcatctcctttctttttctaatcttaatctcttcttctcgcacatccttcttcgatcttgtaattgtaaatttaacaattgagcccatcgttttaaatttagtctacttcggttcgaattaaccgaattaggaaaaaaatcggttaagtttggaattaattttaaacccaataaccgacccgaaaaaaccgagtaccaaacggatctaaaccaaaatttaattcaattcaattcgccagaattttcaagatccaaaaaacccgagaaaccgattcaactgaactgatttaaccgactaaaccggactcccaagcctaaataaaggcaagacatatttctgttcttgatataaccatccccaaatttatgagaaactttttagggtaagaaatttaataaccaacttcttttcttttctttgtcaaacagtaaccaacttctaatctcatgtatactaggtgagtgtccgcgcctagcgcgggattttgttgttgttttttttttgtttttttgtaatatatttagtttatcacacttttttagaaatgttattttataaaagagattatattatgaaggatgaaaactatatatttcttattaagtactgcatattgtttgttaatttttactcataggtagaagattttagtgtgttgacgaaaccgcatagtccagtgctgtttgaatattaacaaacaaaattacatatatatatatatatgtatatatatataatctctttattatgagcctaatttgtaggtatattatatatactttttgtttggtattggtaagttgtaaaggattatagaagagcatcattttagcttactcgtgcatattttaataaatttgattttgtttttaacattcgttttattctctttttttgttattttgtaaaattgtatttaaaaataactattgtttttcaaatgtttgctacttaatttgttcgtattttgatttcttaccccatatatatagttttattgatggatggttaacaattttaacaatatttttgaaactactctatgcaatgattggtaatataagagttgaattttattatatttaaaaattctttgcaacagcaagagatgacaaacatgaaaggaaaaaaaaaactacttgaatttatttattttgaagctttatgatagttcattgcctaaaacattattggtgctaattttaatgaaatgatagttgttgaccaaaactattgtaataataataatttttttaaaaacagtagaaatttattatttaattattgtgttgtgttttggtatttttgtgctttatccttctatcagcctttacttttttaatataccctaaattggtctgacacaaacaaagactttttatgcttcagccttcaagtagggatttgttaatcgtctatcgatctatgttcatatctaatttaatttgctttactgttgtttgacgaattttgtctcctcgaatggctttcgcaattctccgttgtttcttacgatgattaatcgtcaaatctattagttggaactaagccttcagtaaaaatgaaatagggaaatcaaaaaaataaatataaatcatgttttatatttccaatttaagttagtttgtgtatttttatgacaacaaaagagttcatgtgtttttttggcaaatactaaataagttaggttttttctaggaattttctgtaaataaaactaacagcgtttgacgattttgttaacgtcgttaacggtctgttacgacgaagggaagtaatcagaaaataaaatagatcgtgtattttatttctaagctaaattagttagtacgaaaaaagttcaggtagttttctgacagattttaaatagttcgtttttttttatagaaattttccccaatcgcctatgtctataatcataataatttaatatctttaataacaccgtaccaacatatatgaacttcatacgttaaaaaataacttgaaagaatcgcaatcgttataatttaccgtttatttttcttcctatcattttataaaacaactatattttctaattgatcgacacacatatttcagcagctaaatttgttatgaaatcaacatgttagaaaatttgttacaaatttaaggttaatcgtcctcaagaaaatatttaaaaatatagaaagagtgatggttgaagttcttacttatgataggttcatatgttaaattaattactaactatattttacttattttaagaagtttaggtggtaagctctcatgtgctgatctgagttgtgggagagagttgagctactttcatatatatgattagggtaaaactcttttggttttacaaatatgaaggcatggacgaattagagatacgaaattaagcgatcatttttttcagcgaccaaagctcatagattgattgatagagttttaattcttgtaatctttacttgatcaagaagagactatctgtcatcttcgtagactgtgacgaatcaattatttttgtccaaaacaaatgcagtaaaatatgaaacactaaacctacaaatacctttggtgaaaccaaaatttatcaaaacggaggttacaactaaaatgatccaaaattcatcaaaacggaggttacaactaaaatgatttgtgatcaaattagaagaagaagaaaatccaaaaatgatttaatgatctagtaaagcttatatacagaaatcattgggaaattcacttctcttagtatatttttcttactcagatggtgtatatacttgcttatgtaataatttgctttccgagaagtatgtaaagtttgtaatctcaatttgatatcaatgaaatcgttttcctcacaaaaaataaatgaatcccaagttatgttttaacaccaatcaatcattattcaatactctcaaaatcatttcttaaaatgtattatttttaactatgaaactcatctaaagttgtgttaaatacttaccacaaaaaataatctaaagttgtgttaactaatcgtatagtttcttaaagtatcttatcaattattcgtttaaaaaaaaatttggaatgtcttatttttcatcgaccctttgttttgtacatttagtttggtggtgtcttttcataactttcttctgttctgtaacagtgtagtgtaactttctgtttatggtcacattttttaatcatattttaactggttgttgaagaattaaaccccgtaaatggaaacattggttggttaatgggccgaacatgaaagcccaaattagttcataaccctaaaccgaagcaaaacattagctgatagtgatactcttcgtcttcttcttcctccgtcccacctttggaaaagttctcgtgagtcttctctaatgtctgtacatgtcaaggtacataatatattacttattcagggctgctttaaatcttggtttaaaactgatattttccatttcaggaacctgtttgtgaaacttgtggcgacataggttttgaagaagcacttgtcttttgtgactcttgtaagattgagtctatacaccggtgagttcaattctcgatttctcctatggtttgattgaattgtgttgtttataacctatttcacttgttctttagctattgcataggcataacaccgactccttttacggaatacataacttggatctgtgaggattgtgatgagagtgacagtgattctgattgtaaagaactggatcagactgctaagcttacacatatcttgaagaagagtgacaaaaagaagaagaagaggaagaagaagagtaaatatcttgataaatatattttaaaattacgtctgtttattgtaactcttcgtagaagtattactaactaataaatgtgtttctatagtctcttgtttgattatctttttaattattcggttttaacaaaaaaaattatgatcttttcaatttagaagttcatcttatttttatttttaacaataactaaacaaaaattatactcatttatgatggataagaaaaaaattgttaaaattttccataatattctaaacatccgaattcacaataatttttagcgtaaaagaaaacgtaattaaccaaatctaagcaatatagtattttatttaaaatgaatttccttagatttcataacctaatttaattaaaaaaaatcctaagatttcataacctaatttaatttaattttggttgaatgtaagtgaaagacatcaatttaaatcataagattggtgtgttgaaatgaaatattttgaactagcaaatctttagttatacacatatattttcttttgtcacttgaaattttattataaaaacttgttgttgaaccagagaaggaatacatatgcccaaataagggaaactcaagtcggcagacaactaaaagtctccgaagacattgccggggcaaaaaagaaattccccggaaaacaaaaccctattgaagggaaccagagtaaaatgaaactggaaatacaatgcagaaatgatcaaaacacaatcgaaagaggacgactcttaaaactaaaagcagaggcaacaaggcaaaaaccttaagaaaactgatagaactaagagaacagagaagcctcttcttcttttgaaagaccagcaaatgcgacttatcacggctgcccacggccaaaccagaaataatatctaccacctcctatcaagttgagaaccaatctctcgagaaccaaggatatcagaatccgccaagcaaagagcattcatagaaactcatagaacctcgaaaacacttctggatgcgacgaagaccgaagcgtcacttaacgtctagctagaatcctaaaaaaagtgatcagatctaaacagatcttgaaagcagggacaaggagtgaggcagaacctctcaaaaatcaccattcttcgaatgagagcgacaaaggattgagacagttaacaaacaccaaggagaagaaaactctgtaaactatgaagactaccgtaaccaaccaataaacacgaaacttctgcttagaaaggaagcgatcccaaagggagccaaaggctgagcgagaaatcaaagggagcgaggaaaggcaaaggattaggagataaactacaatccaaaaccaagtaaacttgacggcaaagaaacgttgaaaggctcaagagcagcaacaaactttaaggcaggaaagagcagagaagagacctcattctccgagccatagcgtagatcaaccaaattcggaattactaacatcttctctgaagtcacaaaacccaaaagaaattaccgcaacgaccgcttccacaaacccaaaatcaaaatcgaaacaaaccaaaagacttcctaatcgatggccacaaattctgcactcaaaaactaaacaactaaccctatctagtcaaagaaagagaacgactagaaggtcagcaaaaccgaccagaagataccaagaacccatggccacagaaccgagaacaaccaccgacgagaccctagccaaggcagaatctgacaatggcagaaaattcatcttctacaacccgttgggggaaggagaaggacgctcttgaagagaagaacaccgaacaaacctcactgtgaagacccgtctaactcgccaagcaaactaccttcaacatcgaacaccagaactagaagagggagacaagtctacaacaaaaaagaaagaagcagcaggggccctctcacggctacgatgaggagcgccgttcaccggagagggcgatttgaaatctggagatttttggcggcggctagggcaaccttgtctacagagaaacttttttgttttaattatacacatattatgtgacacatttccaacactaaataaaatgactaactaattcaacaccataaaaactctaaaagtctctcctgtgctgacacgtcacctttttcaagtgttctcagcataacacctcattaaaatcaacagccaattagaacatttcgattaatacacttcatttacgttgaccaataaaaacttactatttttccatgtcatctcatcaacttaacaaaattaaaatttgatataggcctaacccaaccaaactattttcaaaactaaaatttatataaaaacatgggcctaaaattcttaaatataaaacttagacctaggcaaataaaccgaaccgaatgtaccgaaccgaaaccgatgcaaaaaaaaactgaaccaaactgaaaatttaaaaataatcgaacggatattaaattctataaccgaaagaaccaaaaccgaatggatacaaatcaaaatattttaggtaaccgaaaatatctgaaatataattatatttcttaaaaaatattagttatttctaaactaaataattaaaagttatttaatagtataaatactcaaaataccaaaaacatatgaaaatatcaaaaataactgaaatatccgaaaatattcaaagaaaaatagctgaatgtatattaaattttaaaaccgaaagaaccggaacggaaccaaaaccgaaccaaaattttaaaataattgaatggatactaaactttataaccgaaagaaccgataaccgtatggatacgaatcaaaactgaatggataaccgaatacccatgactaagaaaccttatctaaaggtctgactggttgaaacacaacagttacagttgcgactgcatgagtttacgggattggacggtttcatattcaagcgttataaaacattttgaacgactggtttagcagttaaaaattggtgcatttttgagagctttatgactggttaacggatttacgtttaggatatgaaaattacggatttctatttttggtggaaaaattacggatttacgtttttggcggaaaaattacgagtttacttttttggtgggaaagttacaggtttacgtttttctggcagggaaattacgggttttacgttttttggcggaaaatcatgtgtttacgtttttggcgaaaaaatgacaagtttagttttttggcgaaaaaattaagagtatgtttttggcgggaaaattacgagtttatgaaaatgttatcatcatgatgaaaatagtatgataatgatggtgatagtattatgatattatgggaaactcaagtcggcagacaactaagggaaactcaagtcggcagacaactaaaagtctccgaagacattgccggggcaaaaaagaaattccccggaaaacaaaaccctatcaaagggaaccagagtaaaatgaaactggaaatacaatgcagaaatgatcaaaacacaatcgaaagaggacgactcctaaaactaaaagtagaggcaaaaaggcaaaaaccttaagaaaactgataaaactaagagaacagagaagcctcttcttcttttgaaagaccagcaaatgcgacttatcacggctgcccacggccaaaccagaaataatatctaccacctcctatcaagttgagagtcaatctctcgagaaccaaggatatcagaacccgacaagcaaagagaattcatagaaactcattgaacctcgaaaacacttctggatgcgacgaagaccgaagcgtcacttaacgtctagctagaatcctaaaaaaagtgatcagatctaaacagatcttgaaagcagggacaaggagtgaggcaaaacctctcaaaaatcaccattctccgaatgagagcgacaaaggattgagacagttaacaaacaccaaggagaagaaaactctgtaaactatgaagactaccataactaaccaataaacacgaaacttctgcttagaaaggaagcgatcccaaagggagccaaaggctgagcgagaaatcaaagggagcgaggaaaggcaaaggattagcagataaactacaatccaaaaccaagtaaacttgacggcaaagaaacgttgaaaggctcaagagcagcaacaaactttaaggcaggaaagagcagagaagacaaaggattgagacagttaacaaacaccaaggagaagaaaactctgtaaactatgaaggctaccataaccaaccaataaacacgaaacttctgcttagaaaggaagcgatcccaaagggagccaaaggctgagcgagaaatcaaagggagcgaggaaaggcaaaggattagcagataaactacaatccaaaaccaagtaaacttgacggcaaagaaacgttgaaaggctcaagagcagcaacaaactttaaggcaggaaagagcagagaagacaaaggattgagacagttaacaaacaccaaggagaagaaaactctgtaaactatgaagactaccataaccaaccaataaacacgaaacttctgcttagaaaggaagcgatcccaaagggagccaaaggctgagcgagaaatcaaagggagcgaggaaaggcaaaggattagcagataaactacaatccaaaaccaagtaaacttgacggcaaagaaacgttgaaaggctcaagagcagcaacaaactttaaggcaggaaagagcagagaagagacctcattctccgagccatagcgtagatcaaccaaatccggaattactaacatcttctctgaagtcacaaaacccaaaagaaattaccgcaacgaccgcttccacaaacccaaaatcaaaatcgaaacaaaccaaaagacttcctaatcgatggccacaaattctgcacacaaaaactaaacaactaaccctatctagtcaaagaaagagaacgactagaaggtcagcaaaaccgaccagaagataccaagaacccatggccacagaaccgagaacaaccaccgacgagaccctagccaaggcagaatctgacaaaggcagaaaattcatcttctacaacccgttgggggagggagaaggacgctcttgaagagaagaacaccgaacaaacctcactgtgatgacccgtctaactcgccaagcaaactaccttcaacatcgaacaccagaactagaagagggagacaagtctacaacaaaaaagaaagaagcaacaggggccctctcacggctacgacgaggagcgccgttcaccggagagggcgatctgaaatctggagatttttgggcggcggctagggcaaccttgtcgagagggattcttttttgttttagttatacacatattatgtgacacatttccaacactaaataaaatgactaactaattcaacaccataaaaactctaaaagtctctcctgtgctgacacatcacctttttcaagtgttctcagcatgacacctcattaaaatcaacagccatatagaacatttcgattaataaacctcatttacgttgaccaataaaacttactatttttccatgtcatctcatcaacttaacaaaattaaaatttgatataggcctaacccaaccaaactactttcaaaactaaaatttatataaaaacatgggcctaaaattcttatctagaaaacttagacctaggcaaataaaccgaaccgaatgtatcgaaccgaaaccgatgcaaaaaaaaactgaaccaaactgaaaatttgaaaataatcgaacggatattaaattttataaccgaaagaaccaaaaccgaatggatacaaatcgaaatattttaggtaaccgaaaatatctgaaatataattatatttttttaaaaatattagttatttctaaactaaataattaaaagttatttaatagtataaatactcaaaataccaaaaacatatgaaaatatcaaaaataaccgaaatatccaaaaatattcaaagaaaaatagctgaatgtatattaaattttaaaaccgaaagaaccgaaacggaaccaaaaccgaaccaaaattttaaaataattgaatggatactaaactttataactgaaagaaccgataaccgtatggatacgaatcaaaactgaatggataaccgaatgcccatgactaaaaaaccttatctaaaggcctgactggttgaaacacagcagttacagttgcgactgcatgaatttacgggattggacggtttcatattcaagcgttataaaacattttgaacaactcgtttagcagttaaaaattggtgcgtttttgagagctttatgactggttaactgatttacgtttaggataagaaaattacggatttttatttttggcgggaaaattacggatttacgtttttggcaggaaaattacgagtttacttttttggtgggaaagttacaggtttacgtttttctgacaggaaaattacgggttttacgttttttggcggaaaattatgtgtttacgtttttggcgaaaaaatgacgggtttacttttttggcaaaaaaattaagagtatgtttttgccgaaaaaattacgaatttatgaaaatgttatcatcatgatgaaaatagtacgataatgatggtgatagtattatgatattatgagagggtaatgatgatgatgatattgtgttgataatgaataaattgatgggtggatgaaactatttgaaaaaagattgattatattcaatcggtttagagattttgattaaactcaaattgatatcggtttagagatttaagttggtttaattcattttaaccaaaatttgtgggttcttattgcaatctaactcatttgatccatttaaccatttgacccaataacttatttgaagcatcaattcatttgagtaaaaaaaattaattcattagagttcatgggttgagttgaattggattgacccatgaaacttgacctattttgacaaccctaaaaatagtctataaaaaaacaattgtaaattgagtaagtatatttttcaacattatctttcttattagatacttataatagttttaatgtattgatgataatgaaggtcttcgatttttatattgttatataaacgatggtgtattaatgattatcaagattatggaaattttttattttatgtattactaatgtttatttttataatatatatatatatatagatacaaaaaatgttaagtacttccttttgtatatatttgtatcttttaattacttatatcaatggtatttttgttttaatataattgagtaaattcaaaaggataaattaattggaaaaattatgtgagaacgacacataagcatggcattttcgttaatcatccatgaggataaagttattttaaataaatatttctcaattaatatataagggatattggaaaagagagaatataatcatatttacaaaatctaacaacataaaaaacaaactctccagaacaaaactatgaccatggcccaaccaaaatcaatgattaagctggctgatttaaacaaagcgtttacggttatgaatacggaagtttgctgaagcggacgattgtaatttcaagtgtcatgaaacattttgaaccattggtttaatggttcaaaattaaaacgtttgcaagagttatatgattggttaaccaggaggtgctattacggttaaactaaaataacaaaatattataatttataaattatacaaaatataaaataccaaaaatattatattattatgataaatgtgaaatttaaatataactaataataaaattaaattcttcctaattattcaaactaattaaattttatactcaaatatgcatttgcttcataaaaagaacatcatcaagtaatatggaaatgacaaaaaaaaaagattaggacaaattaaaaaaaatattttcaatttttgggtgttctggattaataatattattacaatacttagttagtatcttatcattcttcagtttgggttgatactatgattttgatagagaaaaaaactaacattttgtgaataaaaattaccaccatatattaaagttttgaggaagaagcttacactgaaaagatgacattgttgatgtaatgtgtaaacaagcaaaaaattattacaactaagatgtcatttttgttctttaaggtctaattaaatttatctttgaggtatggttactctcaaatctccaataatcaattcgatttttgtccctatatttttttgtttaagtgcatctattatctatttttttggttcaagagtttatttctgaactgaatgaaatcttagcataaggtaacatcgaagaaaaaggtcaatggaagaagaattttaaagaagagacattaaagatttttgagtttcttcctcaaaatattcaaggatcttatcagatttactaagtgtcattgtggattttaatcaataactaataatcatctgagtacgttttatactcccaataaaaaaatatttaattttcaaattctgaaaaacaaacaaacatagcttttacctttttatgcctcttcaacatatgaatcaagtatgcatgtggaacattaaaaatcaaagatgataactccatataacatattcttaaaaatctaaaatgactttaacctcaccagaattagcaaatggtgattttttaactcttttcatttttagtttcttaatgactcttctaaatagatgttcgtaaagcaaaaaattagcttccaaaacttataaaggctatatagatcttactaaacaaaaataaaaaaatgcattgtgtttccaatcacttttttaatgaatctttttgtctacatatatcatgaatcatgacaaataacattcaatacctacatacatcttaacaaaattatattaaaaaaaaagcccgcgacttggcgcgggttttgccctagtcactttaaaaacatgtaagagaaaaatttaaacatttactgagatatgcatgtgatgtgggagaggtgattgtggccgaagacaattatagattaaccaatgcatttaaaatcccttcataatttaattttaacttaatttcagacgacttcttctcaaaattttatcaaattcttcgaacctaccaactaaacgaaaccctaaattgtttggaattatctttcttttggattttcgtatttttttgaaatcagtatagatgataatttaatcaagttggtaaagacaattcaaatatttttaagatatagacatataaattaatgtaaatcgtttgtaaacatttaattatgataaattgtctacatgttgatagtaaagacaatttagaatattatattacttaaaacaatttttatcaagttagtaaaaaaatagtttaacatcaagttaacatatataaatcgtctttgttagttttcttatttggttaagaaaaaataaaataaaattttataagatataaggacatgtaaaattaatataaatattaataagtttaattcattttgatacatataaaatcggattgatagatttgacacgtgttacgatcatgcaactttgaaaaccatactatatataattattatatgtgatattttagatgatttcaactatgattttcttctcatgaaaatattatgataaaagtcaattttacattatcaataacaaaaattcactatattactatttaaaaaatggaaaatgcagcaaccaaataatatttatgtggttgttgaataattaaacgggaatatgtcattaaaatccccaacttattcaaaatattgatttaaatcctcaagtctcgatgcaacaaaataaatatcaaacttaaattgactttccaaataaatactcaacttttgttgattttctaaataaataccaaaagtttattgatctgacaatattaggcatgacgttatgtaggttaatagaccctgttatcagagtttattgtgttttaacagactcgttaattgaaaacgataacgttttctctaataataaaacattatctttttgtcataacgaatcaattaagtccctagtttcaaatcatatggggatttagggttagggattttgctcggtttaggggtcttagattgatttggggatttattttagtcattacaacacaacgacgtggctctgttgttggaaactataatacttcgaattaataagatttattaatttagttaacagtatttctaatatggccacaacaaaaataaagtatttatttagacagtaaacataaatttaatatttattcgttttgtcgagaattggagatttaaatcaacgttttcaatatgtcgaggatttaatgatattttttccagaattaaaccctataattggagattaatggtccaaattgattataaaataaagaaagaaaaaaaaaaactaaaccttagcaaaattgttaacttctcttcgtcttcttcttcctccgaccttggaaaatctctcgtgactcgctagtcttctctaatgtctttacatgtcaaggtacataacctattgcttactttgataccaaatttcacttagggctgctttaaatcttggtttaaaactggaaaaatctgatctttttcattttcagggacctgtttgtcaaacttgtggcgacataggttttgaagaagcacttgtcttttgtgactcttgtatgtttgagtctattcaccggtgagttcaattctcgatttcccctgtgcgtcgatcaaattgtgcctattaggtttctcctgtggtttgattgaattatgcatatacctatttctcttgttcttcagctattgcttagggataacaccgattccttttacggaatacataacttggatttgtgaggattgtgataacagtgagagtgattctgattgcaatgaagttgatcagactgttaagaagaagaagaagagtagaaatcaaccccttgtggttttagctgaggacaatgtgctccaggaacctttggaggggtctaagagagaagaaagctcatgtagcagaaaacctcatgaattgacttgtttagatggaaatggagaatctgttttggaggctgcagattcatctagtgtgccagatcatagttcttgtactagcaaaaggaaagaagttgatcagactgctaatcttggacatatcttggagaggagtgagaaaaagaagaagaagaagaagaagaaaaagagcatcaatcattcgccaccggttttagctgttgaggaccatgagcttcagggtactaccaatgttgttgaacctgtggaggtgtcttcttcttcaccaactaaagaaacgatggagtctaagagacaagaaagctcagatagtagaaaacctcatgaattgacttgtttagttggagattcggagaccgctaattcatctagtgtgccagagcataattcttgtgctgtcaaaaagagaaaattaagttctggaaacaaacagattcagttagctgatgggagtagttcttgcagagtggctgaatcaaatatgcctctaacgttgacatctaggaactatagagcacaacctatcaaaataccgatatggaggtaaagaaaagaatgtctttagttgtaccgctttgcatcctcacttacttgaattc

SEQ ID NO: 21 - DNA, 131692 bp, Arabidopsis thaliana
gaattccaaacaccatgaatgtgatatagccaactcccttatgcagctctctctccctttcttcagcatagaaatgaagcttcaaagtggctaggaattggcagctctcagttttgtacccttcacacttgtaggagaaaaaggtctccagcttggccatctccatgaggtagtcaacatctctacatatccccaaagcttgcatggtaggtctatggggatatcttgtcccctcaaaactcagctccatgagatattggtagtgctcttcaatggtaagttctttctttctcctcatggtgttccttcttctccttgtaggaactatcgagacctcttcatcaacttgcgcatcttcctcagatgcttccttctctatctcaggcacttcttcttctgcaactggttcggactcccagaccctcttgcctcttgctatttcctcttgagcagccgcagaacgacccatagaggactccggggccatactcggccattgtactcggcctgtcatccgagtaaaaccaggactcgcagcttcctgattctttgactaattcttctcattaatcatctcaaaccctcttgccacggctcgagcagaggctctccttcttgattcctcgggattcatgatcttgggatgatttactgcaggtagtcaccacaaaataaccaaaggtaggtcaaagtagaagagaaattgatgtttaagaatgaacaaaggttgcaagagaggttttgaaaaggtttgtaacaagagattttggtaaaatttctgagaaatctagagaagtgggagtaagaacttgaaatgtttggagagaaggagtaaaattcgaaatttttgagcaaagagagagtgtgagtgacttagcttgttgagtgtggttttatagataagaagatttgatcctagccctccaaacaccttagatctgcacccttcatttggtcaaggggacatgtctcactatttgcagaagaatctttgaagggctttggggagcaggatttgattggtggggccgagcaaattcgaattcaaatttgaatttgaattgtgttaacctcgcacgtgtgaactcggccgacatactcgacgcgcgtgtcgagtacagtgttgggcctgatgggcttctttttctgactcggcttcgggccgagtgctgcatcttgttgggcctttgaacagtgaggcccatactcgaccttgggccgagtggtgtggtccgagtactattcaatcttgggcctttggtcgattgaagcccacactcggcctacagccgagtagtacggtcgagtgtgacctgaaattctccagaagtctttttccctgaaacacttaaacaaaaacatcaaaaataacaagaaagcaatatatacaaggatagacatgggacttcctcccaagtgagcttgtttaaagtcattaagcttgactctcacaatgtttaggtagagaagagattgaggagaggaactgagaagtcctcatcctcacttgctgaatcctcaaagtctgaatcatactccgcattttctcttgatagctggagtgtggagtactcatttgatctttcctcaaagtaagcctccttctcatcagtactatagtcctcttttccaagatcggggttcctcaaagtattcatcaatctcaggacctgggtaacctttaatcatctccttaagctccaggatagcgtagttcagctcctctatcttgaggtccaacttttccatggtctctccttgagctccatactgtttcctgagctccataagctctctagcaataggaccaacatcaaaatggttccccttagtctcaacctctaagctaggtcctccttctatcataagaagctcctcgggctctcctaggtggtgagtcggaatggagtacggaataggattttctaacccactcaacaactcagcatctaaatttccttcttcaatgaagaaaagctgcccttctatagtgggcttcttcatcttcttagcaatgtcaaagctcatatggagattcttaccaaggttcaagtcgatcttacccatttgcacatcgataagagcgcccgcagttgctaaaaatggtctcccaagaatgagagggtctttcggttcctcatccatctctagaaccataaagtcggttggaatctcaatcgatccgatctttaccggtaagtcttctagcatcccatgaggcactctcactgatctatcagctagaataagatgaatgctgctaggcttgaacttatcaaatcacaatctctttgcaacagacaaaggcatcaaactaactgaagctcccaaatcacaaagactattgttgaacactaagggtcctagtgaacaaggtagagtaaaggaacctggatcacctagcttctttggtatcaccttcctttgaatgatagcgctgcactcaaaactcaattcaataatttgctgagcttcttggggtctttccatgattacttccttgggagtatcaaccaaaggtatcttctcttctaactctttgatacactttatgaacatcatcttgtgtttctggaagatccttgcattaacttgtgcaatcctttctggaaagtatggtttaggttcataggcaggtggaatacggattgggttgctcgggtcatatgctcgttcgacaagcaaagcaaagaagtcgagttcaatctcctgtcttgatcttggtctcaaaacctccccttcttgaatcccactgtccgcagtggcagaagtactcactgtggtgatagcatgggcatactcctttggattttgaacagattttctagaaagttgtccagggtgcttaggagctgaagtagaagcaatgtgtccttccatggtcttgactctagtgttaagtgcgtctatctttatattcaggtcgttataagagcaatcaatcctggtggtgagctcagctagcttcttatccatggttatggagcatgaggcctgtccttgcacaagctgatgaagtagagtcttcatctctgagtcttgtgctgaagtttgctgtggctgctgagtgaagcttggaggtcgaaagttctgcttttggttgtagccttggttatagggtataaagggcttagcttgaggcggttggttctgtggggggtagacttgatcttgtgggtttgccacattgttgcttctgtaagagagattagggtgagggggtttgtagttgttgaatcccttgttgtagccaccttgattctgtaggtagctcacctcctcaacagtaagattctccccttcttggagttgtgtaagctcttcttctgtaatgtagtggacatttctctgttgagcaagcaccaatttgtcaatcttatcattaagagctttgatctccttcttgtgcctatcctcagaatcgctactgcctctgttagtgcgatcgtagtcctcattgtaattcccatcagattgtgctaggttttcaacaagttcccaaccttcagctacatctttgttgagaaagttaccattggaagttgtgtccaagagcatccggatctttggtaaggcacctcggtatagagtactgagtagggaggccttcttgaatccgtggtgcgggcactgagtgctatatcttttaaaacgctcccatgcctcagcgaatgattccgaattcttctgattgaatcccgagatctcattcctcaatctagccgttcttgagttagagaagaacttggctaggaaagccttcttgcagtcatcccaagtgtctacagaatcaacgagcaaagtcttttcccaaagatgagcttcatctcctagtgagaaagggaataacctgagcttgaagctgtcttcactaactccattgatcttggtgagactacagaatctatcaaagttatcaagatggtccaatgggtcctccattggcagtccatgaaacttgttgctttgaatcatggagataagaccactcttgatctcaaagttgttgttctgaataagaggtgggacaataccagctctctgatggtggtttctaggtgcatcaccagcaccaatgttgcctggcaactcattagcattcacctcattagccatcactactgggtttgaagtggcttgttgttccctgagttcacgctgaatcctgtcgatgtcgtctctgtaccgtgtgaatgattctcataactttagaacttcctaatcttaatttccattgatgaaacataataaagcaggctttaaacaccaatctattaaagtcaataagcagtctaaacatccaatgccttgggctagaatctacaaatctctgaaattagttggttcagacatttcatcaaacaccttttggatggagaaagtctgaaatcaatttttaattgatcagaaagaaaatagcattaagaactcctaaaacagaagggaatcatgcatataaacacttacctagctaaagaagagaggaatccacctaaacctaacccatcctcaagaactctaaagaacactactcaagaacactgaagaacatcatagaacaaaacccagaaaattcataaaaccaagaaatcattataaacttagcaaaagatagatctcaatgagataaacaagtttgcagaagaaatcaaatccaaattctcaacacaacaaccagaaaatgcaaaagaaaatcaaagaaccctaatatccagcggacaaagctcggatattttgggcaaaaacataagaggtctatttataggcaatcctaggttgccctaattgggaataagacaaaatagataagtcggcgcaggagcgctcggccctaggccgagtagaaaagccgagtggcttggttttggtcatacagctcggccctaggccgagtagcttggtcgagtggcttctcttcatccttaagtgcacaactcggcctccagccgagtgccttggtcgagtaggctccttgttcttcacgtgtgctccactcggcctccaaccgagtacataggccgagtatacttcaaatccttccttaggtcccccgaactcgagtctgtccatcccttgtgctagaaacctccaagttgagtccaaaagtacctaattcatctgcaaaacactccaaatgcaagtatgctatgcaatgcaatgcaaaatgtgcaaaagaaggaaaagagactaagaatgcataaaaagagacttgaaactaaactaaatgcatgaaaaacaagggcttaaaaaggttaaaatctagtgttatcagtaatgattttatagactacggtgcagcacgaaacaggtctaaacatagagagttgatctactcctgtaactttaggaatgagagtgattgctgtagcgttgaacctcttgaggagatgaccagttctgaaaaattctttaacagcagcaatagtactatccttgaccacaaaccaagattcccaaaagaattccgcagtgaagctgtcaggacccggagccttgttgcgaggcattgcaaagaccgcagcagttatctccttatcagacgggagagcagagagacgagacgccagtgtatcattgcagcgaaaaggatggatatctttgattctctgaaccgaatcgggagtgagaatgtcgctgtcagagcccaaaaggtgggtataataggctacaatcatttctttgacctgagtaacattctccactcttacatcatcatccatgcgaagaaacttgatcagatttttagcctgatttgcaagaatgactttatggaagaaccgtgtattagcgtcgccatcttgcaaccatttaattcttgatttctgtctgtaaaaagactctagagcagcagcaaagaagttccactttttcctggcaacatgctcaactctaaaaagagaatcagaagggttggttaatagctgagactgaatcgattccaaagaatccagagcctctttggttttatgctggatattgccaaacccttgcctgttcaaaagcttacaacacttcttggcagcttttaaatgttcccctaaagaaaacatgtgagaaccaacaggaatctgctcctcccaagcaacagtaagggacaccaaaaaggtaggatgagttgaaaggaaggagaaatatctgaaacatttcttagatctctttgggaggttttccaggataataatacaaggagagtgatctgaaacccctgacagctcaaagacagcaatcgcactaggaaaagaagagaaccaatctccattggcaatagctctatccaacttccttatgatcggattatcatcttgatgatttgaccaagtgtaatggaccccacgactaggaatatccaccaaatcactatctcttaaacagttctgaaactcctctaaacctctcatggggattgaagtttgaaggacagaatagtgatcagaagtagcagctatctggtcaaagtccccaaccaggatctaaggagtgaagcaaagaggagaggacggtgataaagtagagatgtcttcctaaagggttcgtctctaaatctcagtgttcctaccataaacaaacgctaccgcaaaagatgtagcaagacccgacagcttaacactacaaaccatcaattgatccgtcttcttaaagaccaaaaccgaaaccgaagggtcccacacgatccaaatccgacccaactcggaacaacaataattggtatctaatctccaactcggaagggttgaatccaaaatagcaggggcattactctcagctacatgcgtttccaaaaaacttccaaccaacaaattatttttattaacctactgtctaacagcgcgttgacgggaatggctattcaagcctcttacattccagcaaaaaaccttcattattaacacaaaaggggaaggggaaagctaagctttcaagcacaggacgatccacccgagaccaaagctcgtggggaccctgagaccttagaaatatggtcagcagcgctgcttctgctgatattccacttatgacgccatctcttcctggattttgaagacatagcaccccaacccggtggataaggaaaggaatcctccgacgggatagctgacaccaaaactgattcaggaagatgggactcaggtggcttgacaggacttctagcaacacctgtagtcgacttcttgacccaagcagagcccttggcataggactgtcctgcctcaaccaaaacagtagaaggaacaatctcaatattcttccctttcacgcagttctgagaggtgataagccttggaggggtactactggagcgcttcttagagcgtgaacgaactcttcccttccaatcaaagatgttgtatccactaatattttgtcgaagcgaaggcgttatctctggaagcaagtgccaaagcttgagtatcttgatacatctcttgacactgagcattggagagcttcacgttttgttgacaggtttttgcaactacacgaagctcctgtcttggaaacaaaactcaattcgacggtcaaatttaatcttttcaacgtgacaatggctgagaatacaataacaaccaattccatgaattttttgataaaactggaatcaaggttcgtttctcaagcccacatacctcccaaccaaatgggaaattctgaaaggatgattagaactattaacaatgttattcgagctctcctatttcaagctcgtctatctccttgttattgggttgaggcactaaatgttgttgttcatatcctaaaaatccttccctccacagctatccaaaatcaaattcctcatagcctcctctttcataaaaatccaacctgtgatcaccttcgagtttttgggtgcttatgttttccaagcttgaatcattcaaatctgtcaaaactatcaccgaggacaacgccttgtctgttcctttggtatccatctcaacaaaaagtgtatcgatgccttgatttaaaaacaaacaaaattattatttctcggtacgtttactttgatgaggatacgtttcccgcaactaatcaaaatttatctcaagtttcatcgtacacattcctaaacgcagttgatgatccttctcctttgttcaaggaaattctccaatcaccactacctcaaaaccaaccaccaccacctcaaactctctctgtgccaatgaacacaagatcaaaatccggcatcactaaaccaaaaaaggttttgtcacttgtcaccacagccaaagcgcctcttcctaaaagtcataatcaagctttattggaccctaattggaatccggcaatgactgatgagtatgatgctatgactaaaactaagattagaatttggtgccacgacctcctaaggttaatattgttagatcgatgtggcttttcaggcacaaatatgatgcagatggagtgctttcttgacataaagcaaggctggtagcaaactgtaaatcaaaggaacacggtgttgattttacagagactttcagtccggtagtgaaaccagaacaatacgggttgttcttgactttggagtagcgttaaactggcccatacaacaactggatgtcaagaatgctttactacaaggtcatctccatgaaacagtttatatgcatcagcctccagagttcgtcaacaaggaatttcccaaccaccaaccatgtctgtaaactagaaaaagccatttatggactcaagcaggccccacgggcatggaattcatggttcaccaaatttttaatgtagcttggtttcatcatgagcaaggcagacaactctctgttcatcttcaaacagggcattcaaatggcatatgttttgttgtacgttgacgatataatgttgaaagcctcctcaccaagtctcattcaaaaaatcattacacaactcaaaggcgagttcccaatgacagacatgggctggctgcatcacttccttgacatcaaggcaaattttaacaagcaacgtatgttcttaaatcaacatgtttatgctcaagatataataaactgagcaagaatgtccgaatgtaagccatgtgcaacaccagttgatctaaaatcaaagctctcggccggtgaaggcaacccaatacctgacccgacatcttacagaagtgtcgatggtgctctacagtattaaacattcacgcgaccggatatatcatacacagtccatcagatttgcctatacatgcatgaatgcgctagaaaggataatctgttacttgcaaggcactaagtcttatggtcttcacttggtcaaagataacatttcaacccttacgacttattctggtgcagactgggatggctgcccggatacacagcgatcaacttcagggtattgtgtcttccttggtccaaacttggtgccatggtctgcaaaacgacagcccactgtatcacgatcaagctaagaggcagaatataaaggggtcgcaaatgctgtagcagaacttacatggctaaggaatctaatgctggaacttcatctccccatcaccaaagcttctctactgtgacaatatcagttcagtatacttggccacaaatctggtgcaacatcaaagaacaaaacatattgaacttcacatacactttgtccaagaaaagtagctattggtgaagtaaaaggtcatccatgtcccatcctcactccaatatgcagacatcttcacaaagggtcttccgacatttctcttcaacaagtttcgaaccagcttaaccatccgggaacccgatgcttcaagtgcgggagtgtgatagaatataagaatattcagttacaatcaagtaggtagactcgtatatattgattcttgtatcccagattttgtggaacttctctgtaactcctttggctatttaaagccttgtaaatcaatgaatctttcgaggaaattattccactaacattgagagggtaagatttgtgttttagatcactattgatgtgccatatctagcaaacaatcgctctctttggtgtgtaatatccaaaagataactcggtatatcagaagtctttttgcagcttctatgcgatctctcagtccacctcccttataatcagagcttcatggtctcgttgcagctaggccttttcttttctaacctttagagtactgattcttggggaatcatattaaactaaaacgagttttattatgaaattcatttagatataattattaatatagtaaacgttattaggtataattttaccatcgaaactaaacggacaaaacctaaaataaatttagtaaccccaaaaaaattgaggaaaataaaataatattttaaagataccggctaagaccaacacatgttttaatggataaagctaggcttggaatttcggcttaacccgagaaaaccaaatcgagaaaaccgaatgtttcggttctcggcgccaacagttaaaagggaggcaaaccgttcggcaaaaatatttttatgattcaaattacggtttggttcggttcggcgagctaaaccgatcggttttctcggtttagaggcacaccatataataaagaagaaaccctagatctacatcatttcatgtcatctcctttctttttctaatcttaatctcttcttctcgcacatccttcttcgatcttgtaattgtaaatttaacaattgagcccatcgttttaaatttagtctacttcggttcgaattaaccgaattaggaaaaaaatcggttaagtttggaattaattttaaacccaataaccgacccgaaaaaaccgagtaccaaacggatctaaaccaaaatttaattcaattcaattcgccagaattttcaagatccaaaaaacccgagaaaccgattcaactgaactgatttaaccgactaaaccggactcccaagcctaaataaaggcaagacatatttctgttcttgatataaccatccccaaatttatgagaaactttttagggtaagaaatttaataaccaacttcttttcttttctttgtcaaacagtaaccaacttctaatctcatgtatactaggtgagtgtccgcgcctagcgcgggattttgttgttgttttttttttgtttttttgtaatatatttagtttatcacacttttttagaaatgttattttataaaagagattatattatgaaggatgaaaactatatatttcttattaagtactgcatattgtttgttaatttttactcataggtagaagattttagtgtgttgacgaaaccgcatagtccagtgctgtttgaatattaacaaacaaaattacatatatatatatatatgtatatatatataatctctttattatgagcctaatttgtaggtatattatatatactttttgtttggtattggtaagttgtaaaggattatagaagagcatcattttagcttactcgtgcatattttaataaatttgattttgtttttaacattcgttttattctctttttttgttattttgtaaaattgtatttaaaaataactattgtttttcaaatgtttgctacttaatttgttcgtattttgatttcttaccccatatatatagttttattgatggatggttaacaattttaacaatatttttgaaactactctatgcaatgattggtaatataagagttgaattttattatatttaaaaattctttgcaacagcaagagatgacaaacatgaaaggaaaaaaaaaactacttgaatttatttattttgaagctttatgatagttcattgcctaaaacattattggtgctaattttaatgaaatgatagttgttgaccaaaactattgtaataataataatttttttaaaaacagtagaaatttattatttaattattgtgttgtgttttggtatttttgtgctttatccttctatcagcctttacttttttaatataccctaaattggtctgacacaaacaaagactttttatgcttcagccttcaagtagggatttgttaatcgtctatcgatctatgttcatatctaatttaatttgctttactgttgtttgacgaattttgtctcctcgaatggctttcgcaattctccgttgtttcttacgatgattaatcgtcaaatctattagttggaactaagccttcagtaaaaatgaaatagggaaatcaaaaaaataaatataaatcatgttttatatttccaatttaagttagtttgtgtatttttatgacaacaaaagagttcatgtgtttttttggcaaatactaaataagttaggttttttctaggaattttctgtaaataaaactaacagcgtttgacgattttgttaacgtcgttaacggtctgttacgacgaagggaagtaatcagaaaataaaatagatcgtgtattttatttctaagctaaattagttagtacgaaaaaagttcaggtagttttctgacagattttaaatagttcgtttttttttatagaaattttccccaatcgcctatgtctataatcataataatttaatatctttaataacaccgtaccaacatatatgaacttcatacgttaaaaaataacttgaaagaatcgcaatcgttataatttaccgtttatttttcttcctatcattttataaaacaactatattttctaattgatcgacacacatatttcagcagctaaatttgttatgaaatcaacatgttagaaaatttgttacaaatttaaggttaatcgtcctcaagaaaatatttaaaaatatagaaagagtgatggttgaagttcttacttatgataggttcatatgttaaattaattactaactatattttacttattttaagaagtttaggtggtaagctctcatgtgctgatctgagttgtgggagagagttgagctactttcatatatatgattagggtaaaactcttttggttttacaaatatgaaggcatggacgaattagagatacgaaattaagcgatcatttttttcagcgaccaaagctcatagattgattgatagagttttaattcttgtaatctttacttgatcaagaagagactatctgtcatcttcgtagactgtgacgaatcaattatttttgtccaaaacaaatgcagtaaaatatgaaacactaaacctacaaatacctttggtgaaaccaaaatttatcaaaacggaggttacaactaaaatgatccaaaattcatcaaaacggaggttacaactaaaatgatttgtgatcaaattagaagaagaagaaaatccaaaaatgatttaatgatctagtaaagcttatatacagaaatcattgggaaattcacttctcttagtatatttttcttactcagatggtgtatatacttgcttatgtaataatttgctttccgagaagtatgtaaagtttgtaatctcaatttgatatcaatgaaatcgttttcctcacaaaaaataaatgaatcccaagttatgttttaacaccaatcaatcattattcaatactctcaaaatcatttcttaaaatgtattatttttaactatgaaactcatctaaagttgtgttaaatacttaccacaaaaaataatctaaagttgtgttaactaatcgtatagtttcttaaagtatcttatcaattattcgtttaaaaaaaaatttggaatgtcttatttttcatcgaccctttgttttgtacatttagtttggtggtgtcttttcataactttcttctgttctgtaacagtgtagtgtaactttctgtttatggtcacattttttaatcatattttaactggttgttgaagaattaaaccccgtaaatggaaacattggttggttaatgggccgaacatgaaagcccaaattagttcataaccctaaaccgaagcaaaacattagctgatagtgatactcttcgtcttcttcttcctccgtcccacctttggaaaagttctcgtgagtcttctctaatgtctgtacatgtcaaggtacataatatattacttattcagggctgctttaaatcttggtttaaaactgatattttccatttcaggaacctgtttgtgaaacttgtggcgacataggttttgaagaagcacttgtcttttgtgactcttgtaagattgagtctatacaccggtgagttcaattctcgatttctcctatggtttgattgaattgtgttgtttataacctatttcacttgttctttagctattgcataggcataacaccgactccttttacggaatacataacttggatctgtgaggattgtgatgagagtgacagtgattctgattgtaaagaactggatcagactgctaagcttacacatatcttgaagaagagtgacaaaaagaagaagaagaggaagaagaagagtaaatatcttgataaatatattttaaaattacgtctgtttattgtaactcttcgtagaagtattactaactaataaatgtgtttctatagtctcttgtttgattatctttttaattattcggttttaacaaaaaaaattatgatcttttcaatttagaagttcatcttatttttatttttaacaataactaaacaaaaattatactcatttatgatggataagaaaaaaattgttaaaattttccataatattctaaacatccgaattcacaataatttttagcgtaaaagaaaacgtaattaaccaaatctaagcaatatagtattttatttaaaatgaatttccttagatttcataacctaatttaattaaaaaaaatcctaagatttcataacctaatttaatttaattttggttgaatgtaagtgaaagacatcaatttaaatcataagattggtgtgttgaaatgaaatattttgaactagcaaatctttagttatacacatatattttcttttgtcacttgaaattttattataaaaacttgttgttgaaccagagaaggaatacatatgcccaaataagggaaactcaagtcggcagacaactaaaagtctccgaagacattgccggggcaaaaaagaaattccccggaaaacaaaaccctattgaagggaaccagagtaaaatgaaactggaaatacaatgcagaaatgatcaaaacacaatcgaaagaggacgactcttaaaactaaaagcagaggcaacaaggcaaaaaccttaagaaaactgatagaactaagagaacagagaagcctcttcttcttttgaaagaccagcaaatgcgacttatcacggctgcccacggccaaaccagaaataatatctaccacctcctatcaagttgagaaccaatctctcgagaaccaaggatatcagaatccgccaagcaaagagcattcatagaaactcatagaacctcgaaaacacttctggatgcgacgaagaccgaagcgtcacttaacgtctagctagaatcctaaaaaaagtgatcagatctaaacagatcttgaaagcagggacaaggagtgaggcagaacctctcaaaaatcaccattcttcgaatgagagcgacaaaggattgagacagttaacaaacaccaaggagaagaaaactctgtaaactatgaagactaccgtaaccaaccaataaacacgaaacttctgcttagaaaggaagcgatcccaaagggagccaaaggctgagcgagaaatcaaagggagcgaggaaaggcaaaggattaggagataaactacaatccaaaaccaagtaaacttgacggcaaagaaacgttgaaaggctcaagagcagcaacaaactttaaggcaggaaagagcagagaagagacctcattctccgagccatagcgtagatcaaccaaattcggaattactaacatcttctctgaagtcacaaaacccaaaagaaattaccgcaacgaccgcttccacaaacccaaaatcaaaatcgaaacaaaccaaaagacttcctaatcgatggccacaaattctgcactcaaaaactaaacaactaaccctatctagtcaaagaaagagaacgactagaaggtcagcaaaaccgaccagaagataccaagaacccatggccacagaaccgagaacaaccaccgacgagaccctagccaaggcagaatctgacaatggcagaaaattcatcttctacaacccgttgggggaaggagaaggacgctcttgaagagaagaacaccgaacaaacctcactgtgaagacccgtctaactcgccaagcaaactaccttcaacatcgaacaccagaactagaagagggagacaagtctacaacaaaaaagaaagaagcagcaggggccctctcacggctacgatgaggagcgccgttcaccggagagggcgatttgaaatctggagatttttggcggcggctagggcaaccttgtctacagagaaacttttttgttttaattatacacatattatgtgacacatttccaacactaaataaaatgactaactaattcaacaccataaaaactctaaaagtctctcctgtgctgacacgtcacctttttcaagtgttctcagcataacacctcattaaaatcaacagccaattagaacatttcgattaatacacttcatttacgttgaccaataaaaacttactatttttccatgtcatctcatcaacttaacaaaattaaaatttgatataggcctaacccaaccaaactattttcaaaactaaaatttatataaaaacatgggcctaaaattcttaaatataaaacttagacctaggcaaataaaccgaaccgaatgtaccgaaccgaaaccgatgcaaaaaaaaactgaaccaaactgaaaatttaaaaataatcgaacggatattaaattctataaccgaaagaaccaaaaccgaatggatacaaatcaaaatattttaggtaaccgaaaatatctgaaatataattatatttcttaaaaaatattagttatttctaaactaaataattaaaagttatttaatagtataaatactcaaaataccaaaaacatatgaaaatatcaaaaataactgaaatatccgaaaatattcaaagaaaaatagctgaatgtatattaaattttaaaaccgaaagaaccggaacggaaccaaaaccgaaccaaaattttaaaataattgaatggatactaaactttataaccgaaagaaccgataaccgtatggatacgaatcaaaactgaatggataaccgaatacccatgactaagaaaccttatctaaaggtctgactggttgaaacacaacagttacagttgcgactgcatgagtttacgggattggacggtttcatattcaagcgttataaaacattttgaacgactggtttagcagttaaaaattggtgcatttttgagagctttatgactggttaacggatttacgtttaggatatgaaaattacggatttctatttttggtggaaaaattacggatttacgtttttggcggaaaaattacgagtttacttttttggtgggaaagttacaggtttacgtttttctggcagggaaattacgggttttacgttttttggcggaaaatcatgtgtttacgtttttggcgaaaaaatgacaagtttagttttttggcgaaaaaattaagagtatgtttttggcgggaaaattacgagtttatgaaaatgttatcatcatgatgaaaatagtatgataatgatggtgatagtattatgatattatgggaaactcaagtcggcagacaactaagggaaactcaagtcggcagacaactaaaagtctccgaagacattgccggggcaaaaaagaaattccccggaaaacaaaaccctatcaaagggaaccagagtaaaatgaaactggaaatacaatgcagaaatgatcaaaacacaatcgaaagaggacgactcctaaaactaaaagtagaggcaaaaaggcaaaaaccttaagaaaactgataaaactaagagaacagagaagcctcttcttcttttgaaagaccagcaaatgcgacttatcacggctgcccacggccaaaccagaaataatatctaccacctcctatcaagttgagagtcaatctctcgagaaccaaggatatcagaacccgacaagcaaagagaattcatagaaactcattgaacctcgaaaacacttctggatgcgacgaagaccgaagcgtcacttaacgtctagctagaatcctaaaaaaagtgatcagatctaaacagatcttgaaagcagggacaaggagtgaggcaaaacctctcaaaaatcaccattctccgaatgagagcgacaaaggattgagacagttaacaaacaccaaggagaagaaaactctgtaaactatgaagactaccataactaaccaataaacacgaaacttctgcttagaaaggaagcgatcccaaagggagccaaaggctgagcgagaaatcaaagggagcgaggaaaggcaaaggattagcagataaactacaatccaaaaccaagtaaacttgacggcaaagaaacgttgaaaggctcaagagcagcaacaaactttaaggcaggaaagagcagagaagacaaaggattgagacagttaacaaacaccaaggagaagaaaactctgtaaactatgaaggctaccataaccaaccaataaacacgaaacttctgcttagaaaggaagcgatcccaaagggagccaaaggctgagcgagaaatcaaagggagcgaggaaaggcaaaggattagcagataaactacaatccaaaaccaagtaaacttgacggcaaagaaacgttgaaaggctcaagagcagcaacaaactttaaggcaggaaagagcagagaagacaaaggattgagacagttaacaaacaccaaggagaagaaaactctgtaaactatgaagactaccataaccaaccaataaacacgaaacttctgcttagaaaggaagcgatcccaaagggagccaaaggctgagcgagaaatcaaagggagcgaggaaaggcaaaggattagcagataaactacaatccaaaaccaagtaaacttgacggcaaagaaacgttgaaaggctcaagagcagcaacaaactttaaggcaggaaagagcagagaagagacctcattctccgagccatagcgtagatcaaccaaatccggaattactaacatcttctctgaagtcacaaaacccaaaagaaattaccgcaacgaccgcttccacaaacccaaaatcaaaatcgaaacaaaccaaaagacttcctaatcgatggccacaaattctgcacacaaaaactaaacaactaaccctatctagtcaaagaaagagaacgactagaaggtcagcaaaaccgaccagaagataccaagaacccatggccacagaaccgagaacaaccaccgacgagaccctagccaaggcagaatctgacaaaggcagaaaattcatcttctacaacccgttgggggagggagaaggacgctcttgaagagaagaacaccgaacaaacctcactgtgatgacccgtctaactcgccaagcaaactaccttcaacatcgaacaccagaactagaagagggagacaagtctacaacaaaaaagaaagaagcaacaggggccctctcacggctacgacgaggagcgccgttcaccggagagggcgatctgaaatctggagatttttgggcggcggctagggcaaccttgtcgagagggattcttttttgttttagttatacacatattatgtgacacatttccaacactaaataaaatgactaactaattcaacaccataaaaactctaaaagtctctcctgtgctgacacatcacctttttcaagtgttctcagcatgacacctcattaaaatcaacagccatatagaacatttcgattaataaacctcatttacgttgaccaataaaacttactatttttccatgtcatctcatcaacttaacaaaattaaaatttgatataggcctaacccaaccaaactactttcaaaactaaaatttatataaaaacatgggcctaaaattcttatctagaaaacttagacctaggcaaataaaccgaaccgaatgtatcgaaccgaaaccgatgcaaaaaaaaactgaaccaaactgaaaatttgaaaataatcgaacggatattaaattttataaccgaaagaaccaaaaccgaatggatacaaatcgaaatattttaggtaaccgaaaatatctgaaatataattatatttttttaaaaatattagttatttctaaactaaataattaaaagttatttaatagtataaatactcaaaataccaaaaacatatgaaaatatcaaaaataaccgaaatatccaaaaatattcaaagaaaaatagctgaatgtatattaaattttaaaaccgaaagaaccgaaacggaaccaaaaccgaaccaaaattttaaaataattgaatggatactaaactttataactgaaagaaccgataaccgtatggatacgaatcaaaactgaatggataaccgaatgcccatgactaaaaaaccttatctaaaggcctgactggttgaaacacagcagttacagttgcgactgcatgaatttacgggattggacggtttcatattcaagcgttataaaacattttgaacaactcgtttagcagttaaaaattggtgcgtttttgagagctttatgactggttaactgatttacgtttaggataagaaaattacggatttttatttttggcgggaaaattacggatttacgtttttggcaggaaaattacgagtttacttttttggtgggaaagttacaggtttacgtttttctgacaggaaaattacgggttttacgttttttggcggaaaattatgtgtttacgtttttggcgaaaaaatgacgggtttacttttttggcaaaaaaattaagagtatgtttttgccgaaaaaattacgaatttatgaaaatgttatcatcatgatgaaaatagtacgataatgatggtgatagtattatgatattatgagagggtaatgatgatgatgatattgtgttgataatgaataaattgatgggtggatgaaactatttgaaaaaagattgattatattcaatcggtttagagattttgattaaactcaaattgatatcggtttagagatttaagttggtttaattcattttaaccaaaatttgtgggttcttattgcaatctaactcatttgatccatttaaccatttgacccaataacttatttgaagcatcaattcatttgagtaaaaaaaattaattcattagagttcatgggttgagttgaattggattgacccatgaaacttgacctattttgacaaccctaaaaatagtctataaaaaaacaattgtaaattgagtaagtatatttttcaacattatctttcttattagatacttataatagttttaatgtattgatgataatgaaggtcttcgatttttatattgttatataaacgatggtgtattaatgattatcaagattatggaaattttttattttatgtattactaatgtttatttttataatatatatatatatatagatacaaaaaatgttaagtacttccttttgtatatatttgtatcttttaattacttatatcaatggtatttttgttttaatataattgagtaaattcaaaaggataaattaattggaaaaattatgtgagaacgacacataagcatggcattttcgttaatcatccatgaggataaagttattttaaataaatatttctcaattaatatataagggatattggaaaagagagaatataatcatatttacaaaatctaacaacataaaaaacaaactctccagaacaaaactatgaccatggcccaaccaaaatcaatgattaagctggctgatttaaacaaagcgtttacggttatgaatacggaagtttgctgaagcggacgattgtaatttcaagtgtcatgaaacattttgaaccattggtttaatggttcaaaattaaaacgtttgcaagagttatatgattggttaaccaggaggtgctattacggttaaactaaaataacaaaatattataatttataaattatacaaaatataaaataccaaaaatattatattattatgataaatgtgaaatttaaatataactaataataaaattaaattcttcctaattattcaaactaattaaattttatactcaaatatgcatttgcttcataaaaagaacatcatcaagtaatatggaaatgacaaaaaaaaaagattaggacaaattaaaaaaaatattttcaatttttgggtgttctggattaataatattattacaatacttagttagtatcttatcattcttcagtttgggttgatactatgattttgatagagaaaaaaactaacattttgtgaataaaaattaccaccatatattaaagttttgaggaagaagcttacactgaaaagatgacattgttgatgtaatgtgtaaacaagcaaaaaattattacaactaagatgtcatttttgttctttaaggtctaattaaatttatctttgaggtatggttactctcaaatctccaataatcaattcgatttttgtccctatatttttttgtttaagtgcatctattatctatttttttggttcaagagtttatttctgaactgaatgaaatcttagcataaggtaacatcgaagaaaaaggtcaatggaagaagaattttaaagaagagacattaaagatttttgagtttcttcctcaaaatattcaaggatcttatcagatttactaagtgtcattgtggattttaatcaataactaataatcatctgagtacgttttatactcccaataaaaaaatatttaattttcaaattctgaaaaacaaacaaacatagcttttacctttttatgcctcttcaacatatgaatcaagtatgcatgtggaacattaaaaatcaaagatgataactccatataacatattcttaaaaatctaaaatgactttaacctcaccagaattagcaaatggtgattttttaactcttttcatttttagtttcttaatgactcttctaaatagatgttcgtaaagcaaaaaattagcttccaaaacttataaaggctatatagatcttactaaacaaaaataaaaaaatgcattgtgtttccaatcacttttttaatgaatctttttgtctacatatatcatgaatcatgacaaataacattcaatacctacatacatcttaacaaaattatattaaaaaaaaagcccgcgacttggcgcgggttttgccctagtcactttaaaaacatgtaagagaaaaatttaaacatttactgagatatgcatgtgatgtgggagaggtgattgtggccgaagacaattatagattaaccaatgcatttaaaatcccttcataatttaattttaacttaatttcagacgacttcttctcaaaattttatcaaattcttcgaacctaccaactaaacgaaaccctaaattgtttggaattatctttcttttggattttcgtatttttttgaaatcagtatagatgataatttaatcaagttggtaaagacaattcaaatatttttaagatatagacatataaattaatgtaaatcgtttgtaaacatttaattatgataaattgtctacatgttgatagtaaagacaatttagaatattatattacttaaaacaatttttatcaagttagtaaaaaaatagtttaacatcaagttaacatatataaatcgtctttgttagttttcttatttggttaagaaaaaataaaataaaattttataagatataaggacatgtaaaattaatataaatattaataagtttaattcattttgatacatataaaatcggattgatagatttgacacgtgttacgatcatgcaactttgaaaaccatactatatataattattatatgtgatattttagatgatttcaactatgattttcttctcatgaaaatattatgataaaagtcaattttacattatcaataacaaaaattcactatattactatttaaaaaatggaaaatgcagcaaccaaataatatttatgtggttgttgaataattaaacgggaatatgtcattaaaatccccaacttattcaaaatattgatttaaatcctcaagtctcgatgcaacaaaataaatatcaaacttaaattgactttccaaataaatactcaacttttgttgattttctaaataaataccaaaagtttattgatctgacaatattaggcatgacgttatgtaggttaatagaccctgttatcagagtttattgtgttttaacagactcgttaattgaaaacgataacgttttctctaataataaaacattatctttttgtcataacgaatcaattaagtccctagtttcaaatcatatggggatttagggttagggattttgctcggtttaggggtcttagattgatttggggatttattttagtcattacaacacaacgacgtggctctgttgttggaaactataatacttcgaattaataagatttattaatttagttaacagtatttctaatatggccacaacaaaaataaagtatttatttagacagtaaacataaatttaatatttattcgttttgtcgagaattggagatttaaatcaacgttttcaatatgtcgaggatttaatgatattttttccagaattaaaccctataattggagattaatggtccaaattgattataaaataaagaaagaaaaaaaaaaactaaaccttagcaaaattgttaacttctcttcgtcttcttcttcctccgaccttggaaaatctctcgtgactcgctagtcttctctaatgtctttacatgtcaaggtacataacctattgcttactttgataccaaatttcacttagggctgctttaaatcttggtttaaaactggaaaaatctgatctttttcattttcagggacctgtttgtcaaacttgtggcgacataggttttgaagaagcacttgtcttttgtgactcttgtatgtttgagtctattcaccggtgagttcaattctcgatttcccctgtgcgtcgatcaaattgtgcctattaggtttctcctgtggtttgattgaattatgcatatacctatttctcttgttcttcagctattgcttagggataacaccgattccttttacggaatacataacttggatttgtgaggattgtgataacagtgagagtgattctgattgcaatgaagttgatcagactgttaagaagaagaagaagagtagaaatcaaccccttgtggttttagctgaggacaatgtgctccaggaacctttggaggggtctaagagagaagaaagctcatgtagcagaaaacctcatgaattgacttgtttagatggaaatggagaatctgttttggaggctgcagattcatctagtgtgccagatcatagttcttgtactagcaaaaggaaagaagttgatcagactgctaatcttggacatatcttggagaggagtgagaaaaagaagaagaagaagaagaagaaaaagagcatcaatcattcgccaccggttttagctgttgaggaccatgagcttcagggtactaccaatgttgttgaacctgtggaggtgtcttcttcttcaccaactaaagaaacgatggagtctaagagacaagaaagctcagatagtagaaaacctcatgaattgacttgtttagttggagattcggagaccgctaattcatctagtgtgccagagcataattcttgtgctgtcaaaaagagaaaattaagttctggaaacaaacagattcagttagctgatgggagtagttcttgcagagtggctgaatcaaatatgcctctaacgttgacatctaggaactatagagcacaacctatcaaaataccgatatggaggtaaagaaaagaatgtctttagttgtaccgctttgcatcctcacttacttgaattctgatctgttatatcaatttctaggggattgatgtctgttaaaggaggaaacagctgtaccatggatgggattgttgctcatgtatcaagcttagcctgccctaaagtccatgaaacggctagttcattaaagggtcggctctctgctgaaatacttcctaggttggaagtatggccaaagacctttttgaagaatggaggacctaaggatgaaagcgttgccctttttttcttcccttccagtgaaaggtgtacatgaaacagtgatttgtttttctctccctatgcttatgttgtaaaagtatctgaccatttttgtgtttggtttccagtaatgatgaaaaggtttttgattcccttgttgataaaatgaagaagaatgattctgcgatgagatgtgtgcttaatgatgcagaacttctactcttcacatcttatatgttaccaaaggattcttggagtaagtcaaatggaatttgttttgtctgtaatcattcgttttttcgcatgaatcggtaaagctaagagggttgattatcgtttgcagcttttaactcaaagtactacctgtggggcgtcttcaagcctagacagacttctcgatattagccactccaagactcgctacctttaacagtctctaacttcgagcaaggtttaacagacagatggaaatcataagtaggacttaaagtattctccttcatcctttttgagtatatgttagttctttttcggatttaacgcatagatgggtttggttgtccgattgttgatagttagccagatgctgtatagaatcggaaccgagatggcatccttgatagcatatctttgtcttttgaggctttttttggtggatttgtgccactggttagtcaaatgaatgttaactttgaaatcttcctgattggtgaacttgataattgatcttataccttcatagacattagccgtctgagaaaagatgtattcaataatgaaaattctgtcacactttttggtctctgcaatctcagttgcagctggttgtttcagccctttttagtttagtctacttgctcttaagtttgtagcacgaaggtgtagtatacttggtgacgtttcagttttagtacatagcctacgtgctggtgtttaggtatgagatgaactgacaagttttttgaagttgatcataagctggatgcttacagtgatctctcatattacttactctcgcaaagaagttacagagatgatcattgaagtctacttttgttgaaagtctttgtaataatgttttaatctaatatgctgttcatgtggactcctctactgttgtaacaggctggcttgaatataataaaagggtcagttaaaaatatatacatgggagagttaaattaagaatgtagacatgtaaatttgacttttgggtgaaattaatcttgcaaaacgaatattataactatacctctataagtatgagatattcgtagttaactgaaaaaatatatagagcattaaatgcctagagagaatctgccaagatattccgccgcatccttaaaaagtaaaaataaacagaatcgtaatgatgaaactggacatgatttgggttgcgtgtttggctatttattacgccagtatccccgttgcttcaacaacaaaaggaaaaacacataacaataaaaagcgtaaaacttacctttaatgcttagaagataacaagatcaagagaattgaagactcatgtacgtagttaatgcttgtgttactttgttcgacataggtaacaggtaataactagtgcacccatggtttgccgatattgacacacgtccgctaacattacggttatggttgaatatgaacagataacatggcgatggttgttaggctggttcggggagaatggaaaagatgaaacatgatgttatgaacacgtagccaagttagatgggttatgcttggccgtaaagctccgagagcgagacggattcgcaaaaatggttgaagatgtgaaggaaagattgacgctgaggccaaaagatgaagtggaactatcttatcagtggccacagtggctgtgttagaatatgcggaatagagtatgagaagtatgaaaaaatatggagtttatagagaagagaagagccaagattagaaagtgaagttgttacttagattagattggttacaatgtagggaacaacccttttatatagggagacactagggttccctttacaacaaacaaatcgaatgaaagtgacatgaagagagaggagaagacttgatctctaggttgatagtgacttgaccatggtttaggtgaaaccttagactacctgtaactcttctctcttctcccttctaacggctctattcgcaactctagaaggacttgatgggctcaattggttaagcttcttatcttctccttattgaagtctaggcccatgttccatgtgagttgcttgactgatactccccctcaagcttagcctatgatgaattggttaagcttggaacccatgatacattacctcattaaaaaactttaacatagaaaaccgcatgggagaaaactatgttaagggaaaaagagtgtaatgaccatggattagggaagatgatcaaggacgtgtgagatcgacacgcccaagtttgttgtaaatgtgttcacaaaccttgcgacttgccccttttgtaaaaatatccgtcaagttatctttggtgtccgtatagcacgatagtatcattccttcgtctatcttctcatgcaccttgtggcagtccacctcgatatgtttggttctctcatgaaagaccgagttggtagcgatgtgtattgcggcttggttatcacagtgcatagttatcgggcttgatgattcaataccaaagtccttgagaagtgtcgtgagccaagtgagttcattagttagcttcctcatagctcggtactccgattccgcgctcgagcatgaaactatcttttgcttttttgtcttccaagtgactaagtttcctccaataaatgtgcaatagcccgttgttgatttcctatcggtggtatctctaccataatccgcatcacaatacccgactatttcggtactatcgctcttccccatccaaattccttggcccggactccctttgatgtatcgtagaatcctctccaacatgttccaatgatatttggtgggggcatgcatgtgttgactcacttgatgtactgcaaaacaaaggtcaggccgtgtaatggtcaaataaatgagcttaccaactagtctccgatattgagaaaaatcttcatatggttcatttaacggatctattgttgcattattcttcttcttccccctgttcgcttgaccgtatagccatcaacaagaggtgtcttagccggttttgatccaagttttcctgtctcattcaaaagatcaagagtgtattttctttgtgaaagaaataagccctcgagagagcggcatacttcaatccctaaaaaatactttagttcgccaaggtattttatatccaatgtagatttaagttagagtttggtgtcatggataccttctttgttgtctccagagatgataatatcatcgacataaatgagaacaacaatgataccttgatcggattgaagtgcgaagagagtgtgatcagcttcggacttcttgaaccctttttcctttagagtagtactcaacttatgataccaaactctaggagattgttttaagccataaattgccttccgaagtcgcaaaactttccccagagcaatggaatcctctagtcccggtggtggagtcatatacacttcttcttctagctctccttgaagaaaagcgttcttgacattcacttgccataagtcccacgagaggttagtagcaaaagatagaacaactctaaccgtgtgtagcttggcgacggggtcaaatgtttcagtatagtcacgaccataagtttgagtaaacccgcgtgctacaagcgggctttatgcctttctatctcacaattactcaagtactttatcctgaagacccattttgagcttaccgcactcttcctctgaggtaactcctcttcatcccaagtgtggttacggatcatggctccggtttcatccgccaccgcaatcatccactcttcactctctttggcttcctcataggtttgcggaacgaagttttcttctatttttcccagaaaagcttggtgatcttgtggcaagagggcaagagaacacactgcttgtatagggtgagctaccgccttattgttgtaatacaagcgggaagatttcctcttaatccgagtacttcgtcttaaagttgaggtagcttgtcgaggaagttccgactgaatggtagtggtatgttggtcggttaactcttgagcacttacatcttcatgttgagtgagaatatccacatcatcatatgttgggattccactaacgtctccatcttgttgtaggtttggggtttcctcttgttcatggtcttgatcgagaacaaccggttcttctaccaagtctcttgtcttgatttctctttcacttgatggagtaactccaagatgatcaagaagaaactgtaaacttgtagcacgatctgttgagggtgtagaaagatcggccaagctattccaatctttcttctcgtaatatcctctttcttcaaagaacttcacatcccgagacacatacagacgttgattaatgggatcataacacttgtatctcttttgagttgttgagtatccaatgaacatgcatcgagtactttttgcgtctaacttgtttctttggtcaccggatactaatacaaaacatacacaaccgaaaacccgtaagtgatcaagagagagtttggttttgttgagtacctcaaatggagaaacgtcttgtaggactttggtgggagttctattgataagatagcatgctgtcattacagcatctccctaaaacttcttggtgacgtttgtatgaaacatcatcgatcttgctacctccatgaggtgtcgattctttctctccgccactccattttgttggggtatgtaaggacagctcgtttgatgaataatgccatgttttgcgaggtactctttgaatttgtgacttgtatactctccaccattgccggatcttagtaccttaattttagcattaaagtaattagtgacatagttttagaaatttataaactcatctatcacacaaatttttagattgtaacaatgtgatccatgtatatttagatttctcatcaataaaggtcacaaattacttcttattatccatagatatgcaaggaaacgtccaaacatccgagtgaactaagtcaaaacaattttcataaatagtcaatgactttggaaaaatagatttgtaatgttttccaagaatacaagactcacaagtagagttatcaaaggaaacattccgcaacattaatataaaagcacgagcatgagggtggcctaatctagcatgccacgcaacattcagattactagctaaacaagaattaagtgaaactgaagtacaatcactcaatggggttttctcaaacacataaagatctcctttagcatctccctttccaagtacccttctggtcttaatatcctgaaaatgtacactactaggaccaaatattgtatagcaatttaaatcgttagtagctcttttaaccgataaaagagttaaagtaaagctaggcataaagagagctttagatttcttatcaaataagtttaagtctcctattccttttaccggtactttatctgcatttgctataactacattacctaaagccagttttatgctgtcaattagactagggttgtttatcatgtggtgagaggcacccgaatctatgacaagcattttactcggttcagaagtaaagaaagatgtatcagattccttaagcgttttacttggttcataagtaaagaaagaggtaccagattcctttaacgaggcaatggatcttatgagagcctccaaatttgacttcctcaccacttctccttgatcacttgcaacttcttgagatatgtttgcctttaacttagccggcttgagatgaggatgaagaatccaacatttgtccttcatatgacccttcttcttgcaatgatcacacacccatgccttcctttcctcacttttgtagatcccttcgtgagccgtgagaagttcgcccttacccctaaatagtctgagagatccttgttccttttgcacttgggaacaaacattttcaagtgagggaagtttgtcgactcaaagaaggtgtttgatgaggtcattgaaggcatgattgagactaaggagaaggccaaatactttgtcttgttcctttctctcgttaagaatggccgaatccacagtaattggtcgaagcatctcaagttcggcccatagtgaccgaaacttcccaaagtgtttggtgaactccaagtcttcttgagtgagattgttaatggtcttcttgacttcaaagacccgagtcaagtttgacacatttccatacacattctcgagcgtctcccacagttcacgtgcagtttcacagtatgagtaagcctcaagaatggagctctcaagcgagtgttgaaggatagttagaacgttatgatcttcttgaaaccacttggcttatttctcgatctccgcttcttcttcttccctgttgaacccttcactgccgtcttatttggtagcttaaactgaacatgtttggtctcaacatggctccaaatccctcgacaacataacactgtttttgtagttctcttccataggagatagttttctcccttcaagatcgccggttttggagtctccatgatgagtgcactcttttaaccgttgggtaatagagtgtttcttgaagagaaatgtgtagatttaagaagtagatagaagataagtagaatagagtaagtagaagagatttagcatgttaagaatcgaagaacatgctctgataccatgttagaatatgcggaatagagtatgagaagtatgaagaagtatggagtttatagagaagagaagagccaagattagaaagtgaagtggttacttagattagattggttacgatgtagggaacaacccttttatatagggagacactagggttccctttacaacaaacaaatcgtatgaaagtgacatgaagagagaggagaagacttgatctctaggttgatagtgacttgaccatggtttaggtgaaatcttagactacccgtgactcttctctcttctcccttctaacggctctatccgcaactctagaaggacttgatgggctcaatgggttaatcttcttctcttctccttattgaagtctaggccatgttccatgtgagttgcttgactaataggctgatgggcccagataattggcagcgagcaaacccgattcatattctcgatgacgaggatatgacattgttcatggcgattcaggctgattctgagggggttcatctgaaggtcaagaccatacgggggtgtgtggggcccgaaccgttaattcataccgtagcggcgtagatatcggtagtatgactgcataagcgatatctgataactgctggaatagcgctgagacaagagcagccaaggattcagccgtaacaaggatgttattcggtaatttacctactaatggcgcaatagcgtttagaaacaagacaagaatgttttcggaagccacattggcagactggggtaggaagcatcgtacctagaagcctaacccaaagtcaaccaattgcaaccgctaaagggaaggaacatgtcctagacaaggagaacataaaagacttggagtttgcattgtggaggaaaaaccaacagtgagaaatgctaaaagagatggaaattagagaaatgtgtctggcaatgctgaaggaccagtcggtaatacacctgctaatgctcgtgatagcggagttggagggcaaacaagtacaaatccggagaaggctatacgtcttactcttggaagcacataaatagctcgtgacgatgtttcaatagttgtgttatcatcaacagactcaacatttaagacaccatcgaatagcggaagcttttcaagtgacgaggtgatggactgaattatcaagcaacaattgtcttattaggataggtatgttatcagataataatcgggtgtttatagtagtcaacttcatcacgataataaagtgcttaccgacagcaacaatattagtatgatggtaacaaaaatgttatcgagttagtgtcaacaaaaaggtacctcgcatttggcatccacatctttagcattgccaagcttgagggcggcttcttcatcagattcagattcagtaccagcaacctcatctactatatttgagggccttcctggacggcggggctgctttcaaaacaacaaggtacaaagcgtatagaagaccttgaaccgccacacacgtagtggcgagctgttcaagttccctctcttgaatggaagtcagcatcatctcgaaagacaaacgcccccatgggtaagacagaaacccctgcagatcctcagctatttcggcgtgatctttcgctatttttggatagtaagaggtaggcaacaaaaaaccatccacaagagccaaacaagcatatcttaaccttatttctctatcagttaccacccttttttaaacatggtaataactttatcaacagtaacattttcttcgagaccaaacaaggaattgtaataaggaatctgcttcctagctgtccctttcttttttttttttggaccgccagatactttccacacggaagccgagtaacgaacttgaactctcttaacaaaaatcggacaggagtaccagcgtacacttcccagatttcattaggattggcaacttccaattgccgactccgtaagaattgaccaaaactcgcaaaaaaccccgacttgttcggaaactccaaaagccgtcccagcaaaatatcgccaatgaaggaccgcttttgatcatcaaagacgtttataatgccgcatagggttttgattttgtggtacacattaacctctcgccgagagattcttctccaaaagcaatcaatcgatttggtaaatcaacctcccccatgtgcatataatacaaaaaaaaaagttaaaaccattgactgactacaaaaaacgaagatgagaacagataaatatagagaaaagggcgtcgacgcttcatttttctaataaaggtcaattaagttcattattaattggatcacacttctccaaatcaaatctcttaaaagattatgttcccgtctgacacaatactaggctagcggtaatgaaaatttcaaaatataatataaggatacaatggtatttgcaagatgaacatagaagaaaaaacagactgttttaaacagtaggatttcaaaggacttaatttgacagtcttctgagtacatgaaatgataatatccatctataatttttatttggccaaaaaatagttctaaatttagaaaagttttttttggctaataaaaattctaaacaaaaaaaaataggtttccaatttgtttctcaattctagaataaaacggtttatctacctacttagattttcaaaattagagaaattaattttttccgaaattggagaaattatattttttttccttcccgacaatatatttacaaaaatatctcaaaacccttttttatttattttatttattttaattatacttgttaaaaaatacaaactttctattttcgacgtaagtatcagtgttgcaaaggaatccttgttagggctggtattggaggagtatcagtgttgcaaaggagtccttcttagggctggtattggaggatatatatatgcttgctcgagttaaccaaccgactaaaaatttcttctcccgcaaatttcaggtttgatgtaccatttttttaatatatattttttttttcgaacaaagaggacttgctatctttgtaatcatcttgacccctaaatatattttaatttatattaaaaaaaaaaactttttgctgtgatagttacaatgcttagttcaattacaattcagattaagctacataaaccttttatacgtaaattaacatgatctagttaaaacgctttgcaatgcattaaggtgaaacattcatgccatacatataactgttcatgctgattttcattctttatcatctcctgcacttaccataatgccaatacatgcaaagatcaatttaattagcctatcaatctatcatgccactattattatgattcaatttatttgtagtcctaatcgcttgaattagcaaataatgccatatacggtcattatttatgcaactattatttatattcagttacaatcaatcatgtaattctttgccttctgactttagattgatcattagttaactcaactcaagtcatggattcaacatcaatcgaaatccagttgtattaatttcatgaattagcagtcatgccatgcataaaccacttaaccacattcatgtgatcactttggccaatatgcagatccaatttgcctcgaccaagaatttcattacaaattcattattacacaaatatcacttgttccttttctcttttcagtatctttttatttttgaggatatttaatcttcctctattattatgttttttttaaaatcagtttcttaaccaatattttaaatactaagggatttgaatcgctgatctcagtagtaaacacgtgctacttaagtgtttgtgttacgtgtatattttttttttggttataatcatacccatattataacagaaagttggtttcagtatcttgatttgttttttttttcctctaaatagtagtgaattattttatttctcctatcttcaattgagcaagtcgttggtggaataaacctcaccaaatgagactacagaatgttttatacttaaattgtttatacaataaatagaaatatactaacaaaagtgtactatatggttgggagatttttgtaagaatatttattgctaaatattggaagatattttccgtctaaatttctactttattggataagtcgttggtggtccataaatcgttttaaaaagaaataaaagaactttacaaactacaagattgtagtgacgtatttaggaaaacccggttcaatgtaggcggtgattggctaaattagtttgcattgctgcaagagttaagtcctgagagatgatgatgttaaaggttccttgggaaaccaaataggataatacttagaagccacgtgtgtgtgaatttctgctaatattgcttttgcttggtttctatacggcaatttcaggttgattcttttactctttttttttctgtatttcttacatatttgcagctcatttattatattctaatattttataaagaattaaataaaatatctgttatatttgatctgttatttttattttaattcgatctgaaaataggatatctataaatgaatactgataaaacaaaaatcacaaataccaaaaaacttaaatatatccgttttatatacattctaattcttgtaaaaaacgtttccattcttataagggaataattttgattttgtaatctgaaaaaatgacaaaatctattaactatttaaaaaagagctatccacataaaccattcaaaaatgctaaatctataattgattacctggataatttgaaagtcaacaaagtctgtatccataacgaagatcaaaataacctatttacttttctatcatcgttcttaaactaatacacttaggtcattttcaaggggattacaaaactttaaaatagaatagaaatgtttactttttctctctaactaaattgtagaatttacattattatagtgtgattcttttttttttaacaatatatcactatatttggtgtgttattgtaaacaactgcaaaaaataaaatattatttccttactatagtatattattatatattaaaaagcctatttctgattaaaaaatgatttatattgctatttaataatcaaaaataagttttataactaaaattaatgtatcaaactaattttgaatttaaaatttttattttatgaattattaattactcggttgtatttaaattaatacataatttggctgaaaatacataatgaaattcaattagccatttattgtttgtaatttatattaattaatgaattacaaaactattaaataataaggagaagtttttgttaagtaatacaataatagaaaataataattttagtgtaatatttggtgttgtggttggaaaataaaaaaaaatagtgttaaagttacactaaatatagtgttatttcttatggttggagatgcccttacatactctaaggtttgtcactgtgtttaataatgtgtatctctagcatttgcattgtgatgtgacaagtcctagtgaccaacttctactttcataaccttagagtgcacatttttattacatataacaatgggtttgaatggtaaccattgtcatagcagtacagttttgtatagatttgacagttaccaatcacaaaagctttatcaaaaatgttacataaagtttttttgtacagctttcttgtacatctcattctaacagttttgcattataccgataaaactaacagttccaactaacagctaaaaagtttatacagttttttgttactaatcagacccaatatgtatctctaacacaaattaacatatttactgcacaattcatttgacttattaagctcatattttgactcttcgcttataaacgagatttcttgccgatgaatgatttatatatgaccagctagttttttttttctaactacaaacaacacaaaatgatcatattaaccacatgtattatgagggattgaatagtgatgatgacataatgataagagtagtacaaatctatgaattacatattatggtttggaatcctaaatattaatcagaaaactaaacaagaaaaaaatagtatgaaaattgaaatggttcttggtcatagaaacagacaataaattaaaataaaagttggaaaagaaaacgtaaaataaaagcaccaccgctaaaaccaagcattaacagaaaacctcccgagtaatagattaaaaaagtataatattagtacgagaaatgttttgctgcttatacatagtataacaaagtgcatgatcacatatgtatactattatatccctacttatggtatatgaactatagaacacatgtatactgttatagagtagaacccccccctcccccccccccccaccccacacacacacacacatatgaaatacaaattttttatttaactatctaattatactgttatagagtagaaccccccctcccccccccccaccccacacacacacacacatatgaaatacaaattttttatttaactatctaattatatgtgcttttaccttatatatttaatattttaaataagatggagtattatgtatcaacaacactaaacaagcacatattaaatacaacacaaatatccccacaatcaaactaaacaatcacacagatacagtaaaaaaagtgtccacattaacaataatgaaacagcttaataatacaccactaattaataagcattgaagaaaaagaaaaaaaacaaatatacaataaatctaaaacaagaaatttcagtcgatacctagttcagttgcattgcatataaatcgaaagttgagatatcaaaaaaatggaaataaagaggagataaaaaaatgaaaagaaataggactgatcagaaaagtgggaattaaataatagcaagaaacgtagttttacttattaagtcggttctccattcataaatatttctttgtttgtttgttaaaatgttgcaataattttgtattattttattttacacgtaactttatttattagagtgaaaaacttcgtcgagaagaagtgtttgtctataaataacgttacgaatacaagtacacaaggcacataaacaaagagcggaagttaaaacacagagagcgagcctccacaaaaaaagaaagagagaaagagaaatggtgggaggtaagtggcggttcctagaagtagcagtcgtagtaatggtgttgcagtggtcgtgcgattataatggtaatttagctgaaggatttccagtacaagatcttgtgacaaagctgcctggacaacctgaagtggcattcagacaatttgcgggctatgtcgatatcgatgtcaaagctggtcggagtctcttttattacttcgtcgaagctgagaagcaaccccactctaaaccgttaactctttggctcaatggaggtttgattttttgaccctgtctcttgtttttattgtctaacgtttttctttaaaatttgtttttttagataagggttttgtgcaaaaaaaaaccctctaactcatccatttttgtaattttatttcccactttcaacaaatgtagattaatcttacaaaatctaaaataataagcaatatgacccttatatatatattataaacttttttacggtcacatatacattgcacttttaaaattttaaaaggtaaaattaaacttttcatcgcgagggctttgatttaacactatatgtcaatatttttcaaaattgatggtagtaaaaaagagcgaaaaagttacagcgcgtattattttagacttcaaaagattaatctgcatttttcagaggcggatggtaaaattacaaaatagatgagttagtggtttttttttttcacaaaaccctttagagaaaaggataaacttgtataatttggtttaaggttttgtgttggtttgtctatttatttcccccaataacatgtaatatacagatttgaactcggataatgactatgtgacatcactaatgcaaattacaaaaccacaaaattttgcgaaattatcaaatagtatatttagttacatttatatatattgcgagttagaattatataatttttataaggcctcctctaataaaaacagaggaattattgcaggaccaggctgttcttccataggaggaggagctttcacagagttgggcccattttaccccaccggagatgctcgtggcctccgcagaaatcccaaatcttggaacaaaggtttctcttcctaactaatagtatattttgtactgacttatgttaagtgtccttaactatgacaaagtttgtcttgttaacttaattattgtgatgtagcctcaaatctattgtttgtggattcacctgctggagtaggatggtcttattctaacacaacttctgattacaccactggcgatgaatccaccggtatactctcaaaagattaaatcattttttggtcattatttttaaaactaataaagtttcttgaatgatgttttcaataatagccaaggatatgttggtgttcatgttaagatggttagaaaaatttccacaattcaagactcgaaacctatttctcgcgggcgaaagctacgcaggacactatgtacctcaactagccgatgtgatactcgaatacaacgcacaacggtcaaatagattcaagttcaatctcaaagggattgcagtaagcaataagaaccaaaaagaataaaacaagtccttttaaaaaatctctattttgctctgtttttgattaactcctatgcttttgatcagattggaaatccgcttttgaagcttgaccgcgatgttccagcgatatatgagttcttctggtcacacgggatgatctctgatgaacttggcctcactatcatgaaccaatgcgactttgaagattacacattcacagattcacacaacataagcaaactttgcgaagctgcagtgaatcaagctggaaccatcatcactcaatatgttaattactacgacattctcctcgatgtatgctacccgtctctcttcgagcaagagcttaggctcaagaaaatggtaagaaaaaaaggaaaactagtttgcccccaagacttctactatttggttgcatttacatttacatttggtaggaacatttagatattattataacataactttttctcaaaacaaaaccacaaattgtagtattttggacatttattttctagtgaaataattgaaggcttaaaatatattttggctctgattgctaacatgcataatggcataatgacgttttctaatgcgattttgcagaaaatttgtcaatcaagaaaatctgcataattgcattagaaaacgcaaaaacgcagactctgattatgttttaattcaagattagtttgattatgttttcacatgaaaatggaaaagccgacattttaaatggataaagatatacagcctaatggtttctgctagtaccatcgatgcgcaaccatatatgttcaaacttcataatattgttgaccaaaaaaaacacgtcaaaaatgattttcagggtacaaggatgagttttggggtggacgtgtgcatgagctttgaagagcaattgtatttaaatcttcctgaggttcaaaaggctctccatgctaaccgaactaaactaccgtatgaatggtctatgtgcagcaggtatagtataacttgaaccatctctaatcttaatctatatgtcatcatttatttgaactcttaaggttatgtttcatcatcatagcctcttgaactacaaatacactgacgggaacgccaacatgcttccaattcttaaaagaatcgtgaagagcaaagtccctgtttgggtcttcaggtatattgattccattctttagacccttaatttctttgttcttctactttagcaatctggtggtaaacgtttaaataaataaaaagaaaaattaattactcagatatcaaagaaaagtatgtttatttttagaatattatacatctttttttaattactcatatgtttctagcatttgtggaattttactcagatgtcatacaaattaggtgtatttaccataaccttacaaaacttttttttattactgcagtggagatgaagattctgtaattccacttcttggttcaagaactttggtaaaagaacttgcagatgatctcaacttcaataccacagttccttatggagcttggttcgacaaaggacaggtttgttccacagaaaaccttatgtatgctctgcacttggtttgaccattcggtttcgcttggtttcggtttcgatttggtttggttttttttttagtataaaaagtggaaaaataatctaaactaagttatatattttatgtgtaataaaatgtattttttggttaatagtttagtttataatgaatcttttaatagactaaatttgttttgattttaacttcgttataggtgtaagaaaattactaccgttgttttcatttttaaatgtttggttcggttgcaattttttttttttatagtttgttaggttttgtacttaaccccttattgacgtttacgtaggttggcggatgggtagtagagtatgggaatctactgacattcgcaacggtgagaggagcggctcatatggtgccgtactcgcagccttcacgagctttacatttgttcaccagctttgtgcttggccggaaattgccacacaagtcgcctcctgctcttcatgattgaaggagaaggcttctccttttaattatcttcgttggtcatttttctttctttttttcgagattggtttggttgtttcagttgtgaacaatgatttgaataatattattaagatatatatggtgtagtgtcataaatattctgcaaaagaaacactaagaataagatctcacaatgctctttagtttcaaaaatcaatgttggaaactggaactatagaaggatctagaatatgtttttcaagaaacgtatagtatagttgtgaaaggctcatagtgtttaaactaatcaacttgtacaacaataacgtatgggctaagtaaatacaatttgaggcccattatggcccaataatattggaagatacttttttttttgtcgttggaagatactttaaatatatttctgaatattactaagatctttacgtgtaactaacttgtaagcattgttgaaaattgcttctcctgaagtttcgtaagtgttggagtatttctgctttcaacttgatcgattagtgacttttaacttaagtattatgaatctacccacgtagtatattaatcacgaaatctagccacttaatataaaaactatcgtttgtatttcgactacctaaatctgcatatatatttttagttaatttgatatgtttacaaaacatcatagcatcaattatgcaatctaggaacgttttgttcattaaagttatgtcacacaataatctgacacatttgatgtgttaattccctaacatcaaaagctaagttaacaatctacctccgtaaaatctaagctaaaaaaacgatattttttattaaacgcgttttttggccgcttcataacattatttaagactatccccattggtcatcaaaataaagggtttttaaatataaaattaataaatataagaataaaaaaggaatttaaagaatcaaggtgagatatgtgtcttcctacaaacatttaagaccttgtaaggtttgtttaaagacccttctctatatgttttctttttaatgtttagtttgtttttgatatttaaatattaaatattttggttttgagaagttaaaaaaaatagttcagcaatgaggatgctctaagctaagtgaactatattttcctacccatttataaagaaaagaaaacaatttaaacttaatttaaaaaccacaaaaatctgttcgggtttacagttttaaaccaaactgcactaatatgctaacaaaaccgttttgaaccaagagagtgttgtactgagctgaggcttgtcgggaagcctgaagccaccatgaaaaaaagagcaaaacctaaaatcaaaaataagcaaaaagactctgattctgacttttttttttagcgcctccctaaagcctaataatacgaactttgatttttgttgactactagttgtagtttgaatctgatcttatagattttgattactgatgattcaatcacaacaacttacgaagtttttgaacgtccgtctaagctttgaatcgtttttagggttgccatgagaaatcttgagcagcaaggaacacaatctttgaactcgggaaaatacatccaaattgatctcctcatggatatattttctcgagttccgcgacgactatagcaaggtttccttgtgtatctaaattatggggatccatactttgccgtcaagattttactgagttgttcttgaatatgtctttgactcgttcacgcctgctcttattaaccttccaagctgaaaatgggaataaattcttcttctcttcacatctgcctcagaatccagatgagaacacatctctttgtacccacccacctgttatcatgtttaccataagaattctcctagagagttttcatctgaattggttctccctcttcgtggactcaattgttgccgagataagggaagtctagatactatcattatttataacccgatcacgggagagtctctatccttacccaaactggaattgaagagatttcatattgtgacaaagccttatttaggatatgatccgattgagaaacagttaaaagtattgtgcatcaagtttagtgaaatcccgagtactgttgatgatcatcaagtgttgacattgaagaatggaaaacatttatggagaacaattcaatacaaaccccattatcctaaatgtaatggaatatgcttagatggttttctgtattatacagctcgggtcgataggtggatgtgggattccaaaatagtttgcttcaatgttaagtctgagaagtttaggtttattgacatagatggatgcatgttgatgactcattcttgtactttgatcaactacaagggtaaattagatgcacttcagtttacatttttgggtcgaagacaacttgagttttggattctagaagatgctgagaaatgtatatggtccaaagatatctatatattctagagtttaagaaagattaagaacatgcacgttcttcatatactttcagccgaccaactatgtcatcaaaagttatggtgttaagatctaagacttgttctagtgcaactactatgtgaatgtattttcttcgtggaacactcttaaagaacttcttaacaagtcttgattcttcaataattacacctaaagcagctgattttgctgagatctcagataacttgccagcaaagtcatatattttctcagaatccttcattgttaatcggtcaaattcggccatgagggtttgtaacctagcatccttgactctctctacccccacatgtcttgatttgatcgcatcccatacttctcttgctgtctcaagttctccgatttgtaaagctaatgcttcggggattgattgaaacaacaaagcacaagcaacatcactcttatcttcatcaaacggttctgtcaccttgtctatcacgttccaagctttatgaacctttagtgccctcttcatcctcatggcccataccatgtagttgataacgtttagcataggacattggattgaataggatccgctaacttctttcgttgttctagctgcgggaacgatatcactcatttcttcttatgattgattcaatagcctcaagctctgataccaaatctagagtttaagaaagattaagaactcaaaatataaagaattactctctttattactttaggaaaatagctcaaaacctaaagctctcaatctcacaatcgctctcaaaagctcataagttataccacacattggtatctccttatataatagagattcaacattatcctaatcattagataactcctaatgaatattctagataactcctagaattacaaggaattccttttctcttaaataaataaatgacttattcctttaagtcttcttcaagcttaatccaacattctcccccttaaccttgaactcgctcttctccaaatcttgaacaccaatgagactcctcatcacttgaaacttaactcttccaagtgccttagtcaagatgtccgccttttgtatgtctccgggaacatactccacctcaatgtgtctattctcaacacactctcttatgaagtgatatcttctgtgaatgtgtttgttgcgcccatgaaacactagatttttcgttaaagcaatagccgacttgttgtcgattcgaactacaaccttctcacacggtaaaccagtgacctcacaaagtaagtcttgaagccatatcacctgtcttgctgcttctgttccagccatgaattctgcttcacaagatgacatagccacaatatcttgcttctgtgaacaccaagaaatcagacttgagctttctccaagatagaatatgtaaccagccgtgcttcttccatcatcggggtcaacattatgactacgatcactgtagcctaccaactttggcttggcatcgtagaagtgaaacgcccatatgttaaaccaagtgtagtggtgccttttacataccttaaacattgtttcatagcagctctgtgagactcctttggtctttgcatataacggcttagaattcgtacacaatagtttaagtctggtcttgtatgtagcaaataacgaagacaacccacattctttctgaatctcgtggcatcaatatcattctcttctgcagatttgcttaattgtaagcccgactccattggtgtgtgaaccaagttacaatctaacattctagcttcttctaagatacgtttagcataccggtgttgagttagtgttattccttcttcatgttgacatacctcaatttcaagataatagattagctttccaaggtcactcatctcaaactttgatgacatctctcttttaaaatcatcaatgatcttggtgtttgttcccgtaacaaagagatcatctacatacacagccactaaaagagtaatattctcacccattaccttacgataaaccgatggttctttagaacacttttcaaacttaagctccttaagaactcgattcaacttattgttccatgctctcgatgcttgccgcaaaccatacaacgctttgttgagtttgtagactttatcttcatgacctttctccttgaatcccttcggttgagtgacgtaaacagtttcctttaactcaccatgaaggaaggctatcttaacatcaagatgatgtatctcccaaccatttgacgctacaaggttaacaaggagacatcttgtttcaattcgggctacaggggcaaacacttcctgaaagtcgactccatatttctgcacataaccctttgctacaagtcgagccatatacttattgatgcttccgtctgagttgcgtttaatcttgaatacccactttaaaccaattggtttaattcctagtgggagttccataagattccaagtatcgttcttagtgatcgaatgaatttcttcttcaaatgcttgtatccactctttggattcttttgcttcattaaagtcaaagggttcatgattcagacataacagaagtctctctccctcttcttctgcgagcagcacataatcatcgagatattttgacctaaaactttgtcctgttgatcttcgcaaatctggttgagccacagcttggttttctacttctgttcaatcgttgtctaatgataactgaaactcaccatctttgtcattgtcttcttcagagttctcgacatgtttagtttcctctgtttcagcctcgtttccaatcccgtgatttccaaactgtccaagtgtgagaatgaagtttccgttgtgactgtgttccatgtctctatggttccaattccaactctttgtctcatcaaatacgacatcccgacttactacaaccttttgattcccaggattaaacaatcgatatgccttagagcccggttctatgcatagaatgaactagaatccgtgatctatcatctagcttcttcaagtgtggtgtttccaccttcgcatatccaatacagccgaatatcctgagatgttcaatgtttggtttcttcattcgaaaagtttcatatggagttttgtcttgtacagatcttgtagctatcctgttcaacaagtacgtagaatgcctgattccttctccccataaataatttggcacatgcatgtgcttcataatacttcttgtcatttctaatagggttctgtttcttctctcaactactccgttctgttgaggggtgtatggagctgtaagatgtcgctttattcctgattcttgacataaattgttgaactcttgtgatacgaactctcctcctctatctgttctgaaagtttgtattcttgctcctgactcttgttccacgagactcttgaactttctaaacttgttaaaagcttcactcttttctttcaacagaatagtccacatgtacctagaatgatcatcaatgagcacaaatacatacctatttcctgcagcggtgcttggcgttataggaccacatagatcaccatggactagttcaagaatcttggcagctctaaatagagtggcttttggaaacgcaagtcttgtttgctttccaagtaaacatgagctgcaaagttctttttttatgcttccaagtgagaatccttgaaccaactccttttgcatcatcgatttaattgtatcaaagttcacatgtcctagccttgcatgccatctacttgattcacttattgttgttaagtgcaaacgtgtagctccttttattcccattcttactttgtaaagatgattcttcgatctacacgctttgacaagtagtttcccatcacgatcatgcatcgttagttgatctcctttcatcgtaatgttgcagcctgattctgtagcttgtcctaaactgatgatgttgctcttaagatccagaatgaaatagacattagatactttttgttgatcaccgtttccttttatgtcgatacgggagtcatctctgaaatgtactttgcctgaaactgaatcatccaatgttgaaaataccttatatcccctgtcatatggtttctagctccattatctagataccatatgttttcttcttcggtgtttgcttcatacatgcttggtacacaattcttctcattcaaaaatatcacctcatgcatcatgagctcatccgcttcatgtgtctcttctttgtcatgttcttgcgtttcctgtagctttaacaatcgatcaagacatgttgaagcgtagtgacctaacttgtcgcatcggaaacacattactcttgacgtatctcttcctccatatgaacgtccacatcctctccctctttcatatcctcttcctcctcgacctctgccctggaatcgtttcctggatctcgattgtttgagtaacttccttgagaatccatatttgaatacagaagcttgctttggtcttcttgaggatcatctccatcaaaaacatgcacgttcttcatatactttcagccgaccaactatgtcatcaaaagttatggtgttaagatctaagacttgttctagtgcagctactatgtgaatgtattttcttcgtggaacactcttaagaaacttcttaacaagtcttgattcttcaataattacacctaaagcagctgattttgctgagatctcagataacttgccagcaaagtcatatattttctcagaatccttcattgttaatcggtcaaattcggccatgagggtttgtaacctagcatccttgactctctctacccccagatgtcttgatttgattgcatcccatacttctcttgctgtatcaagttctccgatttgtaaagctaatgcttctgggattgattgaaacaacaaagcacaagcaacatcactcttatcttcatcaaacggttctgtcaccttgtctatcatgttccaagctttatgaacctttagtgccctcttcatcctcatggcccataccgtgtagttgatagcgtttagcataggacattggattgaagaggatccactaacttctttcgttgttctagctgcgggaacgatatcactcatttcttcttatgattgattcaatagcctcacgctctgataccaaatctagagtttaagaaagattaagaactcaaaatataaagaattactctctttattactttaggaaaatagctcaaaacctaaagctctcaatctcacaatctctctcaaaagctcataagttataccacacattggtatctccttatataatagagattcaacattatcctaatcattagataactcctaatgaatattctagataactcctagaattacaaggaattccttttctcttaaataaataaatgacttattacttaagtcttcttcaagcttaatccaacatatattgccttcttggtgggataacatagttcaaaataccgagttattcattgttggaatgactggtagaggtgaagttgtgttgtcaccgtactgtctagtactagaaccatgttacattgattaattcaacctcgagaggaggagtttcacaagagttcaaatacaaggtcttgaagtgcttataagggtacgagagtttacacttctctagactatgctgagaatttgaaacttatgtagggttcaaatcttatttttaagcttttgtctagttttggataaaagaacaaaatatcaaaaatcttttgtatgttcatatatattttattttttttaattaatatttcattacttttctttagtatatggagtatttttatgaaacaagaattgtgagaattatgaatcttacctcttacaattcttacatatttttggattacaccaacaaaataagatattttgagctgagtgcctgtttttcttggcttttactctttttttttttttttaaacattctaggttagcttaacaaaaacaacaagcaaacaaaaccttaggatgggagttaagtcattacaaacttagcagcaacctatactctcaatactcactacaaataagccccatgattctccatcttcctcaaaccatttccacctcaagaaataaatcatcagagcctcacacatcaaacacaagtaatggcctccacggattcagtttaccgtcccacaccaactccagaccatgacactactgttgtagtagttgtgtttgtttctttgggttgtgtcatgttcttggcgtttctagcgtttgttatctggttcttgatcaagaagagatccaggaagcaccgtgagagatctgaagcggttcgcgtggatgaacactttaagatgaaggaagctatagtcgaaggacctaatggacaaaagtctgtggtgttatcagttgaggatgatgttaagatcgaagacgcgatcaagagagaagagaaagatctgaagaaagatggtggagttggatcatcagtcgtttcccgttcgtgaatgagctttcttcattcataatgttacctatctatttatttatattaaaattgtggttgtgtgtgaatcatttgtttggtgaaataaaaaaaaagcatctgaaatatttatttaaattctttggacaaagatggttcttcaaacttgggttggtgaatggtgatggtttttatgttctaggagcgaacttttatctctatctctctaagaaaagtaatctttcaaaaaaaactgtagagaaataaaatagatagttgtttttggttaaaacagataatttgtaactgtaactcgataagaatattaattaaaaaaaacatacaatgtcaaatgaaatcatacttaaaattggacatttttctatttgaaaacttggtattggtatactaacacatataccatgttaatcttctcattatagttctacttaatatttaccaaaacaaaacaaaaaaaacaattatacgtatttaattaacaaaacaaatacattaattctgaagatggagaaaaaaattgtgtcttgataatgctaacttaccaagtctccatacatgataagaaaattacacacacatatatatatatatatataaatatgtcatatataagtttatttttgagctaaatcttcaaaaagtttctattgtaatttctaagcttaaacaaaaattgatacattcattgtctaatactgttctggttgaattcaattttatattcaattaaaattaatattttcttaccaaacatcacattcatacataaaataaacattggaattatcattctgaaactaatacaacatttaaatattagaaatcctataaaataaaaattcgtcctttcttttctttgtcaaccataagatccaatggctcgttgaatacgtagttacgtacaactggcattctcgtgtacaaagtcactaaaacaaaaacaaaatccattatagatattaaaacgactaaatttaattatagcaataacaattgaacagcaagatcacaaatttagaattcaagagcttaaaaaattcattaaaagtagaaaaatacaaaaataatacattaaaattcaaagttcatataattggaagtaaaaagaaatttttttatcactctcaagttttgtcttaaatgggacaaatttaactttttaaacaaaacccacagaatctcaaaccagttagcaccccttgtttcaccccacggtttgtttaacgaacaacagccaaccaccaaattactattataccctcatcaccatttgactatttattagtccacactctatagtagttgttacattcaaagaactccaaagtaaattaaagtcttctctacttcaccataaaaaatgcttgcgcacaagtctcttctctcctttaccacccaatgggctacactaatgccatctccgtctacttttctcgcctctcgcccccgtggaccggccaagatctcggccgtggcagcaccagtgaggccggctctaaaacaccaaaacaaaatccacaccatgccaccggagaaaatggagatattcaaatctttagatggatgggccaaggatcaaatcttgcctcttctcaaacccgttgaccaatgttggcaacccgcttctttcttacccgacccggccttacccttctccgagtttaccgaccaggtacgttatatacatcatgaatcttgttattctcttatttatgaagaagtagaagttattacaaagtttataactttgtcatgaaatgtataaaccagaatacctatactatataatatgcacattaaaccaagactaaccaataaatgaaaagatgttaaaatgtgtatttataatgataggttcgtgagctgagggaaagaacggcctcgctgccagacgaatacttcgtggtgttggttggagatatgataacggaggacgcgttgcctacttaccagacgatgatcaacacccttgatggcgtaagggacgagactggtgcgagtgagagcgcgtgggcaagttggacacgagcgtggacggctgaggagaaccgtcatggtgatttgttgcggacttacttgtacttatccggtcgtgttgatatgcttatggttgaacgcaccgttcagcatctcatcggctcgggcatggtcagttctctttctatacctttatgtcatgatgtaaaaatgcttatactagtttcattagtttagtagttttctgatttatttatttgtttgtgtcattttaatttttttttatttggtttggttaagttattttttttgttatgcatgtgtggaaacgtaaacataaccaaaactatttgccattttgtttgttttgatctggtatgataaaattttaatttggtttttggtttgaatacattttggacgatttaaaaagaaaaaaaaatccaccttttaataataataaaaattaataatatattatgtaagatatatagaaaataaattctgatttttttgtttgtttagttcgcttacaataacataagctttgggtttaaatgtttttaaataatagaacgaattgatcacaaacaatttcaatctaagtattttagtagtttacgtttggttggtccggattaggtttggttggttcgggttaggtttataccattcataacttttcatattggcaacttcaggatccaggaactgagaacaatccatacttaggtttcgtgtacacgtcattccaagagcgagccacatttgtgtctcacggcaacacggcaaggctagccaagtccgcaggagatcctgtcctcgctcgcatctgcggaaccattgcagctgacgagaagcgccatgaaaacgcttacgtacgcatcgttgagaagctcctcgagatcgaccctaacggtgcagtctcagccgtggccgacatgatgcggaagaagatcacaatgccggctcatctaatgacagacggtcgagacccgatgctattcgaacatttctccgccgtggctcagcggctagaggtttacacggcggatgattacgctgacatcttggagtttttggttggacggtggagattggagaagctagaaggattgacgggtgagggccaacgtgcacaggagtttgtgtgtgggttagctcagaggattagacgccttcaagagcgtgcagacgagagagctaagaagcttaagaagacccatgaggtttgctttagttggatcttcgataagcagattagtgtgtaaactcttgaaaatatcaaacttttcctttctccgtttcttgtttttttttttcttttttgtaatgcaaatctttgttcttaggaaaatttaatgttaagtttctatctatgtaacgtgtttttaacttaaaatttgtataatttaaacatggctcaaacggataatttttttttttgttaacttagagtaaatccttgaacctatggactaattccagaggagagggtatcctatgggtaaggtctccccatgttttcaaataggccttaagcaataggtccattcccatgtgccaaagggacatggctaagcaattgtgcatctgaggagaattgatacctagcctagaccaaacaagacaactcttccaccagactagaaccactagcccaccacctctggttaaactgataaattaactaagtttttgttgaccaatccggacaatccgatttgacccgatccaaaccaaaacgaaaataattgatttagaaaactcgatcgaaaacctatttttataacaagtcaataatatgtttgattaaaatcggaaacccgaaccgaaaccataaccaaaaccaaactgaaatctagatgaacatctaatattttggattttattgttaatttagatttgggaattgttctctcttatcgtttagatggtaattatgtttacgccattagctgaggagattagtacaagaatatatgacgatcattgatgcaactaatattatgatccgataattaaagacaagacataatccaagaatacgaaatattatttccgactatatagtaatcacaaaaagagaaacagagtcagaaaaccacaaagagagaaacagagaaccctaataatctttttgcttcatgcccaagtaactctacgtactagtgttcttctatcggctcgaatgaagggaactgcactttcaacaacaatgtcaaaactcctcgtaactcatcaatatttcccaagacgtaaaaaatcatgtcggtcatcataagttttgcgtcatcctcttcgattccaactgctatcaggaaaaaataaagttcttgtttcttgacgtcttcctcgaagaatttgtgtggtgagaacgagaatgaactctttatgggaccaaactcatgtttgagtatctctgtcttgacgttgatcgtcaagtctttcgtgtctggttcttgctcgagaaggtgagcaattctgaaaccaagtagaggagcaggattgttgttcgtcatagctgaagtttatggattaatgaagattgtttcgcttctttttttcttttataatgatgtcttcgaatatcaaatattccttttttccgatttgcctttttttttagactgcactttccttttttattaaaaaaaattatttgcgtagaattcattacatcataagaaaagggccaatgactgacttttgttttataaaataattttggttaattgaagtttaaaggatatccgtgtatcctttgttagtgatgtttttgtttgccactgcaatcttgactttacgagaaaattgaaacttaataattggtttctcgttatgccaaagatacagtcaggaaaaaaatatatatatagtgagaggtactaaaccatttggctaaagagatcttgaccacaaaacaacatagctatttatttttctcgtttggtcactgttggtactgggcctcaccggcccattaaaaccatttattcaggccaggccttatatcatgaaatagtaagagagcggctgagcttgttttcgtaggcccatctgtcagcctctcggctattcaacgacctcgaggagcgtgacttcgggaacaagaataactgatcacgagatcataggagaaagatccggggaggcggagaggtcgttgagattctcggacatatatgtactacaaggaattagcaacttaattcggtgactgatttagtaatcgttaaatttggcgattgcatagtgatgtattggcgactgataagtctatattagacattagtcgctaataagtctttaatttgaaactgatgaaaatagtcgctgatacgtctctattctggctactatttaacaactcacatattctatttggacatttaattgggttttatcggctcaatccagttattgtagcccatcagtctaaagtatataaactcgttttcggaaaccctaatcacctttctcctattctcgacgaaccctaaccctaatcccctttctctaatcctctcaattccatttcaattctctcatttctcagattcaatcctctcaatctctcatttctcagattcaatcctctcaatctctcatctcttagcttcaattgatggcttctcgtggtggaaaaggcaagagaggaagatgaaggggatcgaagatttccccaaatcgacccacttcttccgcggtgttgaatcgaagacccagtggtcttcccagctaatacgagttcatgtcagcgaactgtcaagccccacttcaagattatgatagaaattcgattgcacagcctccaacgggtcctagtctcaaagactatcctccttcgacgcatcttttccaatcgtgcgaaggatctcctcgtggatctgtatctcctcgagcctctggatctcctcgaggctctggatcgactcaacctcaatgtggaggatctgttcatcgtctagcatccacgtcgaaacaacctccatcagcggttcaacgggaagcgttcaatcagtctcctgcgacagttcaacgggaagtgtccaaccagtctccaatcttgaatcaacaatgggaagcgtcaaatcctccacctcgagcctctgtatcacatcacggctccaagctcaaaactcacgtgcagaggaagaagaagatgaggaagctgagtctaggaagatgttaaaaggtattcaactctcccataagatgtgcttgctcctctacatgagttgcttctcatgccaagtcgtgagaaatatatgacggtcatctctcctacatttgagcttgaaaccctatggtaagcatctcctcttaccttgtttgtatatagatgccgagtatattaggtttgtatatagatgatgattagattaggtttatgattaatattgaataatatgtgtatatatatagatgtcgagtagattaggtctgctaattggtttatgtgattgtaggtttggtcatgacaatggtaatctgatcagaaagatcataaagatatttacaaacacgtttgatgggtcattttacagttggagatgtgtacctactgaaaaagacacatatacttcctcgaattcgccgtaaacttctatctcctcttaatcttttactactgtatgtatacattcggtttggctgtttgatcacttacatcaaactctcctcttgttttgtaaaaaatatagacatggcatccctcactaaccggtgtgattgaagacaaattctacaaaatttgttagctacgtatgaaggacatggtttctaaggcttgctcaaagcgagcaagggatcaaccgccatggattgagaagacattttggaaagaaatgtgtgagtattgggacatataagaagccattgctaatagttcaaccacatcaacagctcgaatgtcggaccgtaatggtcttggtcttcacaagcaatgcggttaatctctttttaattttttttatcactttgatcatcttttcttttgtttatgcagttatctgtcacaaacgagagaggggtatatttaagaattagaagcttagggaggtacatcaataagaagcggaagtacatacaaaacagttcttctttcacttccttgcaatcacagctggaggacgccaaccgcaaaatagaggaagaagcgactctacaagcacgtcgtgaggtagagacattgcaggtgagaacgagatttaacaaacaaagaaacttgttgcaagaacgagataaataacacccatagtgaacaacaaggagaagaaaactcttcaaactttgaagacctccataataaacatacaaaaaaaacttctacttacagaaggaccgagtccaaagagattcaaaggatgtgcgaggaggctaagggtgagaggaaatgcaaaggcatggtggacataaatgcaacccacgacaaagctacattaaaggcttagaaacgtcaataagcacatgaatgacatcaaaaccttgggcaaaatcaagcaataaaaatatactattcttcaaatcacaccgtagatcgagcacgtctgaaattactatcaacttctctgtaaccacaaaacccaaatgatcttaccgttctgaccacaaccacaaaactccaaatcgaaacttaaattaaacaaaccaaaagttttcccagttgaagaccaacaagtctgtacacaacatttaaaatctaatcctagctaaacgatgaaggagaaaaacaagaatgccagctgactcaaccaggagacaacaagaactcatggcagtaaaacaaagacgaaacacataagagacaaatgtgacactgataacactagattttaacttttttaagctcttgttttttatacatttagcttagtttcatgtctcttttcatgcattcttagtctcttttccttcttttgcacattttgcattgcattacatagcatacttgcatttggagtgttttacaggtgaatcaggtacttttggactcaacttggaggtttctagcacaagggatggacagactcgagttcgggggatctaaggaaggacttaaactatactcggcttatatactcggctggaggccgagcggagcacacttgaagaacaaggagtctactcgaccaaggcactcggctggaggccgagtaatgcacttaaggaagaagagaagctgctcgaccaagccactcgaccaagacccgagtgatgtgaccaagaggaagtcactcgacttttctactcggccaagacccgagtggtgcagcgccgactttcccattttgtttttttcccaattagggcatcctaggattgcctataaatagacctcttatgtttttgcccaaaatatctttgctttgtttgctggatattagggtttttagatttcttttgcattttctggttgttgtgttgagaatttggatttgatttcttctgcaaacttgtttatcttattgagatctatcatttgctaagtttataatgatttctgagttttatgaattttctgggttttgttctatgatgttcttcattgttctgagtagtcttattcggagttcttgaggatgggttaggtttaggtggattcctctgttctttagctagctaagtttataaatgcatgtttcccttctgttttaggagttcttaatgttattttctttctaatcaattgaaaattgatttcagactttctccacctaacaagtgcttgatgaaagttctgaaccaactaatttcagagatttgtagattatagcccaagaccttggatgttcagattgcttattgaatttaatagattggtgtttaaagcctgctttattatgtttcatcaatgaaaattgagattaggaagttctaaaattatgagaatcattgtcacgaaagtggattgatttggttttgaatctattgtctagggataacttgattgagtttgttagttagctactggattgaggagtccactaagaccaattaccccattcttaagagctctgtttcgttttatcgtgcaaaactcgtgtttttagtactctgttcgtctcgtgcaaaattggtgtttttagtattgtactcgacctgtttagtttcatgctcgaccgagtgcttacctttgtgcttggtttactttcttgttcttgcatttgacagttcctggtctttagtttcatttctgctcttgttatttgagttctttatcttctgcttagtctagtttcattcttgcatgatcacttaggttgttagataatccaagtcatctaaacttggcttgacttagtattctctgatcatatcctgattgttagcaattacacccatttggattgacaccttaaatgctgcaatgacataagatgcatttagggaattgacacacaaaacccttgtatcaatttggcgtcgttgccgaggatcgaacccgggtcacccgcgtgacaggcgggaatccttaccactatactacaacgacttctgaatcattttctgccgcatgggaacgtttcaaaggatataccactcagtgccctcaccacaaattcaagaaagcctccctcctcagtacgctatactgaggtgccttgcccaagatcaggctactcttggatacagcttctaattctaactttctcaacaaagacgttgcctctggatgggaacttgtcgaaaacttggctcaatctgatgggaattattgcgatgaatttgatcgttccattcgaggtgccactgataacgaggacggacacataaaggaattacatgctttgaatgccaagatcgataagttggtcattgctctaccaagaccaattgttgagagacctattcactacatcaccgacgaggagcaacagcagattcaagaagggcagtcctactcatatgaggaagtgagctacatacagaatcaaggtggctacaacaaaggatacaacaactacaagccacctccttccaacaacccctaccgcaacaacactgtggttcacccacaccctccggtttatcctccgtatcagcatcaacctccgccctacgttccattccccaatagtttcaaccccggttcacaccctatcccaactccaccaataccaaccccacctgatccagactttacaactatatttcagcagctcgtccaaagtaaaaaaaggctaggattctccaagtacaaagcatgctacattcagctagttcttgctgataggtcagtgagaatacctcatggcatgttggaagatttgccggtgaggatcggatcagtagaaatcccaactgacttcgtggttctagaaatggatgaagaacctaaggatcctctcatattgggaagacccttcttagatgtcagaaaaggtaaaattgatctaaacctttgaggaaacctcaatatgacctttgatattaagaaaaccatgaggaagccaaccattccaggtcaagttttctatattgaagagattgatagattggcagatgagttgcttgaggaacttaatgagaaagatcatttacagagtgctcttaccaaggatggagaagagggatacctatacctagaaactcagggttacacagatttattagactcccatagaccggtagaagcatgggagacatttgaggagttgaatatctgttcagaggaggtcagttcagtcacaaaaagtgaagaaagttctactcgacctgtgtactctagcagtcaatcgaacaagataacagaggaaccaaactcggttggaacaaccgaggacactcgattgagcagcatctctgatgattggtaagaactcaaagctccaaaggttgaccttaagcctctcccaaaaggtctgaggtacgcatttcttggtcctaatgacacttatcctgttatcataaatgatgaattgagtgatgaacaaggcatcaattattgaccaaacttaggaagtataggagagcaattggatattcattagcagacattaagagaatttcacctagcttatgtactcatagaattcatcttgaaaatgaatcatattctagtgttgaaccgcaaagaaggctaaatccaaatttaaaagatgtggtaaaaaaggaaattctgaaattgctcgatgctgatattatctaatcctatttctgatagcacttgggtctcaccagttcactgtgttcctaagaaggggggaatgactgtaattaaaaatgatcatgatgagctcattcctactagaactataacaggacatagaatgtgcattgattataggaaattgaatgctgcaactagaaaagatcattttcctttgccattcattgaccaaatgttagaaaggctagctaatcatgtttattactgttttcttgatggttatagtggtttctttcaaattgctattcaccctaatgatcaggaaaagattacttttacttgcccctatggaacttttgcttataagaggatgccttttggtttgtgtaatgctcctggaactttccagcgaagagcatgacttctatattctcggatttcatcgagaagataatggaggtattcatggacgatttctcagtctatggatcctctttctcctcatgtttgttaaacttgtgtaaggttctagaaaggtgcgaggagacaaacttagttctcaactgggagaagtgacacttcatggttcaagaaggaatagtgcttgggcacaaaatctcaggaaaggggattgaggttgataaagccaagattgacgttatggttcggttgcaaccgcttaagacggttaaggatattaggagctttttgggacatgcgggattctacaggagattcatcaaggatttttccaagattgctagacctctgactcgtctgctatgcaaagaggccgagtttgattttgatgaagactgtttgaaggctttccactccattaaagaagccttggtgttggcacccattgtgcaagcacctaactggaaccacccttttgagattatgtgtgatgcttcagattatgctgtaggagcagttctaggtcaaaggattgacaagaagcttcatgtgatctactatgctagcaggaccttggacgacactcagagtaggtatgcaaccactgagaaggaattattggttgtagtcttcgcttttgagaagttcaggagttacttggttggttcaaaagtcactgtctatacagatcatgcagccttgaagcacatctatgcaaaaaaagacactaaacctagacttttgagatggatactatttctgcaagaatttgacatggagattgttgacaagagaggatcagagaatggggtagcagatcacctttcaagaatgaggatgacagaggcagtcccaattgatgattctatgcccgaagaacaactcctagcagttggtaccagttttgacaagtttaagattgaaacaatgtgtgctacaaggagtggaaaattgccttggtatgtggatcttgttaactacttaactgctggaatagtccctagtgagttaagctcctaccagaagaaaaagtttttcagagacattaatcactactattgggatgagccagtcttgtataagaagggagtagatggtttgtttagaagatgtattgctgaagaggaagttcagggagtgttagagctttgtcacaattcaccttatggaggtcactttgctactttcaagacagttcagaaggttctacaagcgggattatggtggccttctatgtttaaagatgcacatgagcacataacgagatgtgatcgatgccagcgagttgggaacatctctaggagaaatgagatgcctcagaacccaatccttgaagtagaggttttcgatgtatggggaatcgactttatgggacctttcgagccagcttcatatggaaacaagtacatcttggtagctgtggattatgtgtcaaaatgggtggaagcaatagctagcccaacaaatgactccaaagtagttttaaaactttttaaaaccatcattttcccaagatttggtattccaagggtagtgataagcgatgggggctcacactttatcaataaggtttttgagaaagaatgaggttaagcacaaggtagctactccttatcaccctcagactagtggacaagtcgaggttagtaacaagcagatccaagctatcctggctaaagttgtagggatatcaattttgtttaataaaattcaacattctaccccacttttattttatattagtttatattcattttcttatttatgttttctaattttataattatatattaataactattagcgattaaaatcaaataaaaataatgaagagttaataattttgtttcttttaaattttagattcttaatttcttttccagatagtatataaagaaaatatatagatattcattatgaagataaataaagttacaaaaaacataatatgcaacacaatgtattaataaacacatgctacaatttaataaaatacacacctcaattaaataaaacacacataacttaatgaaaacaagaaactcaattcaaaaacaattttaaatcatccataaatactttaaaatctttttaattaccgaattttgcccatatgtgtttcactaaatctgcttgcatttcatgatgtgattgagatggttatgacatcatcgttgcatgatatggttgatggtttggaatagctgacggcatgaagaaatttggtaaaaaaacataatttggtatatttttggattggttggaaaactagttttgaaattgatcattgttgggattttggtagctaaaaagattattagaagaattttgggtgtttaaagggttattgttgggatccattttatagaatttgtttttttctgtatgcaaatcatatgaaacaagtatttattatagagtatattatgaattttagcataaaaaatatatataatatactataaaataattaagttcaaataatttggataaaaaaaaaatatcaaaaatctgagtaaccaataaaaatgaagcatatatctttatttttatttaacttccaaaaataatttcattcaataataagttgacatgtggatgggtaatactcaatttcttccgattcaacatgttgagaatattcaacatgaagtaatccatgtcatcaacaataaaaattcaacactccattgtatcatctcaaaagctgaaacaaataatttaacaccctcatagtaggctatgtacaatggtaaaaaaattcaacacccacatttttcactttttaacactctacatcattttctctttcctccacataataattcaacaccttcttatattttaaacattccaatggttttgtttaataaaattcaacactagttttatttcattattttttaaaatttatattttgtgattacataataatactaactaaatattaacccgcggtataccgcggccctatatttttattaaataaaaaataattagatattttttaggatgatttaataaatttatgctattgtttgatttaaatgtataattcaccgcgagacgaaattttataactcaaattttaaagttttaagttgtatttgtttattttgttaaatgtttaatattgtataattgtattttgattgttgtttctcggatttcacccgtagtacaccatcccatattaatatcgaatcaaacccgtcaattctaggatttcactcgtagtagtatttaattgtataattatattttaattgtcattctaggatttcactcctaattctatcgcaaattattatcaaccgaaactagtcaattctaaaatatcactcgtagtacaccatcccatattaatatcgaatcaagcccgtcaattctaggattttacccgtggtagtatttaattgtataattatattttaattgtcattctagaattttactcctaattctatcgcaaattattatcaacccaaaccagtcaattctaaaatatcacccgtagtacaccatcccatattaatatcgattcaaactcgtcaattctaggatttcactcatggtagtatttaattgtataactatattttgattgtcattctaggatttaacttctagttctatcgcaaattcttatcaacccaaacagtcaattctaaaatttcaccagtattataaagtttaaatatttataatgtttaaatttcttataaaagaatcaaaatgtgttttaaaaaaattaaagttttaagtgtttttttttaatattgttaattttgtttagtgtttaagattatataattatattatgattgttattatatgtttttttccatagcatactatcccatgttattatccactcaaacccgtcacaccatataaccccgtcccgtgaaattaaacacaaatttgtcattttattataaatttcaaatatttataaaattaaaaacttcaaaaaagattaatattgacccaaacttcatcattgaattttgagtattatatctaagatttctctctcagtatatcgtcccgtattaatatcttttatattgtttaaattttttgtaaaatttaatttataattttttaaactttataaagtttcaattttttaaataaataaccctattaaacaaaccattttaattttgtacacctaataagtcaagtttcatgctcattcgtaatcaaaatcattttggtcctttttatagtatggctcttgaccattgtccaatttttttaagcgatgtgggacattctaaaatcgtaattattatccaccaaaacccgttctaccatataacccagtcccgtgaaattaaacataattttgtcattttcttataaatttcaatattataaaatttgaaacttaaaaaaatacaatatcgacccaaaattcatcattgaattttgattgttatatttaagatttttcctgtaatatatcgtctcgtattaatatattttttctatatttataatgtttaaattttttgtaaaattcaatttacaatttttaaaactttataagttttaaaattataaatatttaaagcattttttaaagataaactttataaaaagtttttaaaattttaatatttaacttttgataaagttataatatttataatttcttgaaatattttaaagtttcaattttttaaaataaaaaatcgagtaaaatcggataactattttaattttagacgcctgataaatcaagctttctactcattcgaaatcagaatcattttggtccttttataatatgggtctgaagcattgtccaatttttctaagcgatgtgcgacattgtacacatattatttcttcataggttgaataatatatgtccgttttaaaaaaatttgaattacattatattcagaaaaaatataatattttattaactatatatattttatataaattcaaaataaataaagtataagatcaaataaaaatgaaagaagaattatatatttatgtttaaattaggtagaaatattttaggaaagtagttaaggtaaataagaaatattgttagtttagagatattgtttatattaaatttggtaattaaatcattaattttcgtttttaattattagtttttaggtaacttttccaaaaattaatgttatccaagatcagaatagaattaaacatgttatccaggatccgaacagagttaaaccgggtaaaacccacccagttgaattaattgttgaattatggctcaaatcttcaacattatcttcaaaaatcccctccaaaaatgtatatatagattattaataaataaaattaaaatatccacaaattaaattagattaacaaaattaattattttatgttcgtaactgatatttttgaaaaaaaaaacaaataattattattaaaacaaaataatattacaaattttgatttaaaatacaatacaagcacacaacactattaataataaacaaacttcactttaaaatgtatacggatcaactcacaaacaataaaactctaaaatcacacaacaaatagcgacataaaaatctttttaatttctgaatattctgaatttcgcccagatgtgtttgactagatctccttgcaattcatgacatcatcaacccataatattgatgattgtttgtaacagttgatagtactgaaaaatttggtgaaaacccataatttaagacattatgagactggttgaaagatagattatgatattgataattattagaatttgggtaggggaaaggataattagtagaattttggatagaattattattggaattagggtaaggaaatggaaaattaacggaattttgtgaagaattattattaaaatctatttcacaaaaacaaaattaaaaataaaaacaataattttttggagaataagaagaaaactatagtaaaaatattgttttttatgtgtccgaatgaaatgaaccaagtttctatttatagagattaaaaagttataaattttcatataaatatatatttttataaattgttatttatataataattgattgtaaatatataagatgggataaaaaaaatcttcaaaatctcaaatgacaataataatataacaagtgtcattatctgaagaaaatttttttaaaaaaaaaagaaaaaagaaagtgaacttttcacttgtagagaacgcgtgtgaaacgcataccccaataacatggtaacatgtggcatatgtggactcaaaaaacaaactttcaatattttttgaatttattcaacacttattaatccacatatatatttttgagttttcaacacttccattgcaaacattaaacagttgaatcttttattcaacatgtccattgtacatagtcttagcctatctacgatggttacccatttaggctatgtgcaatgtcaaatttattcaacacgcgtgttactaaacagctgtaattcataacccttcaatttcctgcatatcatgggttacttatttttatcatcttaagcaacaaagagatatcaaatgtgcaaatatattggtctcacatttgccaagaccgccagaactaactgtctgcgtagtagactcaggacatgaatgtgggttctaactaaagtgcaggaataaaagtagagaaggaaagcgtcgagaagtcaataaaattagaataatagatttaagaatatgattaaaaaaataataatttgtgaaataacttaaaaaggaaactgagaggatgtggaaaatttcatacaaggagagtttccctttattaatttcgtgcacattaagatttgtacgtaaataaataatatgaacgattttttaatgaataaaatattatgattgcctacagcttctctaaagaaaggtgcatccttctttttcactttttaacgctccacgtcatcttctttttcttccacatcatcattcaatacccaaacaatttttaagcacttacaatggtttggtttaataaaattcaacactctagcctacaattattattttataatttatatttttgcttatatatttatacttttgtgattgcatattaataatagttattcataattgaagttaaaatttcaactaaaattttagaaaattgacataatgttttaataacttttttagttattttatgtttaggtgaatgaaatatttatacctacatgagcaaataatcaaggatctatacatatcattttgttatttaggtggaaattttattgccagttaaatatgacataattgcccctatacaaacagataatcggtagcctccttccacaagataacaagcattaaatattccgtaaatcttcgaagatattgcgccgccaccctagtgaaactaaaaaaaacataaaaagtaatgatcacatatggtacgtatacacacttgcagggcacaccacgtcctacaaacgcgaaagatgaatataaacaataaacgataacatcatagttagaagataatcttccgttagagcgagactgggttgacgggggtggagtggtgatatcctaaaattgaacacgcaatatatcaccggttaaggatttaactaaatgaaagttaaaaacatggaagaaataactaacctcatcagaatccttctcttcctcgactgcaatggttgattttgaaagattgttgttgacctgcaaaaaaaaaaaaaataattaaaaagaaaataattaaaaagaaaataattgataacaatcttaccggttaataaaaaatggagggggttaataaaaatggatagtaaggttgagcaaaaatggagcgcaaataaacaaatcggttcttcatctcgatgaccgagggcctcaacagatttgtcgacctacaaaatcgcggagataattaaataaactctaaaacagaggcaggaaagctaccaaaataaagaaaaagaataaaaggaaaactagattaacattgaccgttaccaacacagaatcagaagctcccccaatcacaccacttcatccgagggggggacacaagtaatgttggggacaaagaaacatggagatttatattcccaggctttggaaaaaaatgcaattaaatattagctaatcacatataatacttagctgctaaacaaatcagaatggagggagctgaaaagtaatcccttcaccaactaacatgacaatattatccaccctcacatcttcctcatcgtcagaccaggttaaatcttctttcgggttcatctccacgtcaagaaaaatgataggctccacatacgtctacaaaaaaaaacagatcatagaggaagattaatgacgttaataaaagaaaaattccttctaatgtccttttcatattaccccttttcaattctatcattttctatttaccattttcatttataccctatttaaatttttaatgatcattttacccctctttgtaaattgatttaggttaacaaaatgaaaaattaatattttcgcctaaaatattccaaaataaaatttcccgccaaaaattttcgaaaaaacaaattcccgccaaaattttcccgccaaaaattttagaaaaaaaaatttcccgacaaaaaaaaattttgaaaacattttccccgtaaatttttttctttttgcgggaaaagatttacaagggattttaaaatggttttaaaagatttacaagagattttaaaagggtttaaaagatttacaagagattttaaaagaattttaaaagatttacaagcgattttaaaaggctttaaaagacttacaagagttttttaaagatttttaaagggtttaaaagtgttttaaaagatttacaagggatttttaaagggttttaaaagatgtacaagagttttaaaaagattttaaaagaaattataagaaaaccctttaaaaactcttgtaaatctttttaaaaccttttgaaaaggttcacaagagttttaaaattgttcagaaagagttgtaaatattttaaatacttacaattctttttctaaaagttaaaaaatgcttgtaaagactttataagagtttttaaaggatttacaaaggtttaaaatccttgtaaatccttttaaaactctttaaaaaactcttctaaatcatgttttacccttttataagcttttaaaatccttgtaaatcatgttttacccttttataagcttttaaaatccttgtaaatcattttataccacttacttatcctttaaaaacgattgtaaaccatgcaaatattttttaaaaatcccttgtaaatcattctttgacacttacttatgctttaaaaacgattgtaaatcatgttaaccccttttaaaatctcttataaatcattcaatgtcacttacttatgctttaaaacgattgtaaaccatataaacacttttaaaattccttgtaaatcattttatgccacttacttatgctttaaaaacgattgtaaatcatgttttatccttttataagcttttaaaatcccttgtaaatcattccaatgccacttacttatgcttaaaaaaacattgtaaaccatgctaaccctttttaaaaatccttgtaaatcattttatgccacttacttatgctttaaaaacgattgtaaatcatgttttacccttttataagcttttaaaatcccttgtaaatcattcaatgccacttacttatgctaaaaaacgattgtaaattatgctaaccctttttaaatcccttgtaaatcattctatgccacttacttatgctttaaaacgattgtaaatcattttttacccttttataagtttttaaaatcttttgtaactcattcaatgccacttacttatgcgtaaaaaacgattgtaaatcttgtaaaactattgtaaaaagttttaaaatgatttataaaggggtttaaagtatttacctatgtttttaaagactttataaagattttaagaggttttaaaatgatttacaagggtttttagcaactaccaaagctttttaaaaaactttacaaggatttttaaaagcattttttttgcagggaaaaaaaatttacgagaaaaaattttggcgggaaaatttttttttggcgggaatttttttttttggcaggaaaaaaggtttggcggaaattttttttggcgggaaaaataaaatttggcgccaaaaatttggcgccaaaaatttggcgggaaacttccagtttctaatttcatgttcttattagatgagggtaatttggtcattctgttcaagagaagagatattttttaaaatgaacaatataaaagggtattgttgcaaaagggtagtaaaaaaatgatagttttgcaaatctccccttaataaaatgatatcaagatataatattaacagggtagaggaatttataccgaacagttggcatccaaatctttcgaactaccaagcttcaggggaatcaactgacgaggagcgtcttcaacaacttcttcatccatcaacggaccttcttgaattgctggggctgcttgcaaaacaacaagctgaagagcgtataacagaccttgaacagcaacacaagtagtagcaagttgttcaacttccctctctttaattatagtcatcatcatctcaaaggacatcagcccccaagaataagcaagaaatccctccaaatgttctgacatctcagcgtggtccttcactatgtttgggtaataagaagtaggaagaagaaacccgtcaacaaaagtcaggcacgcgtatctcagtcttatatctggggctgcttgcaaaacaacaactctccataaggaaagttgttcggagccgctttggttctctaaaaacctttatctttcagactgtgttttaataagagaatgaagggatataactcactatatagaaagagaaatgatgatgacgattggtttccccaaaaatcaataaataaataacaaaaaaaaataaacacacgcgaagaacaacaatgatctaataagattttaatgaagtcgtctgacgcaatatattgcatacagtataaaaagattttcctgatatataggggcacatgcgcaatttccacatgcacaataccagccaaacaatggcttttttgggcacctaaataacgactcttattaggagtatagattgtgcaatttccttttatgttttaagtaaaaaaattgaaataagaaaataaaaacaattattattaaaacaaattatattacaaaaacttcaaatacaattaataataaacacacatagctttattaatacatttgattcaggttacaaataataaaactctaaaatcacacaacacaaagagacattaaaaaataactaattttttgtgaaggattattgttagaatccatttcacaaaaatcaaattaaaaataaaaataagattttattagaggataataataaaaaattatgatagaaatgatttttttgtatgtgtccgaatgaaatgaacttagaaagttatgaattttcatataaatattttaagaaacatatttgctacataataattgatagtaaatagatagggtgagaaaaaaatctctaaaatcttaattgcagtgtcaatatctcaataatttctttgtttttgtcagaaacaaaaacaaaataaaaagtactctacttgctcatttggttcacacgccttttaataacatggtgacatgtggcatgcgcattgaaaataaaattcaatatgttgaatagattcaataccctaaaatccatgttggttttttcagttttcaacatccctattggattaattaaacagttgaaactttttttcaagaggtccagtgcaagtagtcttacaacacccagttttttcattttaacattccatatcatcttctctcttacacatcattatttaacacctatattacttttaccctctacaatagttttgtttaataaaaccacaaccctttacctaaccatttttgtgtcatattttttttttatgtttatgttttttgtgattacatattattaatcatcgttaatataaaataaaattaaattaattaaatattacataattgtataaaataacttttgttttaatatcagttttattttatatattattattaaaacaaattacaaataagaaaacaaaaatagaaataatcactactaaaacacaaacaatgaacataaatttagaatgtaatacaatatacacacaacaagtaacgaaacactcacaaacttaaaaatctcattcaccatagaacattccgaattgtgcccatatgtgtttgactaaatctgcttgcaatttgtgatgtacatttgaatcacgcaaatcggatctagtacgcacatgatttgaaaatagggatagcactttgatcgtgaaatgtttgttatgtatttgacccacttgcctcaaattgatcataatatgtccaatgttgagcaaatgtctcttgttcattctcaacaatcatattatgcaatatgatacacgatctcatgatgatagtcaaatcggatatatccctcaagcgagctggtttgcgaataattttaaatcaattatgcagcactccaaatgcatgttcgatgtccttccgacattcttcttaatgttgtgcaataacttatccggttcactttaaggtagcctaatcgatttgacgaaagtaggataaaaatgatagataccatcaactaaataataagccatattatatggacgtttgttcacaaagaaattcactcttggaatatttccttgttcaacatcatcgaacaccggcgaatgatctgtgtccaaatcaaatgaaaatagtctctatttataaagaatgaaaaattatatattttatatatttatttatgaatattatgaaataattgaagttatataattgagatgcaaacaaaaatatagaattcaaagcaactaatcaaaatacaacacttcttacacttatcttctcccttctactttcacgtgtgttgatatttatcaacactgaatttacctcctcacttactttttgattacaataaactattgtagaggaaatatttttttcatgttataaattagataatgattatccatcacatcataatattatttgatctcatcttttaatcttatctaatacttggtccccaaactacttgttcaccaagtcatttgatgtttatctattcttaaaggtataataaatagacaagaagaagagaagagagaataataaagttttgctaagcactttccgctctctcggtaaaaggcgtatttcaaccccaactattttgacggagttttttcctactcgtacgacgagacgatgcttaatttaaattaactatctggactcttactataaatggcaaaaattacatttactaaatttgacgttagtcaactgttaaaaaacgctgacaaagcatgacgaaatctgacttaaaacgtctttgttcctattgattaaaaaatcaaacaaaatatcacttccaaaaagactcgaaccatagaaatcttagagtagatggcactgttattaccaattgagccgcatgtattttcgatattgtttaccaccacatttatttataccattctgtctttatcattccctaccaaaaatgatttccccaagttgtgctaaaactttaacacgtttgtaactaaatattagtacaaactattactaaaactaattcatattaatcgaggtatatccctaataatatatatattatttgaagtattaaagtttcagcttatatatatatatattattagaagttttaattgattcagtttaaatatccctaattcatatatatatatataaagttttaatatatatgtgtattaatatgtatgtatatataaagtttaccaagttgaagttgttttttatatttcaaaaaacatatgtgtgtaagaagtaatcaaacatgcaactcaactaatttattaaatatatatatatatatatatatatatatatatatatatatatgctcgaaaattgtaatgcttcttcatcaaatgtaacaatatgattggtgttaagattagataattatttattatcgtttatcccttggagatcaagttacttattgctcaagtcttttcaaaaggctaattaagaaataatatttatatctaagaaatgtttttttcgggtgtcagaaacaaatgattcaagtttctatttatagagaaaaatatgataaattttggatatgaaaaaattatttgatatgaaatagttaagtttaaatatctaagatatcttatcaaccaatcagagccgatacctttccccaatccacaattttgccaagtttttattttcatcaaatttacgactaattaaacgcttacacgcgttcgagggacctcatttctgcattacaacaagttgcaaattatcaacttattttttgccagtaagattgcatcaacaaatgataaatatttatcaaaattttcattgtacatagcctaacaccaccaagataagacatgtagaatcataattatttgattaaatttttgtggaataaaaaggttaaatcctaattgcctacaaaattaaagtaaaatcatgcaacataactaattcattaaattaaggttattagcatattttatgttgtatttcggcaatagtgtggtgatacaagtttaaaataggtgaatttgaaataatatagaaccataagagatcatgctttcatcaacaactacgtttctttatacaaacatatcaaaaaatcttttgagtttcacatggacaccatgttttcgaccgaatcaaaattccttggtaagatctatttcttcctcaaaatttaatgtgtttgattagatttcacatctcacaatttgatttttgtagtggctgtctcatgcatcgttttgtggtcatttcaattatatcctcactttctctaagttcgaactcaccaacaaagattagaaacttacaagaccacactttattgctatctcatcagcttgtttagcctttagccatcttattttgagcatgaaattatgtttcctcgtaacttcttttttgatggcataaaatcaaggcatttaaaaaaaaacaatagatgaaaatttgtagttgttggaatacataagataatccatattagtctcaccaaatttgttaagcttgtttacatctatgaattaaatttatttaatatttacattttaagagaattatcaagcaataggtaggtaaaaagttgtcgagcaagatacaaacatatatataagcccattcaaatttatttttccatataaaaaaatttcaagtgcttatatttttgtttgaagtgtttttgataaaaattctattgttgattggcaatttcatgagatgactactcttaatatcaatataggataaatgtgactttttggggcgattttattttacattgcagatgaaaaagtcagtgttttgagatttaaatacttttccaatgacgaccgtttcgtacctgaattatacaacgtatattgaatacttgaaatgtaaaaaaacttggctagacaggtataacaattattaaaagtcaaggctataaagtatttcatgcaatttaggaaaacaatggctacaaccgtcatagaaaaaacaagatcaatggacgagccgcatattatctcttagaaacgtatttgttgagatacgccaaaaaccgtaatcagcctaatccgccacataatgttttactcattaatagtggttacgaatttatgtttacaatgaaaattttcttctttgcaaccataacatctttttagcaaaacaccgttataattcctatgaaatcgtctcattggtattaaaatgaccaatcaaattaatctcattagttaacattttttgtcatctcatttattaacatattcttattttaatatttttataccaagatatttattaaatataaaaatcaatatatatatatatatgtggaaagaagagaaatgtaaattttcagaaaagacatatataaacatgaaaaacttaaaaattttcaatgataaaaatgaaaataagatcattattggtgtgagtaaaaactttaatatctaaggttgagaaaagtatatcgaagaccagtttaagtctcgtcaggaaaaagcaaaacgctctgagacttagttatcgagaaaccctcttttaacatggattctgacgccggtggaggtgcaaatcgcatgtgtcgggactttgcttctctgatctacttgctctagttactactcatgttctctatactctcagcttcattcctctcctggcaaactttgtcttaaccttaatagacctttcccctcgcacgtcaacctcaacctctgctcgcaattgatccaccaaaaccaccttactccggcgatgaaaaccttaaagaaaaatctacggccatcactaagctttacacctctaatcctagatctgatttgatttttctagaagaacaatcacaccgggaggaggagaacttcctcttggaccgtcatatgcgccatgttcggtggagtcgtcaacggcgcacagcgattctttcttcttgactgaaaaatcatggctttccaatctcactcgactagaaaaaatagtgagtcttctctcccaatatatcggtttattgagatccgctcttaagatcgtccagtcaagatctcttctctcgtatcttgtgacgcctccatctccgatcatacgcctcaagcaatgacaagtcgggatcgtgagcagccgcttagtccgtcttaatagcgccaaccataaggcaaaacactaattgtcaagatgggcctcttctttgtgataggccttccttgttttggcccactaaactatctcctacggcctaaaagtatttgtacgtttatcatctttgtaactactggacccaggtatgtcccaattatatttttgttaagccctaatatattgatgtctttttcccctattgagaatggtagaagacgccaccctcacatcggatcaaaaccaatagttaggattgacaaataccatcctttaatcttgatggaatataagtttagtgttttagagctcgccactgaacccttttatccctataataaacctttgcaaccatactcttcaatagagagaactattattagaactcgacctcttttcgtagaaaccgtgttggttcctaatcttctttttagacgttacgtgcatagagtcgatatcacccaaggtcaaagaatttatatcaacgtcactagccctttatatcaacgtcactatctttgttgtatccaaccataaggttgatgtttacttaatctttgtatttgctatgacttgaatgattgaaatatgttttgtccaaaaaagaaaaatgtctcgacaggcaagttatgtttttagtatcgacatgtgaacttatgttacaaaaccatagttatactctatgtgttcgatcaagtttgatgttttagattttcacataatttaagattcaaaagtttttttatttatttaaataaaatatatgaatattgaaatccaaggtaacatgttcgttacttacacatgcaacaaaagtgaaagttagaccatctccaatgtaagaccatctcaaatgcatatttctatttttttcttctattttagagaaaatagagttgattttactctattgtattcctctaaaatagagttttctctaaaattgaggaaaaaaatagagattactttatatatagagattattctatatatagagtaaaaagtgagattcctctatttgtttccgatattttagagtaaactctatttaagaggcatacattggagcaaaatatttctaaaatagagtatgatttgcattggagatgctttaagcctcaatttttttctctctaaaatagagtatgatttctctccaatgtatcccttttttctctaaaatagagtatgatttctcttcaatgtatccctttatatgttactctaaaatagaggtaatgtaacaaaagatataattactcaatatatagaacaatcctatcatttattctatttaagaatcacatatagagtagggttagagagaatgtacttgaaaatagacatttagaagaaaattttgagtggcgttgaagatgctcttacacattcaacaaattctctattatagcaccatagtcgtttcacattccttcgtcaccctctttttcattttaatttccattttttaaataaaatttattcactcaaaaatgattgaaatttttcaacttggagccacaattatattagtaaaaaaaaaaacagactggagccaaaaccagcaactatatttcactaatcttcaatttaaataagcgtaggtttataccatttagccatattcaacaatttgtttgacttgaaaaaaatctaacaagagataagtcaaacaagagagacttcatcggaaaattgtttgggcgttccactcaaccaagaacaagaagacttttctttcataaactcaggtatttttatttatgtattttagtattatgttgtattttgtaatagtgatttactaatgtttttaatttatttgttagataatgcatatatatctaatttttaggaacatcaagtagcaatttaatttgtaattaatgacttatctatttatcatgagtttatgagttcacgaagaattaaaaatgaatcttgttattagttaagtttttatatgttacatatagtttttattatttgcttccgattgcagaaaagtcatatcgtacatgtcaaaataaaaattctatcgggaagataatgtgtttagccgtcatgtcccgtccaagatttgatagagaaggaaataattgttttgagaaaaataagaatgtttccatttgttacaatgcaaaagtcttaaagacaaagtagaaatcgagaggagggtactttggagttaaagccgacgacatccatcaagagagaaaaaataaaggagtttttaactgaaaaatttgtaccaagaattcattaaagatggccacaagatgattttggaaaacctatttttatttaacaagataatgcaagaactcacattgatccaagagatgaggaattctgagtagtagtttctcatcatggctttgacattcgtttgatgtgtcaaccaccgaattcgcctgacttgaatattttagatcttggattttttagtgccattcaaacactctaacacaaggtgtgtccaaagacgataaaagatcttatttctatggtagaaaattcatttgacgaacatcccgcaaaacaagtgaaccaaaattttttgactttgcaatcgtgcatgcaagaaattatgaaaattcgaggctctaacaagtatataatcccacatttgaagaaatccatcttggagaaagaaggtaatataccttcacaaatggcttgtgatcctaatttagtactagatatagtaaattacttagctacctaagtttttattagggttttgtgcaaaaaaaactttaactcttccatttttgcaactatgtcctccacctccaacaaatacagattaatcctatccctacaagaaaacagtcaatatgcgaggaagcgttgcgagggaaggcattcctcgcagtttttgcgagggtattgcgagtaacgtgctacacatcggacgcgcgtagcaattccgtcgcaaaacttgcgagggaaggcttcctcgcaaatttgcgagggaagtacgatggtttcgcaagaaagatattatccgtcgcaaatcccaaacagatacgtcgcaaatctttaccctaaaccctaaaatacataaaagtgttttgcgatctttgattctcattcatacaagttgattatatggtttgcacagaaaaatattttatttgtttcaatattaacatttcattttgaaaatgttaaacattcatgattcatacttaaagaaaatcataagatcatcattgatgtttttggggaaaaaacacattcgaagtatatgatgataaaataggttcaaatgtagataattaacattctaatgaatcaaaaaaatgaatccaaatgaatttgagtagtgattgttgtatttttcgaaattgattctacattgcgaggactttgcgaggtgtttgctagtgtgcgtagcacttccctcgcaatttttaccctaaaccctaaaatatttagaatttttagtcatgttcttattttgttgagggtcttactagaaataggagaaactgaatcaaatctgattattgaatcagatatgatttaattggtttaaacactgcgagggatttgctaggcgctctcgcagttccctcgcaatatatgctgcgttttgattggtttaaaagacggtgcctctcaatttcctagcaaggcttgcgagtgatttgcgaggaaataaattcttatatatacacgataacctagtttgagcgaaactcaaacctaccgcatcaaaccctaaccctaattcttttcttcgattctcttcttctccgatatgttttcctcgtcgccggcttctcttcttctccgatctattttcttcgtcgccgcctctcttctttttcgatctgattacgtcaccgcctctcttcttcttctccgccgcgtctcatattctccagcagccgtcgtaactcttcttctccagcttcagccgcgagttaatctgtttcttctccaaggtaacgtcttcttctccgatataacttcttctttccaatccaacttccaccgtccgatctaacttcttcttcttctccgtcgcgtctcttcttctccagcagccgtcgcgactcttcttctccaacagcagccgcgactcgatctcttttgcctccaaggtaacgttttcttctccgatctaacttcttcttcatctccgatcttacattgttttcccgatctaatcttttctagtttacggatctaaactctgggttttgttttttttgcaagatgccgacgtcggagaatacttatgcatggtataggtcacagcagtgagacccgttgcatgtcaattctcctgttagtgctgggaatacttcaggggttcaaggttcacgccatccaccatcgcctccaacgccaaccactcagccttctgtcaatcattctgattctcaatctgagcgtctcaacaatatcacactggatgagcttcttgatagtcctggtcgtgctggcttgacaaggctagacccaaagcgtcctccgggaactctctggtaaggttaaattcatagtccatagaacagcttaggttgtggtgccttagaactttgtagtgccttagagcgtaatggaattaggttgtagtgccttagaagtttcaacaagtagaacaacttggttgtacttagcattgtagtgtcttagaagtttaaagacatagaaatccttatgtgtgggctggttgctcttcttgtaggtttgacgatgactctacagatgcagcaacagtccgcatcatctttgaaagagatatcaaagaacctcatgctaattggtcacagacatcaaaggctacaatcgatcaatggtatgaaacgtttgcggtaagttctgtgctcttttgatgtttatgcttgttttgtgtatggtttcatttctgatgttagcttctcttttgtagcaagtatataactgggatcgttcaattaacaaaagagtaagggttgagtttgaagcaaagctaaagtctaggatgtctgatcaagtgtcacggtggaagggaaattggaaggagaagggtgatgaagccaagccaaaatggattgatccagatgtgtcgaaaggtcttgtacagttttggcaagatccaaagtcagaaaaaagagtaacaacagcagaaatgctagatatcatgatccggatggcaaaggcatctataaacaccgttcaggccagacctcatacaaagctcgtgcaagaaaacgggtacgataaatattcttctctccttaccattacttaatctagaattacatattgacatcttgtttatctctttgtgtttcagtgtgagaagactggagaaaaaaactcctgatttccttgagctgctagatgagacacacagaaaagcggatggaagcttgatcgatgggaagtcagaggagatctacaagaaagtgacatctaggattgaagaggaagagtctcatatgggttcaggggacaatccggagagcactggatcaggtggactttctgttcatgccaagaacaagatatttattgaggtaaattttatgtgctctttcttttgtgcttgttgtgtctttagtttcaagtccttgtgttgtgtatggtgtctgaaatcctgcagcttattgtgttgtgtatggtgtcattcttcttggcagcttattattgtgtatggtgtctgaaatcttggcagtttattgtgttgtgtatggtgtctgaaatattggcagcttattttgttgtgtatggtgtctgaaatcttggcagcttattgtgttccgtatggtgtctgaaatcttgacagcttattgtgttgtctgaaatcttgagagcttattcattatactttgtgtagtgttgtgtttgaattgctttctattgcaagtgtggttgtgttgtgtacttgatagtcactattagcgttgtctagttgtgtttgaattcttttgtcttgtgttgaacttgttttctcacttgttttttgttgtgtccttgtgagtttttgtgatctttgcaggttgctccgagaaagaaaggaaggatttatggggttggatctctgcagtttgaagcatcctcagcccatagtggtccaacgcttcctagtgatgatccagttatactttctcagaagctggttgccgctgaagcttgcattcaaaatcaggctgagaagatcaacagcttcgatatcctgtttgactatcttgctgagaaagatccagctttagctgccattcttcgatgtggttccttgacacagactagaccggttagcgcaaatgaaccacctgtagctacagctccggaacaacaagccaatgagaagacagttgctgctaccctagctaaccttgcaacagaatcctctccatcatcagtattttgagaaaaatgtctttctctttttccttgtaatctttttagaacaagttgattatggtttcaaacattataattgtagtatacattttatataacttgtgaaatttcagctttcaattgtgtctttatttaagaagcaaaaatcatctctaagcaagccataatttattaattaggactaattaacaactaattaactaggtaattagagtctaattaaccacgaatcaagccttaatatatcaggaaaacgttgcaaaatacttgcaaatccatcgcaatatttgcgatggatttgttaggcagaaagaaaagaatcgcaaatccctcgcaataattgcgagggaagtactagaactgtagttgcgtgtgttttgcgaggaaaacagtttttcgcaaaatttgcgagggaattgcgactttttaccatttgcgagaagcaatttgcgaggaactgggtttcctcgcaaatccctcgcttttagctgtttgcgagggattagcgagcaattcttccctcgcaaaacgattgttttcttgtagtctaaaataatacgcattgtactccttttctcattttttgctatcatcaattttgtaaatattgacatataatatgtttaatcgaagctcttgcgacgaagagttcaacttcaccttcaaaattttaaaaatgcaatgtatgtgaccgtaaaaatatttataatatacatataaaggtcatattgcgtattattttagacttcacaatattaatctgcattagttagaggtgtagggtaaaattgtaaaaatggatgagttagagtttttttttttgcagaaatccctttttattattatcattatatgtttgttttactttgttaaagggctgataaaattttgtaagatcttttaattttgaagaatttttgaatttatatttgatgatttacatttgcaacatacaaaactccaaatttaaagtaacaaacttggtggcatcctaccaataaaaaaagagttaatatagatttggtcttctctcagttacatttgttcacacattcataacaatatttgtaaaattaggaaacaaaaaataaaaaataaataggagaaaaaattagaaaacaaaaggagtttatatagcttaatttgtttttatagatttggtattcgccgagttacacttctttcttttcgtattcatagcaaaaatgataaaaaaaaaaaaaaagcaaaaaagaaagataatctaaataaaactgataaaataggaaacaaaggagaaaaattaagaaaataccaaattaatagaagtcatgaaaatatatcatcagcatcgtcattatagtatcgttaatttccttgttaggatgcaactctcctacctctttataatttttttttgttcaaatcaaattctaggatggaggtagaattgatattgtaaatccgataaacattttttgatttgtcttctccatcctcatatggcttatttaaatcaaatatcaggacaatgttagctacgctcagaatcggttgaatcttctttggtttgtcgtcttccttttcggtttgtctcttaatggtgttagatacgctttgagtatattaaacatgattcatatctcctccttattccttcagttaaaaagagaaaaagaataacaagaagaaatgaaaaaagaaacgatgaaatattaattgtcaaaggagaacaaattatggtgattagcttctttggactggttcgtaaatgacaaagaattattagtgatgtttaatgggagtaatctatgattataaataggagtgagaagcttttttcgttcgtaaataaaaataaaaagcttttgacgtttaagtttcttatccaaaagtacactccactccattcttaataattaataaaatttaataaaataaataaattaaataaaaacttcgtgaaacaaataaaaaacctaaaacatcaaacttgatggaaccaagcgagtatatgataaatgcttattttattgatatatgttggcaatttcataaaatgattagaagttttaatcttattcattagaccattgttggacagtttttaagaatatataaaacgatttgctataataatggataatgaagcggtaatgataaatctattaccatctgaaaatcaatgtctttatagtgaatgttaatttattcaagtatgttgtaaagatcacatattaaatttgattgctaatgaatatcttgataatcaaatatatgaaagttgatcaaatctctccatccttccgctatatcaccagttgagagagtgacacatgtcactaggggtgtcaaaatgggtaacccaactcaactcaactcataatcaaatgagtttagggttaaatgagttatgggttgacccaactcattttgttaaatgggttgggtcaacccataactcatttaatttgatgggttgagttgttaaatgagttaacctatttaaataataatttaattaatgattattataaaacaataataaataattatcattattaataattattaattcattatcatcaaacttagaatatttacagattccaccgtttatggatttacgtttttggcgggaaaattacgggttttcgtttttggcggaaaaatcacggatttacgtttttggcgggaaaattacaggtttacgtttttggtgggaaaatcacgggtttacgtttttggcgggaaaatcacgggttttcgtttttggcgggaaaattacatgtttacgtttttggcgggaaaatcacgcgtttacgtttttggcgggaaaatcacgggttttcgtttttggcgggaaaatcacgggttttcgtttttggcgggaaaatcatgggttttcgtttttggcgggaaaatcatgggttttcgttttttgcgggaaatcacgggtttacgttttttgcggaaaaatcacggatttacgtttttggcgggaaaatcgcgggtttatgtttttttgtggaaaaattacgagtttactttttctcaattcatcgcttgtatatttaagaaatttggaaaaatattgattttattagattggtttagatgtgttggttaaacttaaattggcattgatttagagattttagttggtttaattcaattttacaaaacttgatgggttaattgggtaaaccattgaaaccattaaccattacaacccaactcattttacattaaagataacatttattttaaacataaataatcgtaaataagttttaaacaatgtaattaaaaaacatacaaaatagaatgaatcattttgtcgagtgttagagaaataaataaaaacgataattagaaaaagcaccaaaattatttatcaaattaatttgaccaatataaattgttataactaacaaattatggataaataaaaccaaacattgtgcaagtgttggcctagtatgactccgattggttacattgcatgataggataatggtataagttgcagaataaaaatttgtagaatgaaaatttgtaaaatggaaaaccgtataatgaaattatgtttaaaatatgttgattgaatacattttgcataatggcaaaataaaatattatatacttaataaacaaaataatgtttaatatattttaagtaatatttgataaaaaaaaaaataagaaaattaaaatttattttaaagttgtgaatttttttatatattattaattatataattttgtgtaaacaattatattttttttcttttacaattaataatatttagtatgcttataagaataacaatttattatgcacataagcaactatatacccactttctttcataatgaatttttacttgtaattttagggtgcaaattctgcgtttttgcgtttgttaatgtaattatgcagattttttcttgattgacaaacttcttgcataatcgcattagaaaacaccgttatgtcattatgcgtgttaccaatcaaaaaacaccttaagtaatagtatcataagtgttcgtaatactgtaagaatatgtgagattttctagtttaagattggaaatatctaagtgttgggtgaaaatcacaagaggaattattgtattagattgtgataataagtggaattattaatttgcatttgacatgatatatggatataaattgtaagacgacagattttttaaaaagttattctaatcaaacaagtcaccttcaataacaattgattagaacataccgcgtcatatagtaaaaaacctttaaatcatatgttaacattctcttcttctataaagtaacatcaaatagttactacaatgagatatacaacaatcaagtatggtatttagggtttaacgtaagatttgagagatatgatttatgcaatgacatccaaatttgatagatattgagaagatatagaaaaagccaataaaatattgatagtggctaaaatatttgatcattttcatataatgatatttgcattgtttagctttaaacttatacgtggataaggtaatctaaagtgtgagaaataataatttgctgataaatattttgtagagataatttgagtatagtgtttgatagaccagtttaagtctacaatcttctttctgtaaatgagttggaaacatatcaaaaagacgagtcagatatactcaaccatgttttaaggtagtaaaaataaatagatcaaaatattcaaccatgtttccaatggcaggagaagttcttgcaataccaatatctttggctatatatgagtctgtttttttaaccattagtgattgtaatttaaatcaatataaaagctatttggtttgtggtgttgttaaaccgggtgaagcactctctcaactctttatacatattttttctttttgttgactaataaatttaacattttaacacacaaaaaaatgcttttgacttaaaattggttacatgcattattaggttcagaaaaaatgaggtatttaagatttatattcagcaatggttcatatatatgctctcatgtctgattttttcttttaaatatatttatgttagaaaatgatctgcaacacatcagactaaaaaactgaattattttttttatatattttctaatattaatagaaaacggtttattaaacaaatgaatatgcaaatactctaaaccgtgagaattccttgtggagtttcatttgtatataatatttattttctttgctttataactttaaaataccatcatgattattatagttcagcttctatgtaatgaaaccatgtagacaataaaataaagaaaataagaagcagtttttattatctaaaaagcgtagacaaaaataattaagaaaacttgaacaaaagaaaaaagatagaaagttgagacgaaaaagaatatataaggggaatgggaaaaaaaaatcatctaagcaagggatgaagatcaaactcgagttgtttaatctcatacataaatccgctttcaaattaattttatgttgtcgttccataattatattttttcttaaaaatagtcttgttttccattctctctctcaaaccaaatttacacatttaaataaactttaaacagaaaaaccactattaatgtagtaatatattaaatattgatatatttctatatcaaatttaaaactaaaaccaaaaaaagaaagaaaaatttctatatcaaatttagaactaaaaacaaataaaaatagtgtcatttccattatgttcttttaaaccaaactttacattctaagaaaaaacactattgatgtgtatattaaacttttgatatctttctaaatcaaacttttcttaaggtatttaaaagtgatagtattctgaatggaaaaataacaatttaacactaaaaccaataaaataaagagaaaaatgtttgtggctaacaaaaaaaaaaaatccagattgtgattacaaaaaaaaaacatttctagggcatgtcattgacttcctttgaagaagaagaagaagagagagagagactgaaaaagaaaaagtaagaaagggaatgaaataaatccgatcgaatacaattttgacgtccgcaaggacactattctctctcttctcatcttcttctttctctcttctctctctctctctacagcgaagaacaggacacaaattactctgtgaagcttaaaaaggtataatttttaataaaacccagaaactacaatttctaggcggcagagaaaatttgtttctacttctttttgtttctctttgtcttctcgtctctttatccccaaacccatcaataaaaaaccctaaaagacttcaaatttcttcaagattttgttcatcggaagttttcagatttttagttgtgtaaagtctcttcctttttgttcgattctctttgttttgagtcttatcagagacttattcttcaattccacctctgggtaagtttctatagattctcactagtaatctctgttttttttctcaattagggtttgatcaaagtttcgtttttttctttctgggtttgttcttaacattatgcttttgttttgttaaggtggtgagagttggaaatggagtagatttgcttaatttagatctgtaagtaatcaacagacagtgttgtttggttctagaatgttcgatacggaatctcatcactcagattcatctctttccgtggtgtttacgactctgaagcttatcattgctcagaaagaatacgtctttgctcctacacagagctgagttttataaagtcgtcagttttgtttcttgctttctttgttgattgtggagttgtgaattagtaagagtatggtaccatcagagccgcctaatcctgttgggggtggtgaaaatgttccgccttcgatattaggaggacaaggaggagctcctcttccttctcaaccagcatttccttcacttgtctctccgcgtactcagtttggtaacaatatgagtatgagtatgcttgggaatgctccaaatatatcttctcttctcaataatcagtcttttgtaaatggtatccctggttctatgatttctatggatacaagtggtgctgagtctgacccgatgtctaacgtcgggtttagtggtttgtcgtcttttaatgcgtcgagtatggtgtctccgcgctcatcaggtcaagttcagggtcagcagttttcgaatgtttcggctaaccagttgttggctgagcaacaacggaataagaaaatggagacgcagagttttcaacatggtcagcagcagtcaatgcagcagcagttttcgacagtgcgtggtggtggattagcaggtgtgggacctgttaagatggagcctggtcaggtttcgaatgatcagcagcatggtcaagtacaacagcagcaacagaaaatgttgagaaacctagggtcagttaagttggaaccgcagcaaattcaggccatgagaaatttggcccaagtgaaaatggaacctcaacattctgagcagtcattgtttctccaacaacagcagaggcaacaacagcaacaacaacaacaacaatttcttcaaatgccggggcaatctccgcaggctcaaatgaacatatttcagcagcagagacttatgcaacttcaacaacagcaactcttgaaatctatgcctcaacagcgtcctcaattaccacagcagttccaacagcagaatttacctctaaggccacctctgaaaccagtgtatgaacctggcatgggtgctcagcgtcttacacagtatatgtacagacaacaacataggcctgaagtaaagcttcttaccataaatttaacttctttcagcctatggcttttcttcataattgacatttgtgcttgctattaaatgcaggacaataatatcgagttctggagaaaatttgtagctgagtactttgctcctaatgccaaaaagagatggtgcgtctctatgtatggcagtggcaggcaaacaacaggcgttttccctcaggttggtttactgctcaatgaacttatcttgtttgtaatacaattgtaaaggagcttgtcttttgcacctgagccagttattctggataaattacgtacttgtttcatgttatacctctttacatgagtatttttattccacaaacattgcaggatgtgtggcactgtgagatatgtaaccgaaagcctggacgtggttttggtatgttatttagatgatcagtgcagacaatttcctgtacatcttatcaaatattccttccttactgctttgtctctttcattgtttagaggcaaccgccgaagtccttccgcggctgtttaagattaagtatgagagtgggacgttagaagaactgttatatgtagatatgccaagggagtcccagaattcatctggccaaattgtcctggagtatgcaaaagcaacacaagagagtgtctttgagcatcttcgggttgttcgtgatggccaacttcgaatagtcttctcgccagatcttaaggttcttcaagctactctatctttcgcagcaaattattatactattactttctctccaagccctttattcttgtaagttccttctcagatattctcctgggaattttgtgctcggcggcatgaagagcttattccacgaagacttttgataccgcaggtaacttccagaaagattcaccatattgctctgacatatagttattttggagatgcggcctttccttttgtcacaaaattggatatgctgtcttaatattattctagtctgcttttctttgcgaaatcgtcactttacctttcatcttttgtggtttccaaatttcaataggagtagaatattacacatctaaatcagtgaaaacagcttaggtaaattagctatttttgtattcacatacaggttagtcagcttggatcggcagctcagaaatatcaacaagctgctcaaaatgcaacaacagattctgctcttccggagctacaaaataattgcaatatgtaaacttcctctctttcgctgtgaaattgatgtaacaaatcctgttattcgacttttgattggtgatctctgatgtgctgcaactggtctgcaggtttgttgcatctgctagacaattggcaaaggccctggaagtaccacttgtgaatgatttgggatacacaaagagatatgttcggtgtttgcaggtaaataactaatgtctcaatatggatcaagtgaactctacaatcttgcttaaaacttaagattcttgccatcaatgaaaatgcagctttgaaaaggataatacataaaaatgaaataaacttaatcaatctttgtatttagtctgtccctgtgaccatgtttgccaatgcacattgatattttgcaatattgtagatctcagaggtggtaaatagtatgaaggacctgatagattatagcagagaaacacgaacaggaccaatcggtaagtttatgtgaccaccttttaatgcatttggtatttttaatcttgaagcacctactcttttcgttcatgtattatatcagaacttcattgtacatattctccggtgatttgactgatgtcatgttttctttctttggtacagagagtttagccaagtttcctcggagaacaggcccttcatctgcactgcctggtccttctcctcagcaagccagcgaccagcttaggcagcagcagcaacaacaacagcagcagcagcaacagcaacaacaacaacaacaacaacagcagcagcagcaaacagtttcccagaatacaaacagtgatcaaagtagtaggcaagttgcactaatgcagggtaatccaagcaatggtgtaaattatgcctttaatgcagcctctgcatccacttccaccagcagcatcgcagggctcatccaccagaattcaatgaagggaagacatcagaatgctgcttacaatcctccaaacagcccctatggaggaaactctgttcagatgcaatcacctagttcctcgggtaccatggtgccatcatcatcgcagcaacaacacaacctgccaacatttcagtctccaacatcctcatctaataacaataatccctctcaaaacgggataccatctgttaatcacatgggttccacaaactcaccagcaatgcaacaggcaggtgaggttgatggaaacgagtctagctcggtgcagaagatactgaatgaaatcctgatgaacaaccaagctcataataatagctcaggaggaagcatggttgggcatgggtctttcgggaatgatgggaagggtcaagctaatgtaaatagttctggtgttttactgatgaatggccaagtgaacaacaacaacaacacaaatattggaggtgctggtgggtttggtggtgggattggtcaatccatggcagcaaacggaatcaataatataaacggtaacaatagtctcatgaacggaagagttgggatgatggtgcgggatccaaacggtcaacaggatttaggaaaccaacttttaggagcagtgaatggtttcaacaattttgattggaacgcgtgaaatgaagaagaggaagaagagacactgaaagggtaatgttctgcttgcgcagcatcacacatcttcaaactcaggataaggataggccaataagccgtgatattgtgcttaagaaaggaagagtcaaatctttgtatcaataactggtttctaggtcacctccacaatcaccaataccatctcttgagttactgtttctttttttactttggggagtttttcttatgctttatagtttataatgtacatctttctatcggtgtgtgttccttagggcacatcatcagggaggcaatgaatcaagctctatccttcatttatctctctggtctcttccatgtgttaaccaaacttccctaaattctgaccacaacgttaaatatgtgcaatgctcttgaacgatgctgatcggtcatgattttttgttgttagtgcaatgaaataccacaagccgtacgatgtctattgtttggtcacagttattaatcaaataccaaatatccaagcttgtctcttaaacacaagtttttactcttaaagtttgcgcaaaatttcattccacaagttttgtgtattcatactcacatatgactacgagatttaacacattgacaaaattaaaagcacaaaaggagaaaattgtagtttcagaaagagtagtctttcaaatctgctctagagtcgtccatgtcaatctcagacatgcattcgtcagcactaataggagggagtttccgagtcttacgcttaaggttgtgtttgtgccaatcactcttacagtgctctctgtattgcttagcctctccaacgaacgtgttgcaagtgctgcacttggtccccttcttttcttctccaccttcttgctttatgttatctgtagtacttatctcttgcttctgcagtttcttgctaagttcaacgacgggatcggtcaaatccttagtctcagtctcagcaggtaacaacggcttgtgggtttgcaatgccatatcatcatgctcatcgtaatgatccatgcttgtgtcaccttctgcatgaactgatacagcgagtatttctagtcttccctggatactcctcacatgggaatcacactctcggaataggcccggttccatctcgcagacctacacaagaaatgtatcaccatgatcagagaggattatagaaaagaagaagttcaaaatgtttgaagatatagatcattacagtggacatctgtgttccagattcgtctttggagacaacactaccatcccattcttttagcttctccagaagcgaggggaaattttgaacaggaacagtaagacgcagtctcattggagaacgctttatagggaagtgcttttgcagctcacggatgacatcaagtgcctgcatagttttgataatcaaaatgaagactcacataagcttttgatagaaagcccacaagtcactttgcttctacattataactttaaacaactcacctgcttcttggaattactatgaggatcaacagcaaaatgaatttcatgcattaggcgctctaccatgctgatggtataaggtcgttgtgtttcagggttgatagttttctgcataacaatcgttgctatatcccgaaactggcttgagaactgtgattctctttcttttccagcaacttgaagctctcctttctccaaaatctgaacatgagagttggaaatgcaacatattagatatattataaggagtcagaacttcagaaatctaagaaaatcaaacaagcgttttaacatacatcgatgcatattttcgtatgatcatctgatccaaacgacttcatcaagtctttcgattttgcaagaactcctttcgaaacatttgaataaacagtatgcgactgtagcacttcatctatatccttctccctgcataaacattttgactcaaatctcattacttttctaagaggtcaaacacattgtccatctttcacaccaaattcagcatgctctaccatttgcgtacattatttacagagataaacgactaaattagacttaccacctccacattagaatcgactcgccaaattcaaaaacatcaactcaagacaagtagtcaagaacaacgcaaacaaaaattgatgatgccattaactcatatccctcatcacaccaaacttatcataccatacattattttaagaaataaacaactaattaagtataagacctccacatcataaccgaattcgtcaaattcggaaaacaaaatcaacacagggtcagtcaaagaacaacacaaacaaagattgataatgcgatgatactcgtttctcttcagattaggtcattttaacaccaaattcatcacactataccaattccttacattatttacagagataaacagctaaaattaggcttaagacctcaatatcaaaatcaaattcgccaaaatcaacacaagacaagtcaagaacaacgcaaacaaagattgatgatgcgatttatcaaattaggtcaaacacatgatccatttaaacacaatattcatctaactacacttttaacagtgataaacaaccaaaaacccgtaaccaaattcgacaaaatcaagcagcgacgaagatcgattgaagcgattatagtggagataagcaaagatttcgaagcttacacgccagaccgccatgaaaggaccttattcttgtaacaagcgatctcgaagcgattgccttgctttttgagacgaaccactgcaacattagtcaacctcttttgccctaccggttgcaccagcgtcttcgacatacttctctctcgcgaattttggtttccctctcgccgccactaaattttgggatatttatttgttgaaactgcaaaatgtgataggtcttcacttgtttattaagttcgtggctaaatgtgaagaaaataaaaagttattggctaaaacttaaagggttgcctgaattttcagccctatactagttaaaatttcaacattccatcctaaacttttagtcacttgaaaaatcaccataaacaattttaatctcgataaaactacatgtactttcggatttgttcttaaaactacgcctccaattgaaccgaccagttaaccgataattatacatccggtttgacttacccataatttaaccaaaactaatccgattttgactttattttaacccaatttatatccaaaaaatatattctttagaagaaaaatacattttatttattttcatttatttttataaaaaattaaaaataaattaattaattttaccaaaataataaaataacaaaatataccacacaaaattatataataaaattttagtatatattttggtaataaacaaaatataccgcaaaataatataacaaaatagacaacaaattctttttataaatacaatggtgttatatataaatgtatttggtatatactctaaatttaataattcaaaggtcattttctttttaaaaacaccataatcatatataaatatatatatatatatatatacatatataactcatcttgaatatataaaaagaaaactgaatctataaagaaaaataaatttataaataccataatatatactttgattgtggtgtttacggatatctataaaaataaatttggcatatattttgaatttcattacatatatagagttcaaaggtcatatattataatttcaagaaaaatgaatatttttgtttaaaaaaagacatagctttaaatttataaaaaaatataaatgattgccaaaaggaaaatgtatatgtttgtatattatcaaaattttataacaaaatgtagctaaaaatataatttggggtatattttgtcatattaagttttgctaaaattaagtaataatttaatatttttaattgtttatcacaaatacaaattaataaaaatacttttacttcttaataagacaatttatttacattttgtgtgggtcaaaattaggctaatatagagtcaaaatcggattagtttcggttaaattatgggtaagtcaaaccggatgtataattatcggttaactggtcggttcaattggaggcgtagttttaagaacaaatccgaaagtacatgtagttttatcgagattaaaattatttctgaaggtttttcaagtggctaaaagtttagggtgaatgttgagatttcaactagtatagggctgaaaattcaggcaacccaaacttaaaatattgaaaggtttttagcggttaggagaaccggcctagacatcgaaactcggtgactctgattcgacttgtctaaccggtcagaccgggttttctaattttaatagcttctgataaacaacccattggcttaaggatttttaatttaggggcatctttgagcagacgcattagtagattctcccattctggttgatatgtacttagatgatgtgggttctaaaatccacactagagatttgtatttaagattatgagaaaggagggctagatcttaactgaaaccttgagagttatattgctaagaacgaatggacttttgtattaattatgacaaagcttttacaatgtgaaaagagattacaagtgtaaaagtgtgtgtgtgcgaatgtgaactggattgaatgtctcttccaagtcgtccttgctcccttatatagatctacgcacgtggtagcttcgtccgggatctgcggagatcctcctagatattcatcaggtcagttccaaaatatcaggtccgctccgcgaatatctcctcatcagttcctaggtcattattcgcttatctcccttcatcagatgactgggcttatctggcccaagtacccattcgcgtatgtgggctcgtcagctgcataggtcctctacttggtgggcttggtgggcttttgtgggctggcttggtattttcgcaggtggattcctggaggggaatccagctccaacatttgccccccagcccattgagtgagtaagcgaactcgatgagcggacatataggtcaggtaagattgcgaaaatattcttgatgagaagataaatgtgattagatcactcagttttgaggataaactcaacaatttcgatttaatttcagattcccttaaccgaaagatttcgaggaggatacgcgagataagtcgctgctgatgtggacggctgagatggagcgtctcttcagcgcaccgcatctgacggtccagatcaggcgcggagaagagatctctgcaatctcgaaaatcgtggtgatgatggctttaaataacttcccacctatccatttgacgtcacgtcaactcacacaactctcaaggtaacttctctcattctttattatttattgctctttgttttgtagaagtagaaaaatctcgtctttattttttttgctatctccttcgtttctctgctattccctctttctcgatctgccttctttgctcttttctttcatctctctcgtccttctctgtcgaaaaccaaagatgagcgactttgaagattcccagaataaaagcaaccatagctacggcgacgatttaagttcgtccgagacgaggtcggtggcgtcaccgccgcgagtacaaagacgcgtcataaccctgggcggaatggatccaattcgtatgtcgtcaaccagagccgacaagccgaagaagaaaaaggctgccaagcaagggggaggcacgccgatgataaacagcgacctggtcgacctccggaggagatgccaggttccggtggaggtacatatgatactcctaaggccgccgctgcatcctgagaacgtgccggtcgggtggtgctgcgcttatgccaatttcttcgagaaatgtggcctatttttcccgattccggcgtgtattctcgagatgctctactgtctcggcctcgcctttccccagatgtgtccgaacttcgtctgcaatgtgctggcgttattcacccaggctaggaaagtaaacagagaattcagctgccatgacctgcttcagctctaccaggtcaagaccaatgctaggagcgaccaagggacgtactacattagtgctcgtcccagatctctggttctcggcggtttgaaggcttgtcgagacaccaattggcgatccaagtacttctttttcagagtagatcgtcattcaatcggcaatttcgatcctgcgaggataacaaggacctggtctaccaacctgggtcagatggagacctgagcctcttgatttttctttgttgtttgtgtcgaatccttgactgctttttgctgaacgttagtactgaaactaattgtttgtttttgatggtttgcagcaaggaccaagaaagttactctctcggagacggaactcgacctgttaacccttctccgacgtggtcagactgactggtccactttaagaagagatcgcatcgtagctgctcttgccatagctccagcagttcccgtagctccagcagttcttgcaatcgtccctccagcagcatagctagatccgatcaaagaggtcccgcggattgaaccggttctcgaggctgatctgcctgtaggtacgagtttcgttatattttctttggtttaaaaaatgtacgagttatcgagatagctgagcaactcgaattgctaactaacaaatgtcgtgctctatttgttcagttcctcctgactccagctctacttcagaactcccgctcattagaagaatgaggcgtccaagtcttcgtgttcaacgagccaatgccggagctcttgctcgtgctggtgatctgtcggccgcggtgaccgcggctcaaaacattctagctgtttccagcgcatctgcctcaacatctcatccctcgcttcctgaggtcaacaccgggacctctgctgcagcaggtcagtcagttaacattctggttgctcaagtatttgggccatctgcagttgttcgttctgatggcgcaccgtcctctccgaagagagctcggacccagccggaggtgaatccggcggctgagttgctcgtgagcgaccagggggtcgcctctcctagagaggagatagtgggggcaggtcttcaaaccggtctcaggaagtgaggcagacgtccaactccggctgaggatccacgggaagcggactttccactagtcctacactcacgaccgtgatcacccgatcgttgaggacgaggctgggttggcgaacctgcttcgccacgtcaaagggaggaattgtcaggttcctggagtgaacaacatggccgaggcggcggcctatgctgacatgatggcgaaggagggccatgtaataatcgataactgtctccttctaattccatctttatgctagttgtgattttctgttttgctttcggtaggcgatagctgccacaaacaagctggtcgctctctatgagcagcgtctaagccaggtcccctcagcgaatgagctcgaagaaggaaagaccctcatccgggagctgacgtcgagtgtgaaggctggtcaggatcgcgaagtctcgttccaggtacacctcggttttgatttgtttgtatataatttgtcgatgattcgatgattctgatctgattgttatttcaggtggagatcgaaaggctgaaaatggagctatccacttcaaaagacctcgagaaaggttatgatgagaagatcgggttcatggagatggagatcggggggttgcaagccgacaagcagacggcgaggaaccagattcatcgcttggagcagaggagggaagagctctccaaaaaggtgatggacctgacttcgactgcacaaggggcgaagaaagcggttcacgatgttaaggttgagctggctgctgcgtattcgaagctgctagctggggtcaaggagaagtgggttgccaaaaaggagtacacggtactggaggtgcaagcggctgaggtggagacgaacctggctttgatcgaccagatcaccaaggttgctatcgatctgaccgtggagaaacctcggctgcaagcagagctggatgacctagaggcgcggtgcaaatcgaaggaggtatcagactttactctaagcaagttggatctcccgcaggtttcagaccaataaagacgcgtttccgggaggtcttgcggagggttctggtactgtcttcgctacgccagccggagaatcgagggagtgatcactttcgctccttgtttgttttaggattttgtgttttgtttcagacttaatgcctgggaaggcttttatcctttcgtttgctgctttttgaacttggtgcctgggaaggcttttatcctttgttcgtttaagtacttggatgcctgggaaggttttttttatcttttttagcaagtatgttttatctttcgttcgagtgttgacacttcgttgattttggtgtatgatcacctcgctttgtccacgttccggataataattggacttgtttcgcgtccaagttatttcagatgtgatatggtatgttcttcgaaggttaaaactttgagtgagtttgagttgttttgtcttgggaacctgttgaagtgaggtcacacaaaggaccttccagattttgggagctgggcttgtggtatcgccaggtcgcgaataaaaccttcgtttcttccttgtttactatgttatgtgttgatagcgaaagagttagatttggttgtagtaggtgagctccgatgaagccgaagtgatgtgttcttataagtttagttcactatcgactttttggaagcgagatcacaaaatggatccgccaacgttcgggtgttgggctttgggtatcgtaagattacgaatgagtttaaatcatagtgtaaatgattgttttttgcgaaatatgataatgagtatcaaaattgcgtttgcggaggtgactgcctgcatacctggttaggggattaagcccttttgtgatttgattgaagtggtggctgcgctcttaggagctgcctacgtaccctgccaagggatcaaaccttatcgtagttcgattgtttttgagtacttattcgtggtatttcttgagatatatggcattctaaggccgtaactcaggtactccgttgataacttttacgagcttatagacgccgtcacgtaccacctcgatgattcgatagggaccttccccggttagttcccagttttccggcgtttagctctctcgtgttgatgaacacttttcgtaaaacgagctctcccacttcgaatctccgaattttgatattggagttatagtagcgggcggcagcttgttgatagttttgaactcggatcattgcctgatctctccgttcatcgatgaagtccatgttgtcctgtaacatttgcgtgttcaggtccgagttagcaggactggcggtccttctcacgcttggttctatggtttcgacagggattactgcttataaaccataggcgagagaaaaggtgtttcttgcgttgatttgcgaggtgtagttaggtaggcctagagaactccgtggagcacatcggaccacattgattttttggaatcaagtcttttcttgatgttgctaagtatagctttgttgctgcttctgcatgtccgttaccttgtgggtaacggggggtggatgtggtaagacggatcttccacttgtcgcaaaatgctttgatttttcccgaggtgaggttagtcccattatcggtgacgatctcataaggtatgccatgtcggcatacgatattttcccataggaaatcctcgacttgtttctcagttacctgttggaaggctttagcctcaatccatttggtagagtagtcggtgaggaccagtaggttttttagtctcttcttcccaccggaggcttccatgggacctacacgtccatggaccacttcataaacaggtaaggagaaaatatcgaggacatttcctcgggaggttgatgaagagtaggtgcatgtcgttggcatttatcgcacctgagtgattgagctatgtaatcggctagcattgttggccagaagtagccttgctttttaattctgagggcgagggtacgtccactaaagtggctaccacattgtccctcgtgcatgcttttcatgaggtctttcgtttgttgctcgtaggtacataccatatagggacctgcgacgctgcgtttcatcagtctcccttccatgatgcagtaccttgcgctctaggctttgagttttctggtctcccacttgtgaggaggtgtgatccctcgttcgatgtaatcgatgattgggattctccagtcattgcacggttcaggttcgtacgaggcaggttgttcgggggatccgagctccggctcttcctccgctgctcctgcctccgcggctgctgcaagggctctagccgcggtggtggtacttcgggttactcgcgtaaagttgcaagttgccgaggtttctgtcccagcgtgtttgaccgttaggtcgatgctcgggtgttctattcattcgatcgggataatctttttgacgaaaggatctgacgtggaggcgagagctgccaaggcgtctgcagaggtgttttctcctctggggatcctggtcagttcaaacgattcgaactgttgggtcaaggttttgactagttcgaggtacgcttccatgcgctcgtctttagcttcatattccccgtggaactggctggtgacgagttgggagtcgctatgggcgtgtatgtcgcggatccccatttcttgagctagcttaatgccagcaatgagggcttcgtactcagactcgttgtttgatgcgttgaatccgagtcggaacgattgttcgatgacttccccgatgggggaggtgagttgtattcctactccggatccctgtcggttggaggagccatcgacgtggaggagccatttcttattggagttggttccatcctggtccgctaacgggagctcgattacaaagtcggctaggacctatgctttcaagctggttctgttgcgatattctatatcgtactcacttagttctattgcccattttgcaagtcgactcgattgagttggactgtgcagaatggttctgattggttgagacgtcatcactacgattggatgtgattgaaaatattgtctcagttttcgagctgacatgactacggccagtgacagtttttctattgctggataacgagtttcagcgtctatcaatgttttactaacgtaataaatcggtttctgtccttcgtgatcttctctcaccaggacgccgcttatcgtggttcgggagactgccgtgtacaggtacaacggttctccttcttcgggttttgcgagtatgggtggttctgacaagtacgctttcaattgtttgaaggcttgctcgcagtcctcatttcaatcgaactttttatcctttcggaggagctgatagaaagggacgcatttatcggtagatctggatatgaacctgttgagggcgacgatacggagggttagtcgttggacctcccgtgccgtttttggcgatggcatgtcgatcaatgctgcaatctgcttaggattggcctcgatgcctctttcagttactaggtattcgaggaattctcccgagggaactccgaaagagcatttctcggggtttaacttcatttcgaatttgtttaggattttgaagcattctcttaattgcgggacgtggtctttttcgcgagctgacttgaccagcatgtcgtcgatatagacctccattgttttacctagctggtcggcgaacattctgctcacgaatctttggtaagtagctccggcgttttttaaaccgaagggcattactttataacagtaggtgcctcagtcagtaataaaagctcttttttcttggtcatctgggcgcataagtatttggttgtacccggaggattcatccatgaaggacaatagttcgtgttccgcagtggcttcaaccaggtccgtaaagtcgatgcacactctccacttcccatttttctttttaacgacgaccgggttggcgagccagtcagggtattttacttctcttatcgatccgatcttgagcgatcgatcgacctcatcgtgcaaagctttagccctttcaggacctagcttgcgacgtttctgctttataggtcggtaggtcggatcgacgctgagttcgtgtgaggttacttcgaggcttattcctcggaggttcgcacttgaccaggcaaagttgtctttgttttctttgagaaaggttatgagatcctctcgtatcgctgggtcgaggtcttgacctatcccaacgcatcgtttgggatcttattcttctatgcagacctgtgttatcaatgattttcgaggtccgcgttgagaaggatcagaggatctgactgttttcatttccgcgagtttgtcttctatcattagtactacgaggtcagcctttttgacaagctcgtagctgcccatatagcattttcgggagctgcgttggctgccgtatacgactgttattcccttgtccgaggggaatttaatgcattggtggtaggttgatgggacggctttcatggcgtgtagccatggtcttctcagtattgcgttgaaaggagctttcttgtcgactacgaggaaactcgtaagtcgcctcactcctcgtgcgatggttgggagctggatggttcctaaagaaaaggtcgtatactagcaaacccggtaagtggcgttttcctgccttgcagctcggaatcgtggtgctccatttttttgaaggcgtcgtaaaagagtacgtcaactgagcttcccgtgtcgatcattatacgggagagttcgtagttgcctacatcgattcgaataacgcgagcgttatcgtgaggtttatcaaggtcggtggtttcgctttcccagaatgtgatctggtggtcaggtcccatcatcgggctcttgtcttttgtgtaagaatctgccttcctctgatgagttttgatcgaattgattgaatcgttgcagagctgagaccctcccatgatgaaatcgatgcgtttcggggagaggtgctcagttgcgcttctgcagaatttcgagaggcgtaatggaaacctcatgtttttcttatgcgaggcggggggaggtgtggtgactgaccttcctgtcctgccacctagatcgagttctgcaaagactaggtctatgcgttctctcctagcgggtgggggagagtcacttccctccggtgttcgttcccgtttcttttgctttggagtttgctcttcctcctgttcgtcgggaggaggggtttcaactttggggtttgaaccttttttagttttacccccagctgcgattaactttttaacggcgcgacactcctcggtggaatgtcctcttttcttgtggtacttgcaatattttccgaggtcaagttctcgactttcgtcctcagctgcctcttcttttgcaaagaagatatgctgcccctgcgtttggttttcctttttgaagggttttttaattgcaaggggagcgttttgcgttttagattctttgaatcgtaaggccagcacagcgagctcctcttcggctttggcgaagtggagagctttgtgaagggcatcgtctaaagagaccggttgcctgacagtgagttcctcacggaacctagaggagaaccacaaactgttacgaagggctgctatggctacctcttcgtttaggtttgcaattttttattagactgctttgaatgtttcgacgtaagatcgcagggattcgttctcaagttgagtaagacttcagaggtcggcttcagacgtcctgtgttcgataagtaccgaatactgttttaagaaagcggcggcgagctggtcgaaggtatcaataaagttcccttcgaggctagcaaaccattcgaaggcgtgacctacgaggttttctgcgaagaaacggtaatgacctgcttcgttttcttagtctgtcaggtacgctcgtgttatagcgaaacggaaggatctcagatgagcctttggatcgctcgttccgtcgtactccgagaaacagagtctcccgacgtctcggaggcgaaaacgagcgatcctatccgtgaacggggtgcgcctggtttcttcgatcatgcgatctatgtcgggagcatcgctcactgctaggtgcattcgcgaatgcatttgagccatgttcgcgacgttacgcgggtcgaccggtgcttggggactgttaaggaggtcgcttcctggtatccgaggaatggatggcggattagcgatagaggtccgttattgcgttgagttcccgggaattcgagaattggatgcggttgtttggtttctagtccacgtgtacctagggggcgaacaccccattggtagtaaaggtgggaccggtagccttgggaaggcaggcgttgtgcttgtttcgtttcctgttgtcaggttttcgacgagagcgttcacaggtgcctgtaaaaaggcgacctgccggttgatatgaggtgagacgtctatcgaggcgaaatccagacgagttctcggagtaggatcggccggggagacggtacctgtcagatctatggggacctaggcagaaatcccagtttcgcgagggggaacctccttacccgcggatcgcgctctacctaatgtgccatgcgagtggaatcgcgtctctgctgacccacaattgcggcgaggttgcgatgcgcaatttcttggtttttggttaagttgatcaagttcatgatcattacgcagagctcggccaattcgctggcaggtcgcggagggacttgattagacgggttggccgggttatctccgtttggaggctgtatcgtgacgtttcgttctccgccccttgtttgcggagggggagtgatttgatcagatccagaagaattcgagttttgggagatgttctccgtgtcagtgttatggataacagcaacctgggctccgggagggagatccgttgggaggtgcccgtccgtaacgtcatcgtttgggatctgaactggtaagccagatctcgatgaattggatgaattgggatccaagatcgttggtcacaagtgatgtgttagtgttggtgttggaatgatctatttccgtccccatagacggcgccaaatgtgggttttgaaatccacactagagatttgtatttaagattatgagaaaggagggctagatcttcactgaaatcttgagagttatattgctaagaacgaatggacttttgtattaattatggcaaagcttttacaatgtgaaaagagattacaagtgtaaaagtgtgtgtgtgcgaatgtgaactggattgaatgtctcttccaagtcgtccttgctcccttatatagatctacgcacgtggtagcttcgtccgggatctgcggagatcctcctggatattcggcaggtcagttccgaaatatcaggtccgctccgcgaatatctcctcatcagttcctaggtcattattcgcttatctcccttcatcaggtgactgggcttatctggcccaagtacccattcgcgtatgtgggctcgtcagctgcgtaggtcctctacttggtggacttggtggacttttgtgggctggcttggtattttcgcaggtggattcctggacgagaatccagctccaacagatgcaatcgttaatagacagaattttaatggatatagattctatttgtccaaatatcaaaatggatattattagactgggttaatggacatagacagcccgctttgacagctcattttcaagaagaaaagtttatagtatgcataacatgttaggatatgcatattttcatatatacttttatatagaattttctagaactctttgtatctctatatatttgtgtctctcataataattcagtcaagagagtttattatccaatatggtatcatagcctttgttcttctaaaagtattcttttcgtctccccttttctctcttcgtctctcctttttcttcttctccttcgaattttcttttctcttcatcttctttcttcctcatctaaaccttttgtttttctttttatatttttttgttttttaattactctctattctcaacgatggcccgtaccaatctatctaccacctctgacaaaccgttctctattagccaaatcaaatcttacattctcatcactcttgacaaggccaaactcaactacgatacatggagagagctttttgaaatgcatagtagcagttttggtgttcttgtaaaggatttcagagatcaaatggattcgtgttattgatcacaatgaacagcatacaacatatatagagtcaatgtacaaccgaaagcgtgaatctaggaagatctatctaattctagttacaaagaatatatgcatctgttagagtatattcgtagatgattataccaagagtaactaaagagaaccgagccaaaccagcccctaatatattggcacatcgacaacacttcctcctccacgccggaaactgaaaaatcttggaaagagcacaatgatcttgtcaaaatgtggatctatgggacaattaccgagtccatacttgagatcgtcctcaaaccgaagtgctccattcatgacctttggtctgcaatcaaaaatctgtttcgtgataacaaagaagccctatggtacctccttctcatacttctacttctaattctacttccactaatactatacaaaatcgtagtaatgtatcttcaaatcaaaaaaacatttttgtcttcacactgatatcactatttctcccgctctaatatcgcatattcaagcggccaagaatagtcattggaataacgccatgacatacccttagatataactttctagaactctttgtatctctatatatctctatatatgtgtgtctctcataataattcagtcaagggagtttattatccaatataacaatgataaaatcttcttaaataagtatatagagtagaactaataataattacctttgatgtcgttaaacgtaatccgagttacttgattgaagtaagagaagaaagaatctgctcagtatgagtaacataaacatttgcggtttcaatcttaggcatactatgctcaatgccacaaaacccatctggatattcttgaatctccaagagctgcaaagaaggagcatctatcaaaaatccaccatcatttttgatgtctgattctgtaagattgtgtaagtctccttgagaagatagctttgcattagagtgaatatatacacgatttagttacaagagtacagatctttcctacattctaggtacatgaggatattaacaaagtcgtaactaaacttataacaaacatattgagaagaatattgagaagaatatcctatctcctgataccctcccgcagtcttagcatcggtcttgtaatgacgtcaaggcttgacttgaattgattgaacagggaagtaatgtggcccttagtgaaaatgtatgcgtattgatgtgttgcaagaatgtgaatgacacgaacctcgccttttgcgaccttctcccgcacaaagtgtatgtctatttcaacatgcatggttcgctgatgcttgacaagattggtagagagatatacgacactcacattgtcacaaaacaccaacattgcctgcgataacggataatgtaactcgaacaataagttccgtatccaacaagtctctgccaccgcgtttgcctctgccttttattctgcttctgcacttgatcttgaaaccgagccttgtcgcttagacgaccaagagattagagtatcaccaaggaaatcatagtaccctgaagttgaacgcctcgtgtttggacacccagcccagtccgcatccgaataagcgaccaatttcgttgatggagacttagtaatactaagaccttaagaaggagaccccttgatatagcggaagatacgtcagagtgcatgaaggtgtatttcccttgggtcatgcatgaacaagcagacttgttagacatcataagatatattcggtcttgtaatagttaaatattgcagtgctcctgccgagcttctatacagagtcgggttttgtatctttggtccaacattctcttctagctttgaagctagatcaaccagtgtgaggctgggtttgcagttttgcatctctgccctcttaataatatcctttgcatagttttcttggcataagaacatgccgttactatcgagcataactgagatgcctagaaagaagctgagtttacctgtgtctaacattgggaattccgttttgagtttgtcgactatggagtcaaggaatctggatgaggatgttgtaagcattatgtcatcgacatagagcaacaagtaggccttgtcttgcccgtgtttgtacacaaatagagaagcatcacatttactctgcacaaaacccatcttttaacataagctacaaaccgagcattccaagcccgtggtgcttgtttcaggccatacaacgccttatttagcttgcatacataacccggattcctattgtcaacaaaccctgctggtggatacatgtaactgtttcttcaagctctccatgcaaaaaggcgttttgtacatccaactgatgcaccaggcaatgtcgttcaaccgcaaagttcaatactgcacgaattgtagcaggcttaaccactgggctaaacgtttcatcaaaattgactccttgttccaaaaatttaccattagagacaagtctgaatttctatctagagagtgagccgtcagcattaaacttgtgcttgtacaaccaaatcgaattgatgatgtttgtacctgcaggtttaggcactaaactccaagtgtaagtcttaatcaaagcatcatactcttctgtcattgaaggattccaattcggatccattagagcttgcttataaccctttggaatttgggaaagtgtttgagcatttagtgagagaattttctttggtttacgaatgccctgctgcgatctagtcaccatacgctgtggtggtggttgagtcgctacatgaggagcaagagcagtcaaaactagatctgtttcatttgtcgctggaagagaaggtgtaagcaaaagctgcttttgaatttgagaaggctctgtatccgcttcaagaaagtcataagcagagtcgattttagcattggtgatttggtaagggaagatatcctcttaaaatgtgacatgacgagatatcacaattttccgtgtttttaaatcaaaacatctataccctgagtcaagtagaggataacttaggaaagctgatggtgatgaccttggatcaagtttgttttgattatttgtgtgaggataacaaagagaaccaaaaactctaagatgagagtaagatggtgttttgttgaataacactgagaaatgaattttgttatcgatagaagtggatggaaggagattgagaatgtgaactgcattatttagaccatctccaatgatcacctctatatttttctctattttagagggaactctattttagacgcattgtgctccagtggtcacctctaaaatagagtttcctcaaaaataaaggaaaaaatagagatgaattgtagagatctctatttatagagacaaaaagtatatatctctattttttcctctatttcagaggaaactctattttaaaggtgaccattggagcacaatgtctttaaaatagagtcatctctataaatagaggaaaatatagagattactattggagatgcccttagagcttctacccaaaacgtattgggaagatgagcttgaagcagcatagtgcaaaaagcattgttgatgggttcgtatcatgcgttccaatctgccattttgttgagaggtgtatggacacgaaaaacgaaactgtatcccgtgtttagcaaagaaatcatgaaactgtgagtttttatactcaccaccattatcacactgtagagatttaatgtgtttctcgaattgtgttttgacataggtatgaaattgcagaaattttgagaacacatcactcttattgcgaagaggataaatccatagaaaatgagagaattgatcgagaaacaaaacatagtaacgaattccggatagactaggaataggagaagtccacaaatcagaatgtattatttcaaacgtagaagaaactttagagcatctccaacggtgagagtcccccatgggctctcaccaattgttttagtataaattatttgaaattttgttagatgagaacttgtgttttttattttaagttttcttagtccaatggttagtctctctaattaggttcttaggaaaaaaaaaattgtttcataaaaattaataaaagacatcaaaagtatttgaacattgaagaaacaagatttaaaccaagaagaaaccaacttctttgaaccattctataattatcctttgtttccacaattcgatcattagccaaatgacagcttttgcagccaatgacaacaaacgttcagttcaaaacagaaataaagattgacagagcttaaaagtgtcccaaagccaagaggactaggagtgcttggaatttggttatatccaatgaatctcatttcgtagttagtgtctgtatttgctaaatcttgaatggtggtagaatgaagttatgattcaccggaatgctattaatatacatgcattcacacacacagttatcatcaactatcatgtatgaaactgaccgttgcttttcgctactatagtaaagttttgtttaatcacagtcttaagagcatagggaaatgttgcataatcacaatttaatcacatgaaattcaaagtctccactgctcctaacgccgaccatattacgtccaccaagactaaatccaaaatcaagactttctaaatctgaaagcatcattgcctaattgttccaatcaagcatcaatcaccataaaatagattattgtttttgttcttccctagtaatagattacattgttgctaagagatgaggaggtcctgtaggatcatagtttgactaaatctaaggagtttattattaatacccaaatcatcagacccaataagcttcatcatagccatcatcagctcgtgattttttcatttcatcgcagtaacaaaatattggccaacaaaaacactaatgtcggttccagattctaattcaaccagtagtgtctattatagaccaaacaagaaaacaaagtatgaacactaaccataagccttaagtcctcaagatatagcacaaaagcaactaacttggaagcattcttctataagataatatctccttgttcgatgtgccataactacatgtaacaaaacttatgctccaatcattgtttctaacaaaaatcaatccaaaccaacactacttaagagcaaagattagtgttttagccttagttttataactaccaccatctcagaaattgaaagttatcagttggggaattagccaatgaataaaacaccatcgagcaaacaaacccaattcaaaatttcacaaattgatcacacaaacacagattaaaaacgagattcatgtacgcaaaaattcaatgctcggaacaatttctaactaaatatgacaggaaactaacaaaggagatcgaaaatcgaaacttacagatcaaaatgggtataaagcggagtcttcagaatcaccaaagcgaaagggatgaagcagtttcaaagatgatgaatttggtgggtaagcaagagaaagaggttgaagaagaaaatctggacaaaggagactgcctcaaatgatcgtgtcaatcgtcggagcataagtcaccggaatcaccatcgctatcgccatcgcatcgtcggagaaagtcggggaaaatcgaaaaatgtttgggtttaattgttcacgcgttttttttccttgttttgtcaaacatccgaccaatgggaacgcgccacgtcatcgtctctcttacctctcaaaacctctctcaagagagacagctctctcaataatacatcattttgatttaattttgaaactttttttctcggagaatcagggagagaactccatttatcaaacattggagatgctcttagatgtggatgaataaaacggaagcttaacatgctttccaatttgacatgcattacaagtcaatgtgagagtctttttatttggatgaaaataagaataagaaattaacgtcttcaaaacatcgttgctagggtgtggtagtcttcgatgccatatgtcagacgattgagctagaaaggtagaggctggagctgaagttttattgaaagctggaaaaaccggatatagatccccactgctatcattgcgaagaagagtcctcttggtgcgaagatcctttatagaaaagccaaatgggtcaaattctattgagcatttgttatccttagtaaatcgacgaaccgaaacaagatttttgattatgtcaggtgtgacaagaacattatgaagagttaagggacgaggtttattagcaataaataaggatccagtggcagtaacaggaatgcaaccaccattcccaaaaatgacagattttccgatgctaggataaagagaaagttggagattattacctgcaccagaagtcaagtaggctgttgcaccagagtccatgtaccactgagaatcagggggatcttgaagagaaaaggtgttgaatgcttctgcaagatcagccgtgctctcaggtttaggagtcctgaagtgagcgtttgactgctgagaatggtaaggaggtaaaagaccaaaaaagccttgtccattggcattcagctgcggtgggtatccccactgatgattccacatctgatacgggtttggatagaatggtggcctgttccaggagttgaagccttgacgattgtaaccatatgaggatcgtcctccgccccgaaacctgttgttgcctccgccacgtcctctgtaagtcatctgagtaggacctgagcgttggtagttcacatgaggcgcctctgagacaacaagcacagtagaggaggatgagtggtccacatgtgttgggttcggtcttcatgatgagccgttcaggtgatcctcttcatcttgtaacatggttgtggcgtcgtcgaagcgtggaagtggctggcgatgtttgataacattgatgatgttgtcaaacttagcattcagaccattcaacacgtacatcatgagtgtccgatcttgaactggagcatcaacatttgagagagagtcaggaagctttttcatctcacgacagtaatcggcgatcttcatgtcaccaatctctttcgtacggagctcattgtccaaacgaagagcacgagcatccttgttgttgcggaattgattttcaattctcagccagatctcccttgaggttgaaccaaagacgaacgaaccttggaactgctttggtgtgagagttccgtagagccagagcttcacaattccatcacgtttctgccagttaacatcagcggcgttggcaggttgaagggttccatcgatgtgaccaagaacatcaaaggagaggcagtgggtgagaaagagttctctccacgcatcgtagttactttcttcaatgtcaagaatcacaggaatgtgagatttgatgttagagacaccatagatcttttctgggttcatgatagcggccatttttgagtaaggaaaagagaatagagaagagatataagagagaagaagcaatcaaagagagatgtgctctgataccatgtaagattgtgtaagtctccttgaggagatagctttgcattagagtgaatatatacatgattcagttacaagagttcagatctttcctagattctgggtacatgaggatattaacaaagtcgtaattaaacttataacaaacatattgagaagaatattgagaagaatatcctatctcccaataccctcccgtagtcttagcatcggtctcctaattctttacgcaattaaacatctttaaagaggcttttctaactatgaaatggcccgcactatcacccggacattgttctatgaccatcgttttaagaacataacaaccagataaaagcaagaggacaaatttatccctaaggtacttcaatgatagaagagccaaattttttagagatgtgtattagaatgtctcatatcggctgggactaagatctttgaacaatatataaaggatgtggcaatccttagctctaaagttacattttgggataaattaagccacattcccaatatggtatcagagctcatggttggctcaacaaacaaaatttccaaaaaatggtttcccacctatgtggcccatacaagtggcatgtcttgttgtatttccgagatgttaggcttaaactgatttctgttggatcgtttcacacccacatctcgaggaggcttattagaatatccatattggttgaaatcaacatctttggacaatatataaagaaggtgacaatccttaactctagaactaggttttgagatcagttaatgtgggacattctaataacagaaaagaaaccaatgaaaacagatccataagaaccacattgtacagcatcaaagtcacaagcactgaagtctgaagaacgtgtacacaagctacttggaagtaccactagagcagacccaatagaacaagtatcactctcgaaacatagctcacgcacacatcgttcaatagcggttccaacacatacttcaatatctctataagcatcactcttttgactaattagttttatactcaaactttctagaaccggagcctgtgtaatggcaatgatgtgtgaataaacagctttgattttttttttttttaattttttttttttcatcaaacagctttgattcaacatctaaataatgcagcaaaagaaccttgccggtgattagcagaataattgggccaaggcccattagcagagcaaaatcaactagacgaaatgcataccaatctggccgacgtcgaataaaaaaacgtttaacgatccaacggttatgaacaaacagaaaggaaggtgtacgataaaactccgtaagaccaaccgtagaagattcgtccccaattgtcagtcggtgaaattaaagaggcatcttaaccaaagaagtctctcttacgagttttctcttcggctttccactttttcctctgttcgtgtcattcttctcgtagatctcgagagagagccttaaggtaaagagaaacttaaaaaaaatcgatcctttaagttaaagtttgtatctttcgattgttttgttccgacccttgtaaaatttgttctcaggaaattaaaaaaggttggattttgatcgatgggttcttcgtcaggacaacccgaatttgattacttgtttaaggttttattgatcggagattctggtgttggaaagagctctcttttgttgagtttcacatctaatacctttgatgatctttctccaacgattggtgagttttagattaattgatcaagctttaaagtaccgatcttagcttttgtgttttgttttttgatcttggatctgttttgtctaggtgtggattttaaggttaagtatctgacaattggagaaaagaaactcaagcttgcgatttgggatacaggtgagagatcaatactcttgttgttgttgtttggaatttatgtaaatgtcacacatcttgtggtttcaatttagatgtttaggggaatcattgaacaatatagagtttgagaatgtctcccacaatgatgtgtgataatctttttttatgttgtgtcttagtcagtcattgttgcctaagctctaatgtgactggtgaagaagaagagtcttggatttgcaatggtttagagattagtatcttgtatttgaatagtttagagattagtcttgtctttagaatattttaaaggttagtcttgtatttagaatagtttatagatgaagtaacagtattacttataattattttaagattagtcttgtatctagaataagcttaggatagactcatctatttagaatagttttgatattagaacagttgagagaatagtctcttgcgatttgtcggttgttctgtgatcactgatcagtttttgggtgtttatgatcactcagctgggcaagagagatttaggacgctaacaagttcgtattacagaggagctcagggtataattatgggtatgtctcactcttaataaacacagttatttgtcatccgtgatccctataagtgacttggaattctccaattgtgtagtatatgatgtgacacgaagagacacgttcacaaacctatcagacatatgggctaaggaaatcgacctctattcgactaatcaggattgcattaagatgcttgtcgggaataaagttgataaggtaagatcatctcgtctctccgtcctcatgttgagtgtctataatgttgcatagcaattgatctttatgtaatttccaggagagtgaaagagctgtttctaaaaaagaaggcatagactttgctcgggagtacggatgtttgtttctggagtgtagtgcaaagactcgagtcaacgttgagcaatgttttgaagagcttgttcttaaggtagtaaattttgcagctagcttctagatttttgttctgaggatatatgagtatgtcgtaatctttctttatttgcagatattggaaacgccgagtcttactgctgaaggttcgtctggcggaaagaagaacatcttcaaacaaaaccccgcacagaccaccagtacctcgtcgagctactgctgctcgtcttagacatggttttacagtttatgacaaattacactcttgctcatcatcttgttcttgattgtctctttgttttcctaaaccgcagcatcttggatgtaaatctcaaccctgatttgaaagttgtgttcactagtttcgaatctcggatttttctctgttctttgaaaatcatttatttctgaattgtagaactcagattcataaacacaataactgttgcagagtagctcaaaaagcaagaacgtaagagaaaaaaaaaaaacacctactactaaagttttgggtatatgtttctatctctttgacttctcttgcaaccacaatcatatgaggcacattttcttctggattgaatcttacacatctcaaagcaagtttaccgaaagcttccatttgcaatcttagattatcgtcactcgcggttgttcaacagtgattggtctatcagtccggtgaaggaacctcgctccagcaacttgccaacatagtcaggcaatgggacacaaccatcatccaaggtgcattgtaacttcccagtcaagagaattagcatgatgataccaaggccatagacgtcaatattcccagtgacaaaacctattttgcgataatcggcctcgatatagctggttgatccgcaaagtatgtcagttacaccttattctccttctagaattggtatgctgaggctaaaacaagacaatttacccataaggtttccattagcatagggtcttcccttgcttttcatatactcataaggtttccattttcagcgtatttgcaaacaagaaccggaagaggaaactctagacaaccacccaagagatttagaacgtttttgtgactactcatcaaagatgaaaccgcgatatcacgaaataaattgtcagggtcgtagatcttgccttgacatacctttatcagcacgcttctgttttctattatacatttgtaacacatgaatctgtctacatcgatcatgtaagtccagtcgaagttttttgtagcttgagcgagacgaaaacgtacggatgggattgtatatacctcgtgaagatgcaatgagtttcctccaacaataagctcccattttcttgaaaaggaatctcctcttctttcttcctttcctccttcttatttaccctcaacaaattcaaacaagacatctcttaaccaagataattgtggtaaattgagatcttaatttcttgcaaacaaagagacgcaagaaagaaggagatagacactaatgcaagtcaaagtccacaaagtgaaaaacaaagaaaaaaagtcaatgaagcgaaagagtaaaaaaaaaagaagggttttgggtggcatggtctacgacagtttgggcatggaaggtgggctataaagtgttgatgggctcaacaaggaagaaggaagtctggcccgtgtagcagtttggtaaatgaaagacggtgcaaaatgcaaatcttgcttttatatgttgacgatctatgagagtcagagtctcatagactttttagctcaaaagagcttgcgatcaggcttgttagaatgatatgaaagaaaagtagtcataaccagtcctgcatcaacatatattagagtcttagagcattattattggtaatattttaaattagtcttagcataattttttgaaatatatatatatatatatatatatatataattgatttaaaaaaattgtgatgttaagagtttggttaagagattaaaattttggcaatatgtaatggtgggttcttaacttggagttcttaagaaaaaaaaaattaaaataaaaacattttaattttaaaaaacttaataattattataaaatttgaaacatacataacatcaaagtttaaacaaacatgacgtaaatataaacgaaaaagattagttaaactagtgattcctgcaaaaaaaaattctatatatgctcgaccaaatcagatttcaaatattgatgcgcacatcgatcatgaagtcgagttctagtgtccaacatattttcaagattttaaagcatatatgtagaacatgtgaactccacgtgtgaacttgttgttgattccatttgtacgaattcgaatacatcaaatagattgtacacatctcgttcttcttctactatcatattattaagtattatacatgcttgcataatatttgatatttttatcttatctcaaataaaaactgaattttttacaatggcaaatcgaggttgcaaaactccaaaagaacactcgacatctatacggcaagctttttgattggatgcaaataaagttgcttttcgactttgtggaattgaaatagatcggataaattcatcaattagagtggccaaatcgatgtgtgcaaccagcgttggtggagatggatggcaggaggtcataaaatcggtgacatcgatgattggtttcgatttcaagcgaatcgattccggtgtcgcgttgtgtgaaagagagagaggaagaagaaacaaaagaaaaaagaaacactcaattataaaataccacaactcttagggttttagtttgacttttatataagagtcatatttcatataatcaataaaaatattatatttcatttctaattaaccgaagaattactctaagatactaccaataattgtgctcttagggtaaaaaaattgatttggaccttttgttatctgtgaaaatttttgagtattttactatttttttgaagtaagtagttttaacatttccctaataaatatggactcttgttatataaatcatttagaaaagatattatggtttttctaacatattttggggaaaatgtcggaaaaaaaatcccaaactttcaaatttgaggcaaaaattgtttgaactttcgaaatgttataatcctgcattttagattgagtttttgataaattggtctattgtaatcaaaattatctataaatttacacgtaaaccaaatttcactcactttactagtagtttgaaagaatactattgaaatgtaatttttgatattataatttctaaatatcattccaagttgtagcattattgtgggaaacttttaatctatgaacatcctactaattaattagatttggatagcctattggacttttaaagaaaactagtcggtatccaatcgtgcaaaatcatacatgactgctgacatggatgcttggagacgtggatgccacgtccttgatgacgtcgttgtcatatcattttcttgttaaaaaaagatttgtatcttttttttttctcaatcactattattttacggaattatgaaaaaaaaatcatttttgatgtaaggattaaaatcttatttttgaaacttataaccaatatttaaaccaaatataatatttaaaccgagtttataaatccaaaattcacaactcttcttctaatttttttgaatcaatttcaatgaagaacataaaccatacattaatcttatatattaatcttttgaacctttttcttcgcctaatcataaaatctacattctttatataatccacccaaaactatttcattgacattggcccattaatggcccaataagagtttcgatggacctagaaaaaaatcattcagactctattctcagttattttctacattcgtaataccatttttggatccaaatgtgagtcaaatttgcctctcgactccatcaatgctgagaaagtttatttccataagttactataaaattctttgagaaaatattgtatactgatgtttagatagtactagttttgtaaacaaaattaatgattttgaagttattatagataatcttgactatcgcaatacccccaaactgttgatagtctagttgactatctaagtgaaaacaaaaaatattcaaaagcttagactttatgtagcaatatattatcattgaaagttttgacgatgatgaagatgaagatgatgctaaaaataatttatacgtatatttagaaccagtttacatataaaaaataatttatacttatatatcttttcatagtttttggatatatagttcaagaagacaataccaacaaaaattgatgcaatgaaaaacatttatagacgaatatgagaaagttgcaatttttttataaataaacaataattcactatttatcttagtttctgtctttaataaatttatataatattaataactatttatatctttagttagtgagatcaaaaccattaatttagccattttttaatgcatttttccgagtttcaccaactgaaaagatttatttgttatcctttatttcatataaattaaattttaaagtaaagacaaactatattatttggttttgtcgtttataaatatttattttctggttttggtgattaagttctcttcttaaaaagtattttttttttggtgaatttaacatcaacaccgatcggatttgtctacctttgcaatgcatcttgcgtaattattcaatcttagatggacattaattagtttgatattttgatgataaccacaacaatcttaataaaaaggttttaacaaaatttctcaatatttcgtgggtttaacattaataccattaaatcggccaaatttacgacacatcttggcgtgttcctccatcttaaatgatttttttatttcacgcaggaattcaatatttaaattttgaaattataaatcgtaaaattcctatctattctccaatccaaaatttcaaaaaatttatagtatatcaaaattatctaaatgttttacatataaataaacttgaaccaaaattttactcgttcaatcagcaattttaaaaaatactttagatatgtatttttgatattttaatttctaaatataattcctagtcgtattgttattgtctgattatttttatttaaattgaacatcctactaattagatgttgatagcctagtggactatccaagtgaaaataagaaatattcaaaagcttagagtttataaaaattgtattagtttgatgatgaagttgaatatgatatggcgaaaagaaaaaaaaattgaagatgacactatagtaaatttggaaacagtttacacatacaaatttattcacatttataacttttcataatttttagatatagttgaagaaaaccacaccaaacacatttgatgcaatgaaaacatttagtgatgaatgaatatgagaaagttgcaatttttttttataaataaacaactttttcactaaattctcttagtttatttctataataagtttatataataactaatttatgaatttaattgaatcataaattacatttcttttttatttagagttttttagtctcactgaattatattaaatttcatactattataacttgagaataaaataaattattatttgatattattaataaatttgtaaaagttcaacgtagtagatttgattaatcttgttattatttaaatacttaaaattggaccaccatctaattagcatcagtttaacatttttcattcaaagatttatagtataataaatataacaaaacaatataaaatttcatcaatataattgcaaaaaatcaaactaaatccctgaaaaaaaaagaatatatgcctagacagaaaaaaagaaagaaagaaataaagtaatgaagaaaactagaaatgttgcttcttctcctattgaatgtgtccacctccagaccaaacccaccaccactcttgttcggtctttcttcttcttcctcttcaactctcaaacaatctcttcctttatcatcttctatctcttcctctgttccttcttctggttttgccaatcaccaaacctgactaacccttctcctcctcctctctccgtcgctccccttcgcggggatgccaattctccaccgccggaatcttcttcttctccggcgacgaaatcttctttaatgatttcttctagagatcccaatgccctctttagcggcggtggaatcaggtttctaaaaaattgaatctttctatcgatttttctcaaattttaggatcttaatttttttgtttctatccggttttgttgtagctttttagcaggagttagaactgtgaagtttagttatggttattctagtcttaaaggtaaaagagcaacaatggaggattacttcgaaactagaatctctgatgttaatggacaaatggttgctttctttggtgtctttgatggtaacttgtttctctaacaacacattattactctttaaccaaagtgttgtcatttgacttgtttttgtttggtttgttaggtcatggtggagcaagaactgcagaatatcttaaaaacaatcttttcaagaatttagttagtcatgatgattttatctcagacactaagaaagctattggtaataatgagacaaagtttgagtgttctagtagctttttccatggaatttgtgtttttgagactttgaattttgattctgcagttgaagtttttaagcagacagatgaagagtatcttattgaagaggcaggacaaccgaagaatgctggctcgactgctgcgactgcttttcttataggtgataagttgattgttgctaacgttggtgattctagagttgtagcgtcaagaaatggttcaggtttgattattgttctttctagatttatttaactggtgtttaaggttttggatatgtgacggctctttgtttgttctgtagctgttccactctctgatgatcataaacctgatagatcagatgagcgacaacggattgaagatgctggtggctttattatttgggctggtaaagtttctacattctctcttcttatgtttgctttagagtgtatgtgcaatgtgttttgggttgtttagttattagttattacttggaatacaccaggaacatggcgagttggtggaattc

SEQ ID NO: 22 - DNA, 137336 bp, Arabidopsis thaliana
gaattctgatgtctgaattgatgaaaactcggttattcctgtgcagagtttcaaacggtacattacatacaaaaaggacttcaactcattgctgctcgttcttctcaaagagctcgtaaagaacgccttgaagtttgaagaaatcatttcaggatcgaactcaggactacctacaatcgaggttaagatagaggaactgcagacaaaggtaagttatcatatggttaggctaaatttagaagtatgattcttaatacctttttaacaactcttatgtcttacatttgcaggccaaggaatacgacattgcagatctacgacccttcttttcaagcacagatttttccaaagctcacttcgagttggatcatggccgaggaatgatcaagtgtccaaaaaggctgatcacttggtaaaacaagaagacgagcttcaagttactatcaacttaggtttatttatcattgcatgaaaaaaatgttggatatttaggaagatagtttcgttttgtgttaagattattaaagagctgctcaaagatttgctgttaggattatgcaatactcatcttaagatattaacgaagcattcctcttcctcaatactttgaccgttgaatctgagtaaaactcaggtggcgatttttcaatcggtatgtgagaaagaatttcggatgctagcttttgataccgcaagttgttaccaatcaaagtggcagtgtgaaaaacaatggaaaaatgtcattaaaatccttctcttatgttgacttttcaaaaaataaccaacttttgttgacatgaccatattgagcattctgttatgtagattaatagattccgataaatgagagtaattttttgttaacagtgacacctgttaattcaaaacgttatcattttcaacaacagaacgacgtcgttttgttgtaatgactgaactaaaatcccaaatttaatatacgattcctaaatcgagcaaaatccctaatcctaaatccccatacgatttgaaatccttatcccaaagttaatatacgattcctaaatcgaacaaaattcctaatcctaaatctccatacgatttgaaactaaggatttcattgagccgttatgacaaacgatgacgttttattgttagagggaacgttgtcattttcaaataacgagtctattaacacacaataaatttatgataacatggtctaacctacttaatgttatgcctgatatgaccaggtcaacgaaaatttggtatttatttaaaaaatcaacaaaaattgaatatttatttggaaaataatcctaagtttgatatttatttcgtttcgagaattgaagatttaaatcaacgttttcaataggtcgaagattttagtgacatttttctcgaaaaacaatgtaatacttgttgatctggctttatcatcaccattgtactaagtattctaacatttgaaagttaatgaaaaatatttggatacataagaactacatgccgtttttactttgacaatgtgaactccttgctgtttaaaataccaaggcacatttgtcgactgattcgtgtgttcgtcgagatttttttttgtttattgcaattcggagaagtttgggtcgttaaagttcgagtagggttcataaatatagtgaaaaccaccgtttggtgatacttcgtcgtcctcgacactctcagattcatcatcgaacctggtatgagctctctttcgtctttggtgctctactagttagggtttcgccattactatctccatcctctgttcccagagttagaatttttcttctgaaaacgcgaattaagctcgacgttgaaatgttttgctcttcagattaagacgcgaatttgagaggaagctttattttgtgtgtagatggcgaataatcctccgcagtcttctggtacccaggtttgctctctcttttagtcgtttcatgcttctatggaattcgaagtcactcagaagtcactcaattgatatgttctaagtaatttgatttagccaaatatagttgatcaatttcaagcgtgttagggttctttgatcttagtctctttcattgtttaatagcttggagcattcactcaattgatatgttgtcgcgcctaagtgtcagaatcaaacattcaatagctgttatttggtgaaagttttgttttagtgtaatagttagtgtgtgaactattggatgtgcttatgagacccttttccagcagtttcggccgatggtacctggacagcagggtcagcattttgttcctgcagcttcacaaccttttcacccttatggacatgtacctccaaatgttcaaagtcagcctccacagtattctcagccgatacagcagcagcagctctttccagtgagaccaggtcagcctgtgcatattacatcatcctcacaggctgtatcagttccgtatattcaaacgaacaagattctcacttctggatctactcaaccacagccaaatgcacctccaatgacgggctttgctacatctggacctccattttcttctccatatactgtgagcttctgcttttttcttgtatttgttattcggataactttttatatatgattcgttttcactttgctggattcttgttcctgcagtttgtaccatcatcttatcctcagcaacaaccaacatccttggtccaaccaaattctcagatgcatgtagctggcgtccctccagcagcaaacacttggcctgttcctgttaatcaaagcacatcacttgtttcccctgtgcagcagactgggcaacaaacaccggtcgcagtttccacagacccagtaagtgactacgtttactgatcacaaatatgttttggtgacttgtattgatgcctatacctactattaatcatgaaaccatctcttactaaaatgcgaatcatatcatgttgagttgtattaatatataaattgtgacaaccaacatatgtcttctgccatttgtagcatttcaatctttttcgctgtattattttgggatagtgtttttatctgaatcgagtgttcctcagctttctccgaattctttagacttagtaatttcatgtacttcctctggatcgttacttaggtcaaactctgattaggtttgaaaacgtaaggttttgatctagagaatcgtcaaactctttgaagcctcaagaagcccctagcacaaattatttcagaaccttgtcctatttatactcaattactaacttgctgatgtggcatagttgatgaactcttatcgaactcatttgtctagtctttatgtatgcaattgtagctaaatgtgcttgttggattttggtaacagggaaacttgactccgcaatctgcatctgactggcaggagcatacatctgctgatgggagaaagtatgctactaaactattatttcagatttaggccaaatatcttcctacatgtcactctttgtactgtagatttgtgttcatgcagttccaatttgaaattgattacttttagttggaaattgtttgtaagcttcttactttttgtacctttcataaggtcttccatgcttcctttttttttttttttttttccatgcagatgtctgtttcatggttttgggtctatgaattcgctttatctgatatatacttatctttctaggtattattataacaagcggacaaagcaatcaaattgggaaaaacctcttgaactgatgacaccacttgaggtaatacttacaaagtagtctgtcttctaagatgattttcattttactggttgattaagcttaccaggcttttagttggtgtgccacttcactagtgatgtaaatggttgcagctttgtctggaacaacgttgtttaatttgtatatttttttcactgattcggaaactccataactgtggagatatttattaagactgctacgtgctcatctgaaagcagctttcactttattgaaacaggctaccgatgcttttctgtttctcatttttttttttttgtgtaaatcggtgtcaactttgtaggcagtttggggataatttgctaattttttatgctcgttggattaagaatctcctgataatccttatttcgtttttatattaagatcaaatctaccgtatctatgcatgattttacagtttctaaaatctctttctgcagagggctgatgcatccactgtatggaaggaatttacaacacctgaaggaaagaagtatgcatctttaaatttcatttagtctttgtatcatgcttattctctattgttgcaactgattagttgttttaatttacgcagatattattataacaaggttacaaaggagtctaagtggacaattccggaagatttaaaggtctacctatttatctctctctcatgcacattccccaatgcaaagcctatgttaaacctgggtagttgttgtatgcagttagctcgggaacaagcccaactagctagtgaaaaaacgtccctttcggaagctggatctacccctctatcccaccatgctgcatcctcgtctgatctagcagttagcactgtgacttctgttgttcccagcacatcttcagcacttactggacattcttcaagccctattcaagcgggtttggctgtacctgtcacccgtcctccctctgttgctcctgttactccaacatctggtgcaattagtgacactgaggctactacaatgtactatttttccttgggaagttttgtttgatgtttatacactctgtcaagcctttgaatttaactgttgtgcctatcataacagaaaaggcgataatttatcatctcggggggcagatgattcaaatgatggagctacagcacaaaacaatgaggcatgattttaattttcctttctacaattacttgcctagattctaaaagtctattcttttgtattccgtttacctgctttctacttcagcttcatgaggtcaataataacttgtacaagttattggaagacttatgctcaataattactatacatgtgatgatgtggtggtgtcgttaatatttatggtctagcgttacaccttggtatgctttctaattattttgaattttttgttaggctgagaataaggaaatgtctgtgaatggaaaagccaatttgtcacctgctggtgacaaagcaaatgtcgaggaacctatggtatatgctactaagcaggtactttcttatcctaattttctcctcctgatatctctcatatctgtaccataatgttttatttgccattcatcaacttttgcactgttattttttctaggaggccaaagctgctttcaagtctcttttggaatctgtaaatgttcattccgactggacatgggaacaggtaatctggacgcatacgcaagtatttgtgtcactgatccatatggcctgcattctctccctaaccttctatttggttcattgctgacctgatccatccccttatagacattgaaagagattgttcacgataaaagatatggtgctttgaggacactcggcgagcggaaacaagcgtttaacgaggtatatagtttcttagttcctagctataatatgcaaatgcattttaagagcctgtctatataatgtaatgcagacttccagtctttatttgtgatgtaattatttattcgctggtagatttctactttaagtagctttatgcttacatctgattgtcaaataaattttttcagtatcttggccaaaggaaaaaagtggaagctgaggaaagacgaaggaggcagaagaaagctcgggaagaatttgtcaagatgctagaggtatgtactaaaggagtcagaagttagtgtttggtttgattagtgtgactgattagctgattatgttatactaatattgacctcaggagtgtgaagaactttcatcatccctgaaatggaggtgtggctttcagttaattacaagatctttggttcttgtctttattttatatgtgacatatgtgctaatggaaactattccctcaccagcaaagcaatgagtttgttcgaaaatgatcagcgttttaaagctgttgaccgtcctagggatcgtgaagatctttttgacaattacattgtggaacttgagaggaaggtaaccatcagactttttcggggggctttcgttttcatttgttgatttggctttttgattgtttggtgtgatactttgctctgctaagcaaaacaatgcatgcctatgaacatgaaggcgttggacaaagttttttttttttttttggttattacagtccaaatagttttcgacctcagtatgatcacaagagacatgtcatatttacgacgaagcaattatttgggtgggcatttagattgtggctgagataagatctggtgaaccagcatggtggctttaagcttctatagagaatatcgtttgttgctttgtagaagaggcaaattcattgtgtttgaattgacattatgaatcttttaatctgcaggaaagagaaaaggcagcggaggaacatcggcagtatatggcagactatcggaagtttcttgaaacctgtgactatatcaaagtatatcattgtttgtgaagcttattcctgcgaacctttctgtttcatagaccttgacataatgccttttataatatgtgtttgaaggctggtacacaatggcgcaaaattcaagatagactggaggatgatgacagatgctcatgtcttgaaaagatagatcgtctgattggttttgaggtaagtaacttcatcaagtagttcaggctgccacatagaatttgtttataatgtttgttattgcaggaatacattcttgacctagagaaggaagaagaagagctgaagagagtagagaaagtaaggtcaatgttcagggttgtaacctcattttttgttcttatgtagtccaatgctcatggtttcattttcttgtggagctaggaacatgtaaggcgggccgagagaaaaaaccgtgatgcatttcgtacactattggaagaacatgttgctgcaggcatccttacagccaagacgtactggttggattattgcattgaggtgtctgaccaatttagatctttactggacaaattgaattttatgttggattcttttcctcacttattttacgtacagttaaaagacttgccccaataccaagctgttgcatctaatacatctggttcaactccgaaagacttgtttgaagatgtcacagaagaattagagaagcaggtaatttggactacatatatatagtgtaattctctattggtagagtattccacctatgcgtgaatctgctagttatgataatcgaacctttttgtgttttgattgacagtatcatgaggataagagctatgtgaaggatgctatgaagtcaagaaaggcaagtcaaggatagcttcaatttctacttactaattttaccaattttttttatctaatccctttctctacagatttccatggtctcctcgtggctgtttgaagattttaaatctgctatttcagaagatctcagtactcaacagatatcagacataaatttaaaggtaaatagaacatgtgtcagtacataaattaatcaacagaaacggctatgtgtacattggaagatatattaggtgtgaagaagttcttgtaaagttcagttatatagggctctgattcatttatttttccgttgtttatcagcttatatatgatgacttggttgggagagtgaaggaaaaagaagaaaaagaggccagaaagcttcagcgtctggctgaagaatttaccaatctgttgcacactttcaaggtatatctatcttaccaggggtgactttctttttgtctggattcactgggacgttaaagataattttttgttttggttaaggaaatcaccgtagcttcaaattgggaagatagcaaacaactagtagaagaaagtcaagagtacaggtaaataatttattgccttgaataggttgcttcatggcttaccttacgtaaaaaaaggttgtggtattaccttcttaaggtcccattttgaatatctttagatcgattggagatgaaagtgttagccaagggttatttgaggaatacataacgagtttacaagaaaaggcaaaggagaaggagcgtaagcgtgacgaggaaaaggtactgattcttcatgccatgaaatttatttgtcttttatgcaagaacggatctcttagacttttattgttgtggacttttcaggttagaaaagagaaggaaagggacgagaaagagaaacggaaagacaaggataaggagagaagggaaaaggaaagagaacgtgaaaaagagaagggaaaagagaggagtaaacgggaagaatcagatggtgagactgctatggatgtgagcgaaggtcataaagacgagaaaagaaagggaaaagatcgtgacagaaaacatcgaagacggcatcacaacaattctgatgaagatgttagttctgatagggatgacagagatgagtcgaagaaatcatcccgtaaacatggtaatgatcgcaaaaaatcaagaaaggtaggtacaccctagacttgagttctgaaattcgttaaagatttaaaataaagagggatggttttttcttggtagcacgcaaactcgcctgaatcggagagtgaaaaccggcataaaagacagaaaaaagagagtagtcgccgaagtggtaatgacgagctagaggatggagaagttggggagtgatagtgaaattcgacattaatctgaaacctttctacatcccaattactttcttgattcatatttttacactgtaatgatatttttgttttcatttcatttctctgttaattggatatatactgaaaatctttgattcttactgtcaatggagaaaaaccacccaaaaaagagtactggagtttacttcctctgtttattgtttgacttgagacaaatcatctctcatcattgctttcctcctccactggccactgcaactatatcgatattacacttggtcctggaacttctcaacacacatatttatatgatctgttagcggttgtgacttgtgacaaagtacatttacatttttgttgtgcatacttaaatctcaacctccaaccgaccgaatattcatggatgctccttcaccatcgtcttatcaatgaagtaagcaactgcaacaacatacatgaattcacacatcattcattagcatcacctttgaacaaacacggtaaatactgaaacagatgtaagcaaatgttccaactttcttcttggacttaggagaatgcattcacatacctcaaatagctcgaatgcactacccttccgatacgtatcatctttcttcttggactctgtaggaagcacactgaataacaatgctctccatcctataagtaaaacagcagtacttcccattgtcaccaacacaaagctatatgccggaatgtgacctgatgaagctgacctaatgataattccaagctgtaacgaaaggaacaagctttaaacagtttagtagagataccaacaccctaaacctacaatgtcaaaaagattggtaaatgtcgccttaccggagttccgacaatccaagatttcgcagctgcaaccacagctttagactttcccttcattcctcgtccttcctccgcataaccccccaagaaataagcactcagaaaccatcctgccacataaagtttccatttttacttgaaacaaagcttctcaaacgcaagatagataacagagtaacgaaaacgaatcaatacccgcaatgaaagggtcagctgtgtggagagtatcaagagaaaaaacagggaaaccatggctaaatctcccaatggcagagaagataagcagagctaaaacatcaccacccgcaagtaaagccacacgactgaaagaaacaacacaaaacatttgagataacaatacaaaagcaatccttcctctagagagactaaaacaaagtaaagttagagtttttaattacccccatttggtaatgttagaagatgaagtagatgacggtttatcgaattgaatcacgccctcgagaggaacattatcttgacccacgaaaactgtttcatctcctgaagaagggatttgagaagctgaggttgagggttttgagttgacgcttccgtcggggttagagagagcgaggacgacgcggggacgactccggtgagtgtttggtgcagggaggagccatgaatcgggagaagagaaaggagaaggtttggatttggtgatgaatctgacggcggagacaggtccggtgggagtgcgaagaactaacattctcattgtatcttgtcaagccaatcgtccgccacactctcatattcatatcatcaattttcttatcagtataacgaatttaatttttttatgtaaaaaaaaataaaaattatgacagtgtaataaaaaagtgttttgctttgtggtgactataaatataaataatactcctttcgttttatattataaattgttttgaattaattattttattttacaatataaatttgtttctaaatttttatgcaaactatatattattttaatatattctaaatatttatatcatataattttttttatgattggttgattttttaaaagtaaatttttttatctgtgtgttttttaactaaaacaatttaaattatgaaacagaaaaataaaattttatttcttcgaaaagatcggaatagtgttcttgtgactgaagtaataaattatatgttacaatttgatcgatcatatacacaaaaaataaattaatatgcatactatggagtctacacaaattataatttatcctcaatattcacgttggcgcatcaaattgttgacattttccaaaaagatatttagtatttaccaatttagagattcaattttgaacaatcgttccattgattatttttttcttttttcaaagatagttctaaaaaaagttttattttattttattttattttttgttcagattttcaacgttaatggtggggcaaacggttatatcggttggtgacggtcttgtttctctgacgataatgaggtgcggttgttccgccttctaatgcgagttgtggtgaacttcccgacgactttacgcatccttctagtcgtaccactgatttaaagacaccaaaagagggactaaagaaagttgtcagctcacttgtcggaagggctgttgcaactggcggcggaagtcaaagacgggttggtggggttcactacgagtcgagacgattagcgccagatttgtcggatctgaggtggctaggtgtgcagaggcggttaggattttatttgagtcaaccgctctaatcattgttttcgtgtgaccggatttgaggttgtggcggtcatagaggaaacttgtgctggtttcggcgatggaggtgagagttcgatttaggttttcggttacttgggtggggactggttaagcgggtctattgtttattgtgagaattttcaggtcggctctgatgttggcttcgggttagtggcgagaatcgataactttggtcatgtcgctcgagtcgtgtaggagcagcaacgaaggcctattgctatcgccggagttggaggtggagccggtgttgcagaattaacagactttttcagatttttgtgcttgtgttgactaaattttcctttctctttttataccgattagcctgtataaacctaatattgtaatgcccattgagaaaaattaattttttaaaaaagatatttacaaatcatattcctatttttttcttattcattggtggctggctcggttaaaaactcattttcacaagaccgatgcctttcctttttttatataacactcatcactattgtgcagcttaaaagaagattggctcattgtcgctttccattgaagagatcgagtcctcaggttataggccatgttcgtttgtacacctggataatgcatccagatgatccacctaaatgatgcatttgagtgttctttgtttcctaatccggtagtccatctagatgaagcatctaaatgaatctttgttcgtttgattagtttattacaatttgtatctgtatctaaatgcatgttgtattaaaatgactaaaaatgacatatcttcatttaaatcatactttttagtttcggaaagaaaatattatagttttgatgaaaaaatgcaattttataactttggaagaaaatgtcattctcaaattttttggttttggcgggaaaacgcaattatgcaactttttcgttaaaatagtgattttatatgattttacgtttttggcgagaacacgtaagtccaccattttcccgcagaatcatgattttatagttttggagggaaaatatgattatacggttttggcgggaaaatgtaattccgcaaatttctcgctaatttgcgattttattgttttggcgaaaaatatgatttttacgcttttggcgggaaaacaaaattctgtaattttcccgctaaaccatgattttatagttctggcgggaaaatatgattttacggttttggcgggaaaacaaaaattttcaattttcccgctaaacagtgattttatagttttggcggaaaaatatgatttcacggttttggcggaaaaaacgcaattccgcaatttcccgctaaaccgtgattttatagttttggcgagaaaatatgattttatggttttggcgggaaaacgcaattatgtaaatttcccgctaattcgtgattttatagttttggcgagaaaatatgattttacattttaaggcggaaaaacgaaattccgtaattttcccactaaattatgattttatagtttgacgggaaaatataattttatggttttggcggaaaaacgtaattccgtaatttttccgccaaaattataattgtcggttttgtttaaatttggtatttgtgattttacaatttttagaggttttaaaatataaaatgaaaaaactagaaaataattaacattatttgatttatgatgtaattttttagtttaataagggtattttagtaatttacaattttttactatgcatcatctaaaatcatctgaatgcatcttataaaatagacattttttggatgagtctgagaaacgcatctggatactccacccaacttatatgcaaaattgtactgaaacgaacatcaatttgcatctacggctagttgcatcagtgagatgagcaaacgaacatgaccatatatgaaagttgtcttttctttaacaaactaaaaaccagcttgtaaggaaagaaaagaatgtaaaataaagaaggttgctcagattcttgctgaaaaggttgaaaaatatcaaaacagataagaatgaaacagattatcagaattagtgaatcagtttgaacgttaaggggtttgcaaagtgtgtagaggagaagagtacagtcaattgggtaaaccacatgaccatgaaagaatctttgacggacatgttgagcatgcctactaacttatatcctctattgaattttgtttgtaaatgaaatacctatttttatttaagaaatagatttaaatgtctcaaaagcaatctaaaacgttaataagtatattttgttaaaatacaaatctatatatacatttttgcaagacttttttgaagataatgttgaagatttgagtcataattcaagaattatttcaaataggtgggtataacccggtttaactctgttcggatcctggataacatgtttaattctgttttgatcttggataaaattaatttttgaaaaagttacctaaaaaataataattaaaaacgaaattaatgatttaattaccaaatctaatataaatagtatctctaaactaaccatatttgttatttaccttaactaatttcttataataattctacctaatttaaacctaaatatataattcttctttcacttttatttgatcttatactttatttattttgaatttatatagttaataaaatattatattttattctgtatatgatgtaatttaaatgtttttaaacggacatatattattcaatcgatgaagaaataatatgtgtacaatttcccacattgcttagaaaaattggacaatggttcagagccatattataaaaatgacaaaaatgattttgattacaaatgagcaggaagcttgatttttcaggcgtctaaaattaaaatggttatccggtttacttgggttctttattttaaagaattgaaactttaaaatgtttcaaaaaattataaatattttaactttatcaaaagttaattattataattttaaaaactttttataaagtttatctttaaaaaatgttttaaatatttataattttaaaatttataaagttttaaaaattataattgaattttataagaaatttaaactttataaatatatgtaaaatatattaatacgggacgatatattacaggagaaatactcaatataacaatattatatttttttgaagtttcaaattttataatattgaaatttataaaaaaatgataaaattatgtttaatttcacgggactaggttatatggtaggacaagtttgggtggataataacatagaatggtatattacgattgtacaatgtcccacatcgcttaaaaattggacaatggttcagagccatactataaaaaggaccaaaatgatttcgattacgaatgagcatgaaaattgatttatgaggtgtccaaaattaaaatggtttgtttactagggttctttattttaaagaattgaaactttaaaaagtttcaaaaaaattataaattaaattttacaagaaatttaaacaaaataaaagatattaatacgggacgatatactacaagagaaatcttagatatattgcgagagaaatcctagatataacaatcaaaattcaatgatgaagtttgggtcaatattaatcttttttgaagtttctaattttataaatatttgaaatttataataaaatgacaaatttgtgtttaatttcacgggacggggttatatggtgtgacaggtttgaatggataataacatgggatgatatgttacagaaaaaaccctataattaacaatcataatataattatacaatcttaaacactaaacaaaattaacaatattaaaaaaaaaacacttaaaactttattttttttaaaacacatttcgattattttataagaaatttaaacattataaatatttaaactttatactacggatgaaattttagaattgactggtttgggttgataataatttgcgatagaattaggagttaaatcctagaatgacaatcaaaatataattatacaattaaatactacctcagatgaaatcctagaattgacgggtttgaatcgatattaatatgggatggtgtactacgagtgaaattttagaattgactggtttggattgataataatttgcgatagaactaggagtgaaatcctagaataacaattaaaatataattatacaattaaatactaccacgggtgaaattctataattgacggacttgattcgatatcaatatgggatggtgtactacgggtaaaatccgagaaacaacaatcaaaatacaattatacaatattaaacatttaacaaaataaacaaatacaacttaaaactttaaaatttgaattataaaattttgtctcgcgatgaattatacatttaaatcaaacaatagcataaatttattaaatcatcctacaaagtattctattattttttatttaataaaaatataggcacgcggtataccacaaattaatatctagtattatattaaaaaaatagaactctactattttttttgtaatctagttaaccccggttaaaacatttatggatctaccattaccattgcaaatcatatatataaacttgagctatagactttataatctaatattctaacttggtcacttttaattttaagtgtatagttgagaatacgtagtttgggaagataacaaattctaacttggtcacattttaaaaccaaaacgaaactaatcatctaaaatggttcatgagatcacagtggttgttacatcatggttaagctttaaccaaaaaacaattcaagccttcacactaaaccaaaatgttaaaattccggtttagctcaaacttgttgcacatgacaattatgacgtgtacacagctggaatttcaatttcaatttttcgaaacgggtcttggaatcttgatttttcaaattttgaattttcctatataacggaaaatttggagttagaccgtttgaagaagaagaaaaacctctacaaatctctctctgatatctctctttttttaagaaaaccctaaattttcattttcgcaaaatgtctagagatctttttttttccggtgatcttgcttgagtcaccgacgattatgatccagaaacaacgatctctcaattcggttaggattatcgattcgaaggtcagttatcaacctctcgaatttagggtttcgcagaggcaattccgatgattatgaatcctcaattgatctgtttctctgttaattgttcgattactgttactacatctctcgttctttgtgtatgttacctaatttgttccatcggtgcgttaatcttttggcgtttgatttgctcgatcgattttgttattttctcgtcaataccatctacgatagttttgtgatttgttgatttggttttgtaaacgatcgcgagattaggatatctgttttaggttttgaattttgtgaatggtaatcaaagatcaagtggtgttgttatgatttgtatttggtatagattttgttctgcattactgtgtttccggtatggttcttggtctgattcttttggtttacttttctttttttttagatggtgttgagttttctttgcctgagaagaagaagaagaagaagatggttcatcatagttaaccaaggaagcggctctaaccttaggtatgttaataaacacaaaatgtctttggttttttccaaatatttgatctcttcaatctttttctcttgcttgatcttttgatattgttctttaaatatgatgttaagtcacgtttcttctgcaggtgcaatttccagagcctataatgtggcgtttcttagaactcagaaaatagagaattctggattcgcaatcaattgaagaatgtgtgtacttacatgcacttattcgtatacacatacatgcctgcattcatacatacatacacgtttgcattcatgcatccatgcacgtttgcattcatgcatccatacatgtttgcattcatgcatccatacatgtttgcatccatgcattcatacatacatgcatacattgattagttgcctacttgcttcccttgcaccctcttttgcttctttgattatttgtcttatactctgtttacttacttcttgcttgtttgcttcttttttttcttcttcattccttgcttactaatcagcttccttctttggttacttgtgcgctaactcgattccttattttcttctttgattctgtctttacgtacttgttacatgcatacatctatgcatcatatttgcttgtacgtacacattcataatttcttctatgtttctttgattagttattactcacttgcttccttgattgctttcttcttttattttttcttccttgctttattaccagcttcttggtttgtttgtttcctttcttgcttccttgactcttttgcttacttgcttgcctttgtattttcttccttaattcctttgttaataggcttccttgtttcattgcttacatgcttgatttcttacgtactgtctttttttttcttacttaattctttggttaacttgcttccttgtttctttactgtctttcttccttaactactgaacttgttttaaaatttcttactttctatccttatcgcttgccattttctgactaattgtctcagtttattttccactaaaatgtgtactttgctttagatagtactaggttactatttgaaattctacagatggagactcttaaagggtccatcaaggcaaagtcctcgtcatcattagtgggaaacacaaggatcaagttctacgattattcttttctatttaactttctctcttcgtttcaaattttagtatttgttagttttaattgttcagggtttgagagcttggtgtttacttgcaacctgcttcttggattctctgacacaaggttttaatgttgaataccgtgggaatcagataatgtataactattttaacttatcttgaatcaatatacaattatatgaatcgaaataagctagagaaaggtttatatgtttgtggtataagcagtggcataagttgctggaaaacttgcatcatagagtaaaacaagaagatcaaccagccacgaactcccacttgtaagttaccatttacaaatctatggataatttctattggatatgacaatttgccttttgttatgtttgtcttgctggtcttgtatacatttgcactggtggaacacgttttattcgtatccgttttggattttgttagcttaaagcaccacaatccatagctaagaaaacgtgagagatcaagttctagagaaaaaaacaaaagctggagcaagattcagatttgtggaagtaaagcttttcatggtaattcaacaaaaccattttcaggtcttggtttctattgttttgaacttatatagtatgttttacaagtttttgttgtcttctcaaatcagacgcaaataatgtcgcggcgtgcctctcaagtttttggtctatcgcaatggagctttaaaactgttgtgcgtcatctttttgtttcccaagtatgtttcttcaattcttcttttatgcttagtctttcgagttactttctcttttcttcttcttttattcaagtagaagattatatagtctatgtgagtctcaaaaacaaaaaatgttctatatggagatcggtcatttatgagaactgatcaaacacccattggttggtttgttccacttttcacattgttttactttaatgcagccatttgagtccaaagtcaagatctacttagagcagtaaattacaaattttcacatgaagtaattgtttatttgttttattgaaattgcaaaagtgagaatttacttgaagttttgtggttttcttgaattggggaattttatttatttgcaggttttctttcatccttgcacggtgaagaacaaagactctaagagaacattatttatgaaacgagttatgcttctctgcttccctttccaggtttcactttgatttttatcagatatttgtctttgtgctaatatatggtgatgaaattctgctgtttcatatggatttcgttaatgtgttcatgtgattaatacaacaacgaatatcatgatttggtaaaggaaacatgaatgcatcaaggtaaattaatgttttgtaaatttagtgttcttgttccctatatctaatctggtaagccaatgtgatagtcgttatcagagaatgacataatttaatgtgttccttaatcgtgttccttgtttgggaattagtacaacattaagctacagagaatgacataatttagtaagagaaacataaatgcatcgaggtattttaatttaatgctctttttcttattctaatccggtcattcatatttaggttactgaatcataagaggcacaaagacttccttacttaggctcgttagaaaaagctacttactgtatatatgtaagtgacataatctttaaaaaatatgtagaggaagaaggatgctatctccaaagattatgtcacttacatatatacagtaagtaactttgcatccagaacgttatattaacaactttgtcacaacttctttataacaattgcgattttcagggtgtggagaaagatcaattctattatttgcagctatggcttccatggttgagaaaccaggatgccattgatgcaactatgtttgggatgcttggtataacccttttcggttcgaccattttcactaagtgtccaagaaacaacttcttatgtttgattgggatttgcgcaggctcgagctagaatcatgttcacttccttccattcaaccatgtggataagagaactgctttgacttacatcaacgacagtagtaaactttctcctgattaggtgatgaatcttcaaccttaccagcaaatgtctttttttatccttcctctttatactaatttgattttcccagcaatgaccttagaaagaaggtgctctcgattattgacatgtgtggtcttaggttgttggctgttgctttctaggtacttgtttgacattgatactcatagtttcagtcttcttttgttattcttttctgcgtggaaacaaatgttcaattgtatgtgttcttatttccctttttaggtggtactagataattcgaaggaaagccctggtgcatggtgcaacaacatatggtaatttgttagcttgttgccactttttgatccttacgacatgacaatactgaaatcattcgaaggttttcaaatctcggtgttaatatcaagatgatcactggtaaatgtgctcacccattgatctggttgtaatagcaatacatatttaccattttccactaacattcttttggatgacgtaggcaaggtgaccaacttgctattggtaaggagtcgcagacttggaatgggaataaacatgtatccctttttcggcttttcaaggagtacgcgcaagcggtaggaaccaacaaaccccatggacgaatatgtctctcaaaggtagcatgttatgaatatgttttagaactctttgtgagaaccaaacagagtttttgccacatgttgtagatttggcacataagagacgtagagaacatacttgttggagcatcaaatgattcctccaaagaaaatgatcatattgggaagttagtgtctcgcggctgaataggtaagcatgctcggagcaatacgactagcggcaaagtccaactgccattaggaacaacctgagagatactagccagtcgagagataccaaacactcgagggccaattgagctagtgatatcaaaaagaggactagctcttctaatcatcaagtagagctagtaacaaggtgataaaggagatagagtcttgttaacggccgaagcttgatcagcctcttccacatccagcttccagaactctgaaaatctacatcgacctctttgatagcgtgatagtcatgtgtgcatgcatatattcatatgtgcttacattcatacattcatacatccatacattcatacattcatatgaacatacatccatacattcataaattcatgcatgcatacattcataaattcatgcatgcatacattcatatatacattcatacatccatacatttatatatacatgcatgtatacaatacaatcatgtgtgaatctatgcctacattcatgtatatttgctttcttgattcattgattgcttctttacttacattgtttacttgctttcttctttgcttcttttaattatttgatttcttaactagcttgcttgtttttttttctctgtttacttcttgtttgttactttgattatttgatcgtagttcactccttactgcttcatttcatttcttaatttgtgtgtttgcttccttcttactcccttcattgtttgctcagaccatacatgcaattaacttgtttacttattattgccagtttctttatttcttttattatttggcattcgcttactcaactgattcattcatttgcttggctcttttacatgtttccttctttggtttgtttcttttcttctgtcgttgttttcttacatgcttacttggcttcttttatttttttgtttactcacctcattgttaatttatttatttgcttctatttagttctatgcttctttcattgtgtgtataaaagattaattttgaatatatataaaatttacgataagataattttgacaatatgtaaaatcgaaacactaataaatatttgaataaccaaaccgaacccgaaatatattataattatattgacttgatgtagcccaaaattatttttataaatccaaaaatatcaagtactataaatagatcaaaattactaaaataccaaaaataaccaaaaatcgaaaaattaaacaaaattttatcaaaatctaaccaattttttcattatttcggtacccgaatcgaagtagccaaaaccaaacgtggcacgcctatgccaccaggcctaaactataaaacccaaaaaactagaatcgaacctgaactagtacccgaacgcctgaactagtactcgaacgcctaggcctaacaatgtatacgtaaaaatataaaactttatcacatttcccgattttcattaattgtataataattcattatataggggtgtaacactttagctagagatattccaaaaataagtcactcgggattagaagtgggcgtttggatacccattcgttagggtatttctaaattttgggtttggatcggggtcaagtccgatattttgggttcggaaactggttacccgaagttctcaaaaatcaaaattttaaaaccaaatatatccaaactactcgaaaatacagaaaataactaaaaaccttgaacacttttgtattcaaatttactcaaaagtagattaaatacctaaaattattttaagtatctgaaaatctaaatattttgacgcttagattattgcaaatataaatattaatacgatcaaatgattcttcaactttttttgttaatctcctcattacttttaacaacaagtcaagaaattgctcgatttgttttgcaatttcttgacttgtcatcacatgtctccacagttctcacatgtcatcacactacttagtgtaccacaaaaaatctggtaaaccatactatcataagaggaaccaggagaatggagacatttgtccatgcatctagcaaattaaccagatactcatgttcatcttcatgtgcctcatattcgtgtatttttaatacgcgtagttaagcaatatatgataagctagaattatagtttattttactatattaattttgactccacacaatgcgtggaataccccctagtaaactataaaaaaaaatatgaatagaaagacgtaaatctttttgaccttgaataaataagaagcttaacttaacaagcatccaaaatgtatttttgtaatccgtttaattttatcagaaatattaaattttaaaattttatgattgtgtatcatatttaaactagattttaatccgcggtatatcgcgggacgatttattttttaaaagtaagatatattgaaacttgcaaattttattcttataaaatatttatattttacagtttataattgttaccacaatttttagcttaaagttttatattttatagtttaattttatatatactaacattatacataccacataacatttttggttttatataatcttttctaaattaggatgatttgatatgtttaatattaatggtcttaaaaaataataaattaaagatttaacccgtattgaaacggtgatttaattatattttactttttttattaatgttgattcaaaaacccgtccctccaaatccatcttgccaaaaagccatttattttattaatattaattttatttatgatatgactctaaattataatctaaacattttagctaataacatagaagtgcaccatatttatttaataggggaatgtaccatatgacccgaatgcacttttacccaaatccaccaaaaaagtcttgcaaaaatactatagagataagaaacgatagtcggttttgataggtataagattagcaaatatattagttagcttaaattagttaaagaatacaaattaaaaagatatattacactttattcgaatatagtataaaaacttatataacacagagatttgataattttttaattgttgaatacttttttgtgctaatttttatgtgattaagatttagttgatttcgtatataaaatattaaattgttttacgaacttatttgtttataatttggtaacagatagatatttgaatattcagtatattttgcttaagtttaggaaatctttgatgacccgtctttaaatcaaataagccctataattaagagatgaactaggatttaacccgcggtttaccgcgggcaatcggtttatttggttcttatactaaatatttgaataaatttgatatcctaaacttataaatataaattttttaatcagacataactaaataataattgagatttttttttggttgttatttagtgataagaagaatgtgttaaaatgtgtttaatttttcttttgttatttacttatttttgttgaacggattagattgaagtgaattaaaattattgaacggtttagattgaatcggatcatatcaagtttaggagattgttaagaccaaattacccttaatgattttgaatagcaaagaacaaaatccaaaattgaaatcaaaattgaggccaaattagacaaaatttcaatttgtacttcccttttaataataagaggatattgtcgttaaaagattttggtaattaatgacgtcattaaaggattttgtttttgattaaatttttctaatggcattgtcatgtaattaactacaaaaattaaggttaaatttaaaatgtacttcccaaataatatagtaggatacttgtaatttgtatcatttatatgatatttatatttatatttatattttataattgtcattaagtaacgatataccacataagaagtttgttttgtacaatcttatattaattagacagatgttatatgtctaacactagtgatattaataaataataaaataagaatttcatctgtattaaagtagtaggttaatgatgttttatttacttattaatattgtttcaaatccgttccgccatataactccgtctcggaatataactcatcgcatattattttaattttcctaatattataaacttttattgattttaaatacatcaatcataatattaataataatttaaatgaaaaattatagaaaataaatcgtgattgtcaagttttcacttttgataattttttcttgtaattagtcaattagtgttatattgtggagagttgaatagtctcattttgcaattttagaagatcaagggtatatttccaaaacattgcagttttgaggattcaacttgcaatttacccttttcaaaaatcactttcgacaattaccaaaaaccagttcccccatttcatttcacgctttcttctcttctcatctcagagctccgtgatgaagaaatggttagcaatcgcagcgacggtggcgataattgcaataatcgttagacaaggcacgacacaatacggatggaacaaagaggcggcgttggaaaagctaaaggaatggtcagatcggctggggatttgggcgattccaacgtatgtagcggttcacacaataaccttagctctttgtctccctcacgccgtcttctttgaagctggtgcttctatgctctttggtttccttcctgctcttctctgtgttttctctgctaaagttctcgccgcttctttctccttctggatcggcaggtctgcttctcaattgcactgttatgtgattcaaattgatctgttggatcgttagtttgtgtcgctaatgtacgaatttgatcgaaatgatttggatttagaacaatgattctcacatggcttatcttggcttcgtagaaagtatatgattcattagtaatacactctggtttagtttatgttatcgtgttttgtgaatgcttaaggttttacttggagatggtttagatttttctttagtgcaccattgttgaaaccttttgcagaacgtttattgaaatccattaaattgtaagcatgaatgataggaagggaatgtttgtgtgaagaaatggtgtcattgttggttattcagcggtaagataacaccgttgttcaccaaaaaggcggagaagatgcatgatattttcttgcgagatttagatggatgtcttcagattctataatggtgtttggataagagtggttgttgtcttgtgtatgtgacggagatgtaaagaaccgttagatgcttgtcatttgcttgttaatatatgctagggaatgatttgcaatattcacatttatgctggatttttacatggcttcatagaaactatatgcttcattagtaacactctgatttagtttaagttatcgatttctgagattttacttggagatgtagaataaactcttttgttggttttgattgtcctgctatcgctgaaacctccgtatacagaagttttcacgaaaatccattctactctaagcattataggaagtggatctttgtgtaaagaaatgatgtcattttggctgttcagaggaaaactaacaccgttattcgccaaaaaggcggagaagatgcatgtcttcctattctataatggtgtgtggatgagattggttgttttcttgtgtatgtgatggatatgtatggactaattgttaaatgcatgctgtgattctaattgccaattaatatatgtaggagaatgcaactaggatgttgattaaccttagcaatgtgatatgcagttttatttatttatctatctattgggagcacttgcattctctcatacttttttgaattttcaggtttgtttttaagagttccaccagagctacagggtgggcgcatagcaacaagtacttcaatattctctcaagaggagttgagcgcgatggttggaagtttgttcttcttgcaaggttctcgcccattccttcctatgtcataaactacgctttggcagctactgaagtccggtttgtagctgattttctgttccccacggttattggctgcctcccgatgatcctgcagaacgcatcagtcggtagcctcgctggtatggctgtggcttcagtagctggaaaacagaaaagtcaggtctggggttatgttttcccagtacttgggatactgtcaagtgttctgatttcattgaggatcaaaaagtactcagctggaattacagaggcatcatcagatacctctgctaacaactctagtttagcttcatctgaaactgcgaatcccgcttatggaaccgatggatccaagaaaagtgagtgattatacaaaccatgatggtggtttttgatcgccggtattacactttgtttggtttgcagctatcagattctcaacatcatggcttattttggacgagttaggcagtatcttaatagtaacaaagcattagtttttgtacttcttaagttaaaagcttagaacaaaacaacagtgttattttctataccagacacaaaaactgtgtcgttgtaataacacttaccataacattttctttcagtgtatgtttaaagccgtttatatggttgaagcaatgtgactaaaatttttgtagcattgaaacaagctatatttgcattgctatggtcttgttttgtgactaaaagacttggatgcagaatggatataagttaaatgtctgattttgtaaataacttatgaagagaaaatctttattcggtaagagttgttttctcaatgtagcagttcactcatcattttcaaacttcaactctcagagaacacaaagaggttagacagtgcagatgcttatggttgagaagctttacctaacaatggtacaaggcggttttgttgggatcacatgtgaagttaggcacatggattcgttcttggagttggtacaaggacttctaaaagacaacaatgaggtataataaggacaagttgactatgtctctctcttttatcttaacattctaaattaggatttggtaaactgagagcagttagcttcttgaatctctaaagtataaaaaccctcaccgttttactactatctcatcttaaaactcccaagtaacaaaaatggctatctcaaagcttattcctactcttgtgctctttgttttgttctcttttgatgttagtgttgctcatccaggtctaggatttggatggggaagtaatagtcccattggaggatctttttactcaaatctttacccacaattttaccagttctcttgtccacaagctgatgagattgttatgacggtgctcgaaaaagccatagctaaagaaccaagaatggcagcatctttactcagacttcacttccacgactgcttcgttcaggtaaaagtatctttacctatttttgttttccctttatgtgtctcttaagcttaacacttatacactacactctgtgtgtaaacagggctgtgatgcatcaatcttgttggatgatagtgcaaccataagaagtgaaaagaatgctggaccaaacaagaactccgttagagggtttcaagtaatcgacgagatcaaagccaaacttgagcaagcttgtcctcaaactgtctcctgcgccgacattctagctctagctgctcgtggctcaactatactggtaaaattaagagaccttcaagagaaactattggctcagttacaagttatatagcttatatttatcgaatttgtggttcaatgcagagtggtggaccatcatgggagcttccactagggaggagagactcgaggaccgctagccttaatggcgcaaacacgaacattcctgcacctaactcaactattcaaaatctcttaaccatgttccaacgtaaaggtttgaacgaagaagaccttgtttccctatcaggtgagattaacatgtatttatcttttgtttaaggagttggcaaggaaaccaaaccgagaccggtttcttaaaaccgaatgataacaacgtttttaaccaaaccaaaatgttgcaggaggacatacgattggagtagcgaggtgcacaacgtttaaacaaagactatacaatcaaaacggtaataaccaaccagacgagacgctagagaggtcttactactatggtctcaggtcaatttgtccaccaacaggcggtgacaacaatatttcacctctagacttagcctctcctgcaagattcgacaacacatacttcaagctccttctatggggcaaaggcttattgacatcagatgaagtgcttctcactggcaatgtaggcaagactggtgcattagtgaaagcttatgccgaagacgagagacttttcttccaacaattcgcaaagtcgatggttaacatgggaaacattcagcctcttactggttttaatggtgagatcaggaagagttgtcatgtgattaactaaagaaactgtgtgtttttgcattattattgtattaaggggtgattaagaataagtcgtgttatgtttttcgatatgttagtgatctaattaacgtctttgaatgaaaatggacggttgttttaagaggtgaacatgaaaatatggtagtttttactgtattctttatttgggttgcgtccgtcttaagacaacaagtatcttcagactgcagttgtcaaagcgagtaaccctgtttaaatatttgtaagtaccggtcacaaacaagtacttagaatgatacaatattctattaatttatagaagcattatttatctataaattatacttattaatttatagaaagttttttctatccactaataagattttttcattataaaaattatctttctagaattaattatcaatgtttagaagacaataccaaacttttttaatgcaataaaaatatttgaaatgaactataacaaaaactaatgcggatttaagaaaaagcaaacaatattagagttatatttcactaaagttttctaaataataatcattaaaaattaaaattagattatcgattttattttaaatgtaagctaatgaaaacaggtagcaagtattttgtaaataactagatctggaccttcggtgtatcatgtttctcactttttcatttttgattctttttaagtatcatgaattatccatccatgtgaacaatttggcagaactggaaaaccgccgccgcgtttccacaaataaaatctacagtgtccataagaaagtattccctataacactggcggtttttgtgaggatacaaggcatcctgatattcctcgacacgacatctgtaaatgatggacatatcaccattcacacggagggtaacaactggtcctttcaccggccatgtcgtgtttcggaagcacatgtctactctgatgaatccatcaccattagaagcttcgaacatatttttagtatgatgtctttaagaatgttatagtttggtataaagaagagaaaactataaactatttaagaagagaaaattataaactattaaaaaagagaacacaaattcttaccaaaagttgcggtgttgaacgttcttttactattgctagagcttaaattgaatgtgatgatggttgaatcttgaccatcagcgataagagttaaattggatttcatattcccaatgacaacgatttcaacatagatgcttgtcttaatataaatgacgaatctcttttggctgtgttgaggtgccgctgcaatggccacattcactatattgtaatttccggtcacatccttcgcgaccagaatatcggtaattttctttagagtctgatttataagaaacataagaaattctatgcgcattagaaagaaaaaaaaagggggaattgtttctccattgttgcttaatttctgggaccatattggtttttggggtttatggttattcataaattatagtgagccttttgtgatcatgatgcccaactatgattgtttttatcagaaacattgggctttagatttttgggttattattttcttggtccatcttgagttttgatatctttttggttaagtttttatataaagatatgatgagctttttgtgattatgatgcgcaagtaacaacgtttttaataagaaaatttaatgtaatgtttttagagaaattacctctaatagctccaaaaaatattaatcaagctttagaagaacaaacatccaaaaataaaatgaacataatttaattttttccataatcaaattagtttagtgaatctattacacaaagtgtatatatatttacgttttttcctgaaagattggtgtattttaaaggttaccagtttatagatagaaatctaactatacgattatcaaattataactgaaaaatattaggtttttgttttatcacctcatcattgagatatagatctttcttgtcaacgtgagataaccaagacgggccattgggaaccaccaagttaagttcggtgttgtctctcagcgaaatagagataaaaagggctaaagcttctcttgccctagaagtgaggtcctcaagctcaggatcgacccgacgtttatacattcaccaatttcgtcgatatatgtgatgtagctagtaagaacgccactggagccaagtgtggacgtttcaagatctaagattagggaattctcctcctaagatttcattcactgaacggatcattctattttctgccactccatcatctcctcaaatagatttgtatcctccttcacaccaagcatatcattctccatgtcctcatgtagttttgaatcttccatcacaccaatcatagccatgtcgatcctccgcacggaatttttcaaaacgatgatcaataactcacgacgtctcatctccgagagtggtgcggaaatcgtcttaaggtccaacaaaaggttttgacatgactgttcatctcattctttgctaacgccaataaccgttgttatcatcaagatcgaaaaagaaaaaaactttaaccaacatttttgaaagtttttttttttctttctttcgtctctctttagaatttagattatgtgaactgaggaaagaggagagaggtatggtggtcttttatacaagcaaaacaactaaatcaatttaccttttaaataattgtattcaataaacgacaatagttaggaaaaaaacttaattttgagatcaatctaaacagttcagtgcaatgtgaattgaagctataattcagtgaagtttggtttaattatctacaaagagcaattcttaattgcgttgtattagtttcaagagcattccatttgaaagattattatggtcatcttttcacatgcataaagtcataaactaatgaaaatttcttagcagtcaaagaaacaattatgcatgtgcaagtgaaataaatgtcttaactaaaacaaattggtagatgattgtaactttgttttatcttttcttgtttatagatagtttttgtttgtatctttctgaaaatagtataaagactaaagttgtatttaatgtatggtcttagagccatgagggtggagagagagaagtagattttgacaaattaaataaatatatatatatatatatatatatatatatataaatttggatttgtccaatataatacagatcaaaataattaaaaaaaaaaaaatctttgatccttgcaaatgaaagttttgcaatatgtttagtttaaaaactatttaacctgttaaaaactaattctctttttctttctttttcaattagaaataaactcattaaatccaagaaaaaaattatttttgtaatttttgaattgttcaataagaatccaaattttaggcgctaaaatcaacattgaatcttaaaggtgtgattggtgggaagtgagaactaaaaaaaaaatagaaaatgaaaaactgaaaaagttaagaaaaaaatagaaaagtggtccaaaaatttcaactaataaaagatagaaagaaaaattgtcttactttatcctttttaagagaaatttagcttgaatacttgttttccatgtactttaaatggctaaaaatgaatttggtagaaattggtttcatccattttagtttaggctaacaacaatgcaatatattctcaaccttaatctcttgcgtgtgaggacaatatattttagtttacgctaacaacaagacaatatattctcaaccttaatctctcgtgtgtgaagacaagacatagccattattattctagtactaaataagacaatatatgcctaataaatagaaaacccgtaggtgttttttggagtaaaaaaacattaagtgaaatttgtaaaactaaccaacaaataaattataattaagaaacaaaagaggtatgatattctgtgtataaactacaatataaactaaaatacccttattttttcttgttttttagtcattactctagtacactataattaccatcaccaccatgcgctgcaaccatcaccatcatcgcaattcgcaaccaccatcgccatgtcgtcaccagcactaccactgcaactgtcgccaccataccaacaaccatagcgctgtcactactacaaccatcaccatcatcaccaccgaaactgctacaccaccgcaaccaccttaatcacgatcattattaccatattgctactaccccgaccaccgtaaccatcaccaccgcaatcaccatcaccactatcaaaacaaccagcacgtcgttaccactaccaccaccatcgtcagtccgtcaccaccactatcaccaatttttgaatagttaataactttttcttttttttttatctagaacactttgtcctatactatttattctattctatataccgtttttcatttgaaaatatacatcattttcaatttttgagtttatacaagttttacacatataattatggtttgggtataagtttttttggtttagcatttagtatattaaattaaaattgatttatgaatgagttatgaaaaatagtacaatatattcttgttctattcctatacatcctaaatagtacaacatatttttacttacacatactattcaccatttcacaaatttacatctaattttaaaattttaaactatgcaatatgtagaaaaatatggtttttgtgcaaaaaatcctacaatacaatttttttttaacccttcaattaaaaaaaaatgcaggtcaatactaccaacttgaaaagtgagccgcaatataaactacgtcgttttggatattttaaaataaaaaggaatgtttcaagagtgttttgaactcaggacctctagaagatataaaaccttacctaaccaattgtgccacataaaatttataaactcttaacaataaataaatatatatatatatatatatatatagacagcctttatgttcaacctgaccaatgcaaccaacgatctcatcagaatcacgcccctacatatcgcatgattcaattttgtaggctctacaaccttccattgagatggcaaaccgccattggttgtttaaaatcttatgtagacgctctagaagaaaatagtctcgacttttttttttttttaaaagagcagttatgtatttgagaatgtgccggagaaaaaaaacaatactattatatatcagaattgaataatacatatgataaatcatatatataatggataaggctaatgtgagtgtataagtctccaatgcttcaagctgattgtaccaccaaatctttttcaaaaaactaaaaattaaaaattaaaaataattaaaattttcaaaaaatcagaatttaggcagaacaaattgcaataaagtttttatttcttgtttctacaaattaaaatatttctggacgtattttttaatcttaagaagataggtttctttaattaattttttattctttattttaatttttggaattgaacagaagctgatgaagtgaatgataacggatccacccagccggacccaaatagccccaaaagcccttaattcatagctaacttaacccattcctcaagaaaacaaaattactttaaaacagaaaaaaagttgataaattgcttcagtgtcaaattctgagatctgtaaaagatgagcgacggagacgacgctgctagacgccgtaccgcggcggtgactgattaccggaagaagctccttcatcacaaggagctcgaatcccgtgtccgaacaggttcgatttcaaaatcttcctcattctcctctttcgttttctgggtttagtttgtgggtcaaaatcgaatctagggttttttcctactcttcgttcccattagaaatctcgagactttacttcaattagtgacgcgattttaggggttttggagtttcgaattgaattggttccaccgtttgtttcacttgattagtcaattttgaagtcgatctcaagcttaatttcacttgttatagttcttataaactgggtcttgtggttatatgcagctagggagaatttaagagcagctaagaaggaattcaacaaaactgaggatgatttgaagtctcttcaaagcgttggccagattattggagaagtactacgtcctcttgataacgagcgatgtaattttctatcttgctaccttatgtttttgattgaatactacactttgtgttttctatcatctaaaggtggaattttttcttcttctttttagtgattgttaaggcaagtagtggccctcgttatgtggtgggttgtcgtagcaaggtggacaaggaaaagcttacttctggaactcgagttgtcctggatatgactacgctgacaattatgcgagcccttcctcgtgaagtatgcttgatttcagtatttttgctttttttttttgtagctgcttagtgtatttgtactggttttaattcgatggtatgtgttggtaggttgatcctgttgtttataacatgttgcatgaagatccaggcaacattagttactcagctgtgggtggtttaggtgatcagatcagagaacttagggaatctattgagctgcctctcatgaatcctgaacttttccttagagttgggattaaacctcctaaggtacttgatctctctccagtcctttcttttgttttcacaaactatctcatgattcactttttatgtttccctgtgccgtggttacctgcatgaatggctaaaaagagttgaaacgcacttcaatttccataatgctaattttcatttctctcattccagggtgtccttctgtatggacctccgggtactggaaaaactctactagctagggctattgccagcaatatcgacgccaacttcttgaaggtttgattttgttgttgaaggtttggtttggtgttctttttattataccttgtctgtgctaaataagctctttttttacctttatgtttaggttgtatctagtgcaatcatagacaaatacattggagaaagtgctaggttgattcgagaaatgtttaactatgctcgtgaacatcaggtagaataccatctctttcctcttgtcttataccttgatatgctttatattgaagttcatgaattgtctcttaacactccttcttgggggctagccttgtatcattttcatggatgaaatcgatgctattggtggacgccgttttagtgaaggaactagtgctgatcgtgaaattcaaagaacacttatggagttacttaaccagcttgatgggtttgaccaacttggaaaggtatgacctatagttttagaatagtactcgtgcataaaactgagtggttacggtgtgaaacttgcttgttggggataacttagttcaaggtagttttgttttataactcatgtttcaagtggttactttcattgttaaatttatctgtttcccaaaattatttgtacaatggaatatcttctgatacttgggagataatactattaggtgaaaatgataatggccaccaacaggccggatgttcttgatccagcacttctccgtccgggtaggttagatagaaagatcgagatcccgttgccaaatgaacaatcaagaatggaaatcctcaagatccacgcatctggcattgccaagcatggagaaatagactatgaggctatcgtgaaacttggagaggtttgtttgtttttcttaaatgtcactgcgttgtagtttttgcctttgttatatattatagatcccactgattgttccattcaatcaacatccttagggtttcaatggtgccgatctgcgtaacatatgcactgaagctggaatgttcgcaatcagagcagagcgtgactatgtaatacatgaagacttcatgaaggtagaaacaaaaataaatactccgcatgtttacatatttttttgtacccaaacttttctgcttatcaaattgtctgttgtacaggctgtgagaaagctgagcgaggccaagaagcttgagtcgagctctcactataacgcggattttgggaaagagtaagaaaagaataagctcagagaagaagagagggcctaaagggcagtgaaaaactctgttattcactttgaaaaaacaagctgatgattctgtttcagtttctcaatgttttgttttgaggttctagtaaacacaaaaattcttgttttagtaatgacaactattttctgtttgtcctatatttttttattttattttctgatcaaacatgcatcctgtatatctaaaatgtcagaaaactcaagtgtcgtaatcacaaatcttagcaatgatttttcatataaaaaatgttacaaaaatcaattattaatttataatattagtgggaccatatttttatataagattttttaaaaaaattattatcttattattttatcgattttagttaatttttatatttgtccgatctggaactagcaaaatttattaatttttcttgtttattaatttataaaatttatactgtattcctatcaataacgatgagtgctacaaatgtgtgaaatgcgattcagatcttcacaaagtatttgctagccttccttgcaaaaaatatttactgcacaactataaactcattctacaacttctgtgagctaatcatatcctattacgaatgatcaatataacttttacgactaagtaatcatttctatagctttttatggtgaacgattttgtcgacgactttataactgtcagttctatatgtaccacaaagattaacaatagatggttctacatgctgatggtagacaattttactcttttgaaaaatgaaccataatgaacgttaatttttgtcttaatctattgacaaacgtaaaagcatcctcaacggtgaggctctctgaaatgatcattggattaatagaaaatattaattttatgattttcttatttaattaaatttataataattaattgaattccatcaatagatcaaaacatggtgaatcatcaagagactcaaacatccatcctttcactggacctgcttttgcaacaaatacacctcgtctggttgaaattggtgaatcatcaaggcaaagtgagaatacagtgtctgagcacttgatggaaaaaggggattcatctaagagaaagaatatggctggtcctaggaatgaagaaactgttaggcaacacaagcatcaagataaagatcaaatgataggaggtattctgaaacctcctaaaaaacgttaacactctgctaattctgtcaaagtttttgtttaggctgcaatggaggcagcttaaggcgtattggttttttgatttaggctgctttggtaactagtttagttcggcagctgttgctttgaataactatgcggatatggtcatgtattaatttctggttatggcatatctgctatagtttcgtttgctttgagttcaagtggagacagcagctcctgggttgcagaacgatgaggatagggtcattttaagactttttggtaatgacttatctgttgttggttctgtttaaacatggagttcttgttgttttagtttcaattccatgttgtagttttctgaatgttgtcttatgctgtagtggaagttccactttgtaacttttacaaaactggtttgaataaaaggcaacttatgagaaaaaaaaaaaaagatcaaaacatgtggtaagtgaagtcttaaaaagtaaagacacggctcttaaacgagaggtttaaagtcggttgtttcacgagtgggtctctctccatttttttttttattgtttcaatttttcgaatttgtgtgagagttttctgttggaaatggtctgagacatttttttattattattttattaataaaatagataaatgaccataaataaaaataagaaaaaaatatttggattgaatcagcttttgtatatctctaactaagctaagtagactttttgtttgactttggcttcttaaaaagtttatatctcatcatcccgaaaattttatagaaccaaaagatgctcacgagttgtaatcctgatcccattgcctgtaaaaaataagtccacatatcattaaagtatcatattcaaattgaaaattatgatatactgagagattaatcgacataatatatatactttagatgataaaatctatattttggtttggagaacaatacttttgtgttacaaaaaaattcacatattaacaaaacaaatggagaaattgatgaaatcaaaatatgtaactaatgtaaaaccaaagcaaaattaacatattataaaatatgaagatatcttgttgacgaaaataatataaacacaatttcttggtagttgggaaagatgaatgaataaataaataccttgatgaagatgggattatcagctgatagactgacgtaaacgaggaaaggtccacacacaattctcgccaatgtgaatatagtggcaaaacacacctatcaatatcatcagttaatataaagcatgtcggtgcttaagtttttagaagcttccttcatacaataaaatagatttaactttgacttaatgaaatattataaataaatctagagaagtagatttgggttttacaggaagacctaaactaataaatcttcaacgtcaattttttttctttttctttaataaagtgtgaaatttatagatcgaaagataggtctatgtacaaggtaaaatgtcataatctaaaacaggtatctaagctattagaagcaaaaacagaacataacttagggataatgcaggtgtgaccatctctccattaaacaaaacgtcaaaaaaatttaacaattgcaattgaaagttgccattcaatggaattaaaaccataacgaccatagactttttttttcttcatatccaacggtggtcccggttttatactatccaactacataataagtatagccgtcatcgaactagtgacctagtgtagacagtttaagtcaaaaatactcgatgattgtgcattattccattttctaaaagaatatacaatcgttctgtttgcatttaactaggagttgatgatggagtaaagactacattaacatgttttaatatctatccatttaaaacttgtttagatcacacaaaaagatgatatatgtatactcacatcggcagctagattgagtttggtgtctttgtatccaatctctttgagaatctccctaaggtggaaaaaaggacttgatatctctgctacccacagtgtagccacgatctcagatccagacttcgaaacaataaatgataccaaaacttagtaaccacaaactctcatatatcttctaatagtaatcattgatttcgagacaaaaacaataaaaataccttttggtatgcaagtccagctataaaaccaagaatgctaacgaaatgatgaaccgcgttatcaatgctaaacacttgatcgaaatgacaacatattagatcgtagatcatgtacgacaacgaaaacgccatcacgtccatctgttgtgtgttttgttttatcaccagtttggttacaatgtgcaaaaagagtgattatatatagttaagtgaagtgatgatgtgattaataagaacctgtttatgagatggcttagaagcaaggggacaaacagggcaagacaaatcttgaacagagagtgttgctaaagtgacagcgatagtcgcgtgagccgtggagagaagacggttgctgaagctgaatgagtagcttgagaagattctccgggtgagaatgaaggccacaccccatgagatgactccaaatactattatcttaattgctcttacttgttcttcctccatatgatcacttgatctccttttttcgcaagccaaggcaaaattttgttgtgatgacaagagagatggagaggaataaaaacatttcagtgatgttagtagaccgacattattggtggtatgttagttgggaattttgggattcaatggtgtggatcccatacacattaatgtttctgttaaaaattgacctataaagatttgatccaaagattttggaattatttcgtctagctctaatcacccaagttatttcctttaaatggtgatcattttttttgtttcttagagtatcttaagttttgtccgaaaaaaagaaaaagaaaaaagtatcgtaagcaagaaaaagaaaaaagtaccgtaagcagtagacattatgggacgattggtaagggtgactgtaaagactttaactttaaaaatagtaactgtagaaagtttggctgcagagactttgaattttaaaatctgatcggtaacaaaagctttaaaaactgttactgttatttatttatatttattactattaaatataaatgatatcaaaatttaattatgttgtaacatagtgacaaaacaaatattttattaatagtaaaaaaaattaaaatacaaaatttcttaaataaatattcataacaaacaaaatgcaaatctattactcattcatttaaaattttaataaccaaaatttgcattaagaagtgggataaagtgagaaaaattatggagcttcaggattattatgataaatgttgttttgcttcgtcaaattatccaaacgatttttcccttgtttcgaacataaattacttccaaaattattattagtattctgaagaattctttctttttgaatagcacttaaacctttttttgttattattcaaattttaaatgaccaacatgaaccttatattgtttttgaaaaatgttaattatgtaaactctcttacacttacattaatgttgatgatgaaaataaaataattattagtaaaacagatcttaaaagaaagagaaaaaactaataataattaatttaagaaaaatgatttgtgaaaaaaataaatataaacttgtggagatttttaaattatcatggggaaaagaaaaaagaaagtttttaattttattttgtttgaaagccatgtattccagactttacaaaaaagaaaagaaaataaagaacatacaaaaaacttaaggctataagaactcattgaaaaactaaagtaaaaaaagcatgattggcaaaaataaaactttgaagactttagaatactctcaaacccttgaaagttcttgccaatcactcctatgtgtttattacatatggagtgtgtaaagagactaacgaccaacaactaacgacctcaagacaaaagcactgcatatatgtcttttctataaaataagttgaggtcaactaactgtatttttataaaagtcgctataagaaatttgaatttgtttttttaggtcgacggaatttacttacttccaattagattctcaatcaaaagcggtttagaaatattaaaaattgactatacagttattcaaaatatcaagttatattcgttttatcttgtcgtattgatccacaacaaaccaaataatatattgggtgaattaaatttcactgctcagacgaatgcgaaattaggaaagtatgagtgatgatttcatatttagttctctctcctcccgacaacaaattctgacatatttgcccctactcagcagagatattgttggatacgtaatgattgtgcaacatttaatgcccctgaaaaaattattgctaatgtttcttacatggaaatatatccttaacataacttcaacccaagttgttagtgggtaagacatgtatatgaattagtataaaaagaataatgatacagtttaggatgaactaaatgtggcaataatgtaaccgctacagagcagttggagtcgccgaagcaggacacaagtatgaagataattaggttagtcgataataagttatttgatatggtatcatagattatattagaagatagttgatagaagataagaataaataagactatgcccaatagtagaagacgataaccagatagcagataataaagttaatatagttgtagggcttcaccactcgtaatgaaatgttgagttattacacgtgtagtgagagtaccgcaaaaattcgtatacggtaataaagtatccgataataaatccgttaggggttaaaacttcaacacgcgcaataaaatgtcgagatattacacaaagtaaaacaatatgaaatgtcgagataatgagatagcagatattagagttaatatattcataatagagttaatatattcaccgctcgcaacacgtgagacgaattctgaaccgcaaaaattcgtgtacggtaataaattatctgataacaaaccaattaggagttaaaacttcaaaacatgcaatgaaatgtcgagataacgagatagcaaataatagagtttatatagatataggtcctctcgcaatgaaatgtcgacttattacacgtagggagagtaaataaaatgtagaattctgaagcgcaatgtcggtaataaagtatctgataataaatccgttagaggttaaaacttcaacacgcgcaataaagtgtcgagatattacacagagtgaaacaatataaaatgtcgagataacgagatagcagataatagagttaatatattcataacagagttaatatattcactactcgcaacacgtgagacgaattttgaacagtaaaaactcgtgtacggtaataaattatccgataacaaaccaattaggatgaaagagacgaagaaaaaatatgaggtaaatatagattggaccgaaacgacgcctcgattgaaaactatcaaaataatataaaattttgattcacccaccaaaatatccaaaacaagatcttctactattcacctgacacagagaaatataaaagctacgtttagatttttactagacataggggtacatgcgtctttatttttgcaacagtagcgccgaaacttttgggaaattagaacctaaatactgaatccactgagcatacctagtgcaatttccctaatatatttctataatttcaaaatcatatatttgccaacaaaaataataaattccttgttggctagctacaaatttagtacaatgaaaaattaggagtggttcaatatcttttctcacattaatgagatttaatcagcagcaaccaacttgttggaagaaataaaaattattgcttataagcattcaactttgtggcataagtaaaagaattcaaatacaaattctttcacacaacaaaatattggatggagaaggatcaagaatcatgaagtagaaacgagtgcaatcaccaattatatttcatgatatggttacctatttgacaatcttactattagacatctctagcttcccttcctattgcttaattgttgatcatttatttttgtttcttagaattcctttgagtagacattatgttctttttacatatggaatgtgtaaaaagttactatatttaatcgatttattttaaacatttgaattttgttttaggtcgacggaatgtactaactttcaattaaattacctagtcaacactacaactagttttgacgatacaaaataggttagcatatattaaaaattgacgttcgggttattcataatatcaagttacatttgttctgtcggtttgatttgatgcacaaaaatccaaaaaacataattttgtagaaaaaaccacacatgctataattctttcgtttccctacgaattaatagtctgtaatataatcattgggttaagttattcaaaatcgttataatagttttctcaattttaaaaatcggctaacagaaatatgattagacttcgtagtaatttaatattttttgctgttcaggtttaaaaatgtatagtatcatattttgggttggaaaaagcatccaacaaattgttcttactgattttggccatttttccacacaatgtgcatagttttttggtaccatgtcaaaactatgtaccacattacctatatctaaaataggttttggtgatacaatattgcgtcgcaaattcaaacaatacaattcattaaaacttgctataaaacttgacaaaatatttgtaatatccactctattcataacttcatggaacaaagtagggtgagttaagaatatatacatggaagaagttttaattaagaatgtatacatgtagatttgatatttgggtgagattaatcttgcaacacaaatattccaactatacccctataagtcagagatatttgtaggcgattgaagaaagatatagtgcattaaatgcgtcgacagaaacgggacattaaattagcatacctttagcagctacatatgtaactaacgataacataacaaaacaagtaagcaaaatgttatcgaactaagttataatctaacatgctgatgattatccccctataaagaaatttaaaaccaaattaacaatattgaagacaagcgggttacgaaaatgttacccgataatagtgtgattaacaattaacaagccacacaaagaccttaaccaaaggttgtcaactacacaaccgttttaaatatttattcaacacacaaactatctaacctggtcgttaccgactgtagtgttgtcgcctcacatatcaatgtcgccttacaatagaagagatacagtcggaattgcgaagctaaagaaggagtaaaaactggatattttgtttgttgtcggatatgtatgttaataattaacaatctgttttgtgttatcggatatcagatattttgttatcggataagtatgttaacaatcggatattttgtttgttatcagataagtatggtaacagaagagatacagtcggaattgcgaagttaaagaaggagcaaaaactggatattttgtttgttatcggataagtatgttaacaattaacaattttttttgttgacaatcatttattttcgtttccgaaaaaaatgtatggacgaagtgacactaatctaacataacaggtaagaaaaatgttatcgaaataagttacaatctaacatgccgataatcatcctccaataacgaaattgaaaaccaaattaacaatattttttcacggccggttactaatttgttacccgataatagtgtgaataacaatcatgttggacaatggtatttctcatcaattatgcgggacaataatatctgttgtctgacataatattaggctaagggtaataaaaaaacttaaaatataatagagggatacaatagtatttataaactgaacatagaaaaggaaacagtagtataatgagtgacttaattttacagttttctgagtacatatagtgataatacccaacaaagtatagtaaaagttaatatttgttgaaacaaaaaaaattcacaaattctaaaatctgaaaacatagatattgttacactttctatacaatttactatcatggataggttatagataaagtgaattgcaaaactaaccaaatataataattgaattaaaaatctcagacctatttgaaatattaagaaagtaacatatatagtaagtaaaatgaccagaggtgaaaatggtggtggtggcttcggtccggtgatggtggctccggcaactgtgtctcgaagacagtgactccggcggtggtgaagataataaaaatataattgtatttaaattgtttatatatattgggttatatatatgcaaatttctataaaaatcaattcgtgttcggcaagagcgtgtaataaaacatgagaaattgttcaatatcttttcaaaggcaacaaaataaaacaaaaagtcaacatcgtgttggaaactatgcctgaagccaaaaaaaatactaaattttatagacgaatcattgaactcagttaatactttatttctgaaatcattacactcaatttttttaagactcgcgcgttactcgcatataacgggggatatataatatagggatatcgttttgatctgatcaactaatttagcaaaatattataatctactagactataaaatagtaagcattaatcaagcataagatgtattacacacttgtttgtcaaaccaaacaaaaaataatacatttttcctctttgaagatcgacgagctgatcaatggcgaaatctcactaccagcctctgtttcttctccttgcatcactcttgttcttgcctgctttgcatgccgtcgattttaaatactgcaacggtacgtatcaattttttaagtcttaagttactttgtgggattttaccgtgttgatatataacacctattcttgttatttgatcaatcaaaagatttagtttgctcctatctctatagataaaacacctactccaaattaattgacataccaattctctttccataatatttttgtaaactacgagagaagtcaaccctgtagtatctcgatgtgaattcctaccgaggttgaccagatcagccagtagaatttatcatatatatatttgcataaaaagatatgtagacttgccatctttgcaactgttgtaggtattggatacgtcgataaaatcactaaagtggagatttctcccgatgatccctcaactgttattacaatctccggtcttacaagtaggcaatatattttctaatttccgtttcaaatttctaactctctttttttctaatatatattttcttgatatgatccttttatgcatatataggaagaggactcgtctatgctggaactgtagtcgtggccagtggaattggcgaatttaatatcccttttaaatactacgacttttgtcagttgtgtaaatgccctatgctaagtggcaccaactttgttttcactctttctcaaattctcattccaaaagcttttgcggtaactattcttagttttttacccttttcttaaagaaacaaatctgagataaaatgctgaactaagcactctttttctattttcttgtttttataacatgtgttcgtagagtgacaagcttgctgttacgttgagtttaatatctagagatcaaacagaaggagtgtgcgtctacttcgatttccctacttcagctaactctatgcttaatcaagctagcgaatgaaaatatgttttcaagtctttatctatattagtctctctctcgctacccttaaccgatttgttatgttgtattgttggtttggtttctataatccgggacgttatacccaagatgaaattacttgatgttatggcttctctcatcgttcataaaatgaattttaatttattttccaaagaaatatatcggaaacgaaaccacgatgatctttaacaatggattggctttcaacatataaatactagataaaagtttgtgtcatgcttctgctttgattttatgagtagtttatatatatatatatattgttaaattatatacattcgataaatataaaatatcattgttctaccttaaaataggtgtgcagattcatatagctagatgaaaggtaagaaaatgaggtagaaaaacaatttttataaaattatagtaaaaatgataattgtgttgaatagcacactgatgaatcttctatttgtatgataaaacttgtatgactttttagattatttcttcattatatatatatatatatatatatatatagaatttaccatattataataacatgtccaaactaggaaacttaaaacggaaacgtacatagtgccttccaaagcgagtaacacctatacccgcgatagaaggacaatcacagaggacatgtaagatagtctcttcacctccttcacaaacctgacatgtacttgtctcaccaatgtgtctacgaaaccttttttcatttgtcataatcgcttggtgactaaccaaccacaaaaagctcggactctctctggtgcaaccactgtccataatcgatcaaagaagcttgacatattttggcttcgtaactcattatccgtcaaaagagagcatacgccgatttgactgtaaaccatccatccgacgtctctcccatgacaatctatcctttgctccggtcacgttatcaaggaccaccgctgccagctctaatctaatattatgtgaaacaaaaggcacaatgttttctagaacccagcctgtaccatctcgctagtagtccttgagccacacgtccacatgaccactaggtaactccctggttgctctctttactaatgatatgtttgataaccatttatcagcccaaaatcgtatattccaaccatcccctagcaaccaactgctcccatgaaatattacttcccgcaggtctgtcactacactccgccaagttgatgagctttcactctttttcaacatccaggtccagtcttgtagatcacctaccttatatttgcttcttaatatctttgtgaaagtaagagcaagacggctactttaggtaatgtttgaatgaactttccttttgatattatttcacttgagttctaggttacatcacaagttcccttttatagctaaacaatgctagggtttcaatcattgtgaactgacaaatgtctcaatcttgttatgctacgcatgtcatcaagcaatcaaatttgttctctgtgatgattggagccgtacaacaagcgctcctcttctctgtcattattctggctttgttctcttgcacaggtggacttagccgttgagaagatgaagaagacttgttgggcttctcagacttgctgggcttctcatttaagttgatattggacttgttaggtaagtggcccaatatccctttctctttgtttactgcaacgacatcgtcttgactccttgactttcagctgcatctgagttcttcttcgatcttgtttcagattcaggagctgaaggcggagcagtagagctcttgctaatatccccctgcaaacccggtgtgggtggcacaactacaccgagtttgtacctgagagatgtaaacgcattgaacggaagcgatttagtgaagatgtctgcgatctgctcatgaccaggtatgtgtctgacttccaacagtccaagagccactctttctctcacatagtgatagtggttctcgaaatgctttgttctcttgtgaaacgctggatttgctgttaggtagaccgcagagagattgtcgcagtatagttgtggtggttttagaaggggtactcgcaattccttcataattgagctgagccatgtgatttcagaagctgcttcagagagagttctgtattctgcttcagtggagctctttgacacagacgactgcttctgagaagaccaggagataaggttcagacccagataagtgaagtagcctccggttgatcgtcttgtttcaggacaaccagaccagtcactgtcactataagctcgtaatgtgcaatctgacttcttcctgaagtttattcccatagtaactgtacccttaacatatcttaaaatccttttcagcaacaagaaatccagagtagtaggagcatgcatcttttggtaaacatagttcactgcaaactgaatatcaggtctggtaagagtcaaatattggagcttaccagcaaggctgcggaaatatgttgggttttaaaaggtatcctgattctgtttcctttgtttgtttagctgaagaagcagaggagtcggcattggggcacagtcactcatcgatgctgcaatgggtaagtcctctgcatacttttgctgagataggaatagaccttcagaatgaaattgagcttgaattcccaagaaataatgcatctgacccatatctttcatcttgaatcttttgttgagttctgcaaggagagaggcaagtgtttctgagctgtttccagtaatcagcatatcattgacatacaggagaagaagaatgatgtcttttcctctgctgtagacgaatagagatggatctggaatgctgcagtgaaacccaaattccaagaggtatgtactgaacttgtcaaaccatgctctaggtgactgtttcatcccgtacaaagatttatgaagatgacagacataatttggtttgtctggatctacaaaacctgcaggttgagccatatagactgtttctgttaagtcaccatggagaaatgcattttgcacgtccatctgcttgatatcccactccataatcgttgcaagatgtagaactcctctcacagtagctgttctgacgactggactgtaagtttctaagtaatctatcccttcagcttgattataaccttgtgttactaaccttgctttcagcttttgcagggatccatctgcatttagtttggtcctgaaaatccatttgctgcctaaaacaagcatgtctggtgtataaggaaccagagaccaagtttcagcttctttgcaatttcccatttcttctcccatggcacctgtccatcctgggtcttttagagctgcagcaactgtcttaggttcagggtaagacactttgtgagtcagtaaagcatatcttgggtttggctttctgatcccactcttttgtcttgtggtcatagggtgagtagactgagttacaacaggctcttgcacaggttcttaactaggtaacatttcttcttgactttcattttgagttgttgttgttgataactgatctaatattctttctgtagactgatctgacgtttcttctgcaataccaggactgtgagaagaagaagagaagttgttgcctataggaacatgatctaagcccgccgtacacccataacttctttcctcttccacagcaggtactacagtcggtcttggtattggtattggtagtataggtgtttctcttgtaggtagtggaggaaaatcttcacttgtgaataaactgtcatctgatttaggttgaggtttacttactgtgttgattccctttgtccaggctagcatcaaaggagtaagacttcctgaatttggtcttgaatgagactgagcaaaagggaagacagtttcatcaaagatgacatggcgactgatgtaaacccttccagttgaaggtaagaagcacctgtaccccttgtatttatcattataacccagaaacacacacttgagtgatctaggatcaaacttgttagacgcataatctctcaaggtgggatagcaggcacaaccaaagactctgagtgctgagtattctggaggcttaccatgcagcttctcataaggactgtacttctcatctagagctgttgtaggaaggagattgattaagaaactcgcagtgtagaaggcttctacccaaaacttctgaggacgggtactctgaaacatcattgagagaccaagttcaataatgtgtctatgttttctttcagctaacccattctgttgtgaagtgtagggacaagagataagctgtttgatcccgcattgttgtaggtgatcagttagctttctgcttgtgaactctccccctccatcacactggaaagatccaatcttggtttgatattgattttcaaccatatcttggaacacagtaaaggtatgagtaaagtctgatttgagctttaatgggtagaaccagcaaaatcttgagtagttatcaatgaacactgcataataactgaatccttgatttgatttaataggtcaaggaccccagagatcacagtgtattctctctagaggtctagtagctacaaaaagttgaagcagaaaaagggagtctaacacttttcccaagctggcaagactcacacaccatcttggtacttttatttccaacactgatagatttgtttgcagatagcacttgaaggacttgagagtgaggatgccccagtcgttgatgccatatatcttcactcgctccttgctgtcttgaagagtagagtgcttgaactggtgagtccttcaacacataaagtcccttactatgctttccctttgtcaacagtttccttgttgccttatcatagattcgaacatcatcacagtcaaattgaaatacgcagggatagtcattggtgagcttggaaactgacaaaaagggtttagagatatcaggacacacaagaacatcatttaaaggtaagttacctgaagtagaaggaagactgcctaatcatgtgtgtgttatgggaagaaagtttccatttcccaccattactgagtcacttccttcatacagctgagtctgactgagcttgtgaggtgcattggtgatgtgagcagtagagccagagtcacctacccattcaccaccggattgatctgtgacatcagttatcctgagtattgcaagagctgctggcagatcctcatcttggtagctgttgttgaaccgatgccaacacttcaaagcatgatgaccaggtttgccacagatctgacaaatgactctttctccatttgagttttgtgaaatttgttgatgaaaacctctaccacgtgtggagaatgaatctttgctttttccactcccaaatctttagttgccttttcctcggttgttgttgttgttgtagtaaccagaggagtctgatcttgaagcattgaaagccatgtgaggtgaagtttcagtatcaggaccatagctgttcagcctatcagcaaatcctgtcagccttgaaatcacactctcaaaggtaggtggtggctgagtatccattgaaccttctacagatgttttgataggctcatactctctacctaacccatgaagtgcagcaaatatcttcatctgttcactaacaggactgcctatggaagctagctgttcacaaaccctctttatctccttaaggtaagtttccatggatttatcctgtttatctatggtttgaagctttctctgtagctcaaagagtcgtgatgaagataccttattgcagtgttgagccaaagcattccagacttgataggaggtggcacagttgacaacttcctgcatgatgtcttcattcagagatcccaacagccaggctcggactacttggtcagatctgttccaggtatgatactctggatttggtacctcaatagtaagaccatcgatgttgttgaatggagttgttgcaggaggaggcttgagtgacccattgacaaagcctagaaggttttggccagaaagaaaggactcaaactgtgtcttcttaagagagtagttttgctcattgagcttaacagtgacacagttggagatgtgaagaacaggaggtgagtagagttggatagattgatccatcatagaccgctgtgctctgataccatgaaagtaagagcaagacggctactttaggtaatgtttgagtgactttccttttgatattatttcacttgagttctaggttacatcacaagttcccttttatagctaaacaatgctagggtttcaatcattgtgaactgacagatgtctcaatcttgttatgctacgcaggtcatcaagcaatcaaatctgttttctgtgatgattggagccgtacaacaagcgctcctcttctctgtcattattctggctttgttctcttgcacaggtggacttagccgttgagaagatgaagaagacttgttgggcttctcagacttgctaggcttctcattttagttgacattaggcttgttaggtgagtggcccaatatccctttctctttgcttactgcaacgacatcgtcttgactccttaactcttcagctacatctgagttcttcttcgatcttgtttcagattcaggagctgaaggcggagcagtagagctcttgctaatactttgctcacaaacacgtatgatcatgtaacagtctccatcctacctttgtcacaagcgatgtgttcaaatcctttccagaccaccctctgtccgtggacgacaaaccctatcccaagcaaccaaatgttgttttctcttttctggtgtacttccccataaaaagcctcttgaaactttatccaaaccatcgccaatcgattttggtaaagatattgtgctcatggtatgaatcaatatagatgccaacactgatttggtcaatgttagtcttcttgcaaactcaaagagcagcctttccatcccggtagctttgatgacactttttcgaacaaaatagtattagcgcggagaagatgagaattctttaaggatacttttgggatggttgtatggaaacttgggctgtatggaaaaaatggcggaaagcacttggtcgaccaatgtttgccatgggagtttggtggagcttgaaatagaggtgtggttatgtgtttggcgaattggaaaaatgtcgggaaagagtaaagtttaccagagaattgggacaagaagtaagccgtgcacataactcacttcgggagagtataggtacgggtgtgagagttgagcgaatggtaacgtggagaccaccgcgggacgagtagttaaagctagatacgactggtcctttcacaagaatccagttttgactacagcggggggactcatacgggatgcaacaggtagttggtgtggaggatttgctctcaatatcggtgtttgttcagctcctttagcggaactgtggggagtttactatggactttacctaacttgggagagacatatcacaagattagaggtcgaggttgattcggagttggtggttggattcttaagcaaggggattagtgattctcatcccttgtctttcgtggtacatatgtgtcatgactttttatctaggaactagatagtctggacttcacatgtatatagggaggctaaccgcctagcggatgagttagaaaactatgcttttactttaccattaacctttcatatgttaaaggttgttccacatgttgagacgatttttcaggatgatgaccgcgaaattgcgtttctgaggcatgtccgtctttagttttttttgttttttggggggggggggcggaagttgttctcccgggttgcacagaaattagcgagtaacaccttaaacacataaaacgacaccaaacccgagcacattatctatgaaatataccaagccaagttagaagaagagaaacactttgaggattatagtgatgcttccttgatagcaggtcaagtcggcatctaatagagttattaatatcctgaattagagctgagcttggcctcgaaaagttattgtgaggtctagagattctttccctccaaatgagataaatagacgcttgaaaagccaacttaagaatcaaagcaatgttcttcttcctgctaggatttttaagcatctgactcctgcatcaaacaaagatggcagagaaacatgggccttgcagtgaaagaactccatacttctatagagtaagagcaatagaaaaacatatgttatcttatattttccttaattttatattaattctttgtaaagtttaattttcatatttttactactttaaaaagaaatattttgtttttttaaaacttaataattgttttgtacttgtaattggttttagaaagatatttttttataaaaaagggtatttttaaatataatgtcttttaaaaactacaaatttgcaaaatatttttataaatgaataattattaatttttcattaaattagtactatttaaaatttatagttttttatcagttgcaagtgcaacattattaatttatagagattttagtgtacacttctataaataaatcaattcattgagattttttttcactattcatcaaaaatattaaaattaagaatagtaaaaagctcttcatttgcataagaaaaaaacaaaaaacagaaaacaaaaaaaaaagacaaagtaaggaggccagacagcagacccgtctctctccgtctccatctccgccatgaccagctcttccgctccttcacgcaaggtcgctctctttctctcacatgtcttcaaattcatgtttctctttacaaaaactttgatgattcaatctgagaaattgtgttctttcattcatgcgtaggctttaagcaagatcgcgtgtaataggttgcagaaagagctttctgagtggcaattgaatccccccactggatttcgtcacaaagtcactgataatcttcaaaagtatcaacctttatgtctctgtctttgaaatgagttttttttctttctgtgattttgatttgaatgcgtatctttgtgtgtgatcttaagatggacaatagatgttaccggagctccagggacactttacgctaatgagacttatcagcttcaggttgaatttcctgaacattaccctatggaagcaccccaggcaagttttgttttttttctctgattcgtgagattttgaatcaaactgtgttcttttgttggttttggtgtctctttggttggctagaagtctctcactgataaaattcttgggtttgcttctgtagagagactttgttatggatgtttcatgttttaattcgaacttattgtaaaaaagttttttgttttatgttttggtgtctcttggattggagctactgtggaggagaatgacttatttttccctgttgtgttgagcaggtagtgtttgtttctccggcaccttcacatccacatatatacagcaatggacatatttgtttaggtattgcttgctatctcttggttactgtctgctctgcatatgcttatgtttagttttgatcaaagcaagggtttgtcgaattgatatgtagatgtagaatcggttagactctgcatttcatagttttctggtcaaacaagaaagtgaatattgctgagttttaagatatgttgatgattattgataagtgttatcactcaaaactgtttttattgtatacccccatgcgtgtagatccttttccttagtatctatgatacttcattgtttaagatagagttacttagacatgttgtagcagcctctccatgtttgcttttacttaaacgtttaccatatgatgaattgcattagaatcgtctgtcttagattgtaggttgtattctttaccaaaaccgaaatctttttcagatatcatagagctctcatgtgtctgtactcatttgcctctaagttggactctaatcaaaatcctcaaaaagctctgaaccaatctgaaattatgcaactcttactaccatttacgacttagcagtccaatacatggttatcaaactgaaaagctgtgttgttggtttatcagatattctatatgactcatggtcaccagcaatgacagtgaattcagtctgcatcagcattctttcgatgctatcaagttcacccgcaaaggttctttcttcttcttcgtgtttccctattgacaagttacccaaagtactgtgaattatgaggtctgaaactaagaatatcaatgtgttttttattccgccttattgcagcaacgccctgcggataacgatcgttatgtgaagaactgtaagaatgggaggtctcctaaggagacgaggtggtggttccatgacgacaaggtttgatgcacgaccaagattaaagagaagccttaatatgttaatgatgacatttaaaaatgtcaaaacctaactttttgtctcactcttactatggaatatgtcaagtgaagagctctgaattacataagagaacactgagagcgggaatctatatttcgtactgaacatgtccacaaaaagatcaattaatgctaaacaataagttgtcattaatgccaatagttattacacaaatgtttttttcatccaaatgtctctaaaaatgtatatatacatttattaggatttttgattttctgatttgggtctgtctattcaataaatttcctctctggtggagaggtgactgtcaccaacttcttccctaagcctaagggaaagatttgttagagttgagccgaatatttctctctcgccaaatatggtaaactgaggcttggtacgctaatttgagaatgaaagccacctttttatcccggcaaggatgtctaagccatcttgcactatctttaaacatccttggaggggtaacacgtgcgttagagcagaaaaacgaccatacctcgtgcgagaaaggacaatcaaagaacacatgctgccttgtctcatcaagcgcattgcagagcaggcaaagtgaagggacctgaatcccccaactaataaacctatcacaaatatgcaaacgatttctattggccacccaaacaatgaaagcatgaggggaaatatttcaagagaaccacacctaatcataccagtccactttaggaccagtagggtggagatggtgccaagtatcacaggaccaaaagttgtttaaaattgatcacctctaaaactcaattgatggagtttcaagatattttcaaaattgatcacctctaaatattctcaccaatctacttcaataaaaaaatatttattaaaataacaatgggaagaaactccatatacagttacatcgatgaaaaatcagaactaacaaataaacaaaactatgaaaaaaaataagaaagaagagacttttaactagtaattagttagcaaatcttaaaccaatcgaaaacgaaagtagcatatggttgagtagatgacacagacgcttagtggtgtcttaaaatgtctaaccaccttgtgagacgctctaaaggtgacaactttggaacattgagtgttgttccgaccacgacttggagcttaagaccagccccacagtgacccggttctgagctaatgaaataatggattcctggtttggtgagcttgatgatatcgtggcctgtcttatgcacggctattggagaagtcgggtcgcagtttaagaattcaaggtcaccgctgatctcgtagacaccgttgacttcattgttgtattcgaaaaggagaccgtctccgacattgaactgtttctctttactccagttgtaatagaaatcactgtcgtaaacgccccaacttttggagtcaccaaccttgtagacatgtctagaaggaataatcttgctcggtagtggtagaggactcggactcgacgggtcatggacgacaaaaacgccaagcctctgtcccgatgtacattgagtatggtttgaggtgatgaagtagtaagaccctggttccgtgaaggttacgacatcatgtcctgtgttgtagacggctttaggaaaagaagagtcgcagaattcgtattccaaaccaccggagacttgtgtgacgtcattgaggttgtgatcgtattcgaagatcaaagaatctcccacgtggatctctttatcctcggtccaatggtaatagaggtggtccttggcagtccatccatcggagtctcccactttgtagacggtggccgaacaacaaccgaagagaagtgtaaatatcacaatcacgaagctgaagatcttcttcattcttgctgtggccatgattcgttggtatacacaaaacaaaaaggaaggaagaaagatgaacaaaagctgagaggcgaagaagaaaaaggttatgagatattgaagaggctgaatcaaagagagagagagttgtgttgttgttgaacgatataatgagttgtgaagagatgacctaacctatcattgtttatagggtaaattgcacacagtagccattgatccacttttaatttcagattttgacaaagtgggcagggcctttcagctattagccattaagccaaaaactgaccaaaatgcccctgacgacctgacgaaactgaacccggtttgtacgtacggaccgcgtcgttggaatccaaaagaaccgggttcgtacgtacgctgttcatcgacgagaaatgcattaaatgatttctgggtttcggcgaagttgacacttgagattggaataaaaaaaatttaaaattcgttgggctcagaagtttttaatgctaaatagttttgacaagactaaaactcatgattacctattataatagagattatattgtaagatattttgataatttagattagaattctgggtaaaaaacgtaaatcgaaattctgttaaggtgaagaaacgaaaatcgaaattgtgttacggtgaagaatctgaagttttcagttgctgttttacaaagtttgaaggattgaaggggagacaatctgtgttctgggtaagaaattcgtgttaatcctaattacacttgagaacgtgatttgaatgatacgtttttaaaaatttctgggttcatacattgttttgttggagattctatttgtatttgtagatataaatgaaagctctatgttttgtttagttaaatttataagtacataaattgttttgttaagattctttttgtcttcgttgacataaatgaaatccttcaaaaaagatctgatttttttttatttaatgttggtctgacctgagaaatttatgttgcaggtatggagttacctgtattaattatggttggtgagtggatatacaaagaagaaggttggaaatttgaagctgaaaaaggaagtttcggacgctgtgtacgtattatagacacaacgacgtacacggatttggcaagtacaatatgtgatgttttcagctataagtttagtgaatggaaccctataataagttactggatgcctggaaagatgtctgatatgataacaagtaatcgccctccagtatatattgagaatcaaatcagcctggatacatttatgttgattcgtaatggcgatccttttgttaacttgtttgtgtctttttaccctatcggcaatggaggcaatacagagacagaggttacaaatgttgatgcagctcataatggttacgaagatataaatgtagatgaggaggatgacatagatgaaggtgatgaggatgaacatgaggatgaggataatgaagaggacgaagatatggatgtacatgacgatgacaccgatggtgaaagccgtggaagtacactcgaccctacagtagactttagtgaaggtagtagcgaagaatacgattacaataaatggggtgacatgaatgtggaacaatatggaaatggtcatgttgaggagggcgtcgtgaatgacactcaacataccgtggaacccccaggggaattcactcgtctattggcatcgtgtacgtcgacgggtacacatgtacctcatgtagaacccactggtgttttggttgactgtacaccaacctctgctccatccccgacgtgtcaacatggtttgtaccaatgtacgtacactagagtctgtgcagaggagacaagatgcgaaagtgaattagttgagcacacggatgatatagctgagaacgtaactggagatgatggtatagtcgtcctagaaggggtttctgcaagtgggttaaatattgaatctgacgacggtctagtgacaacaggtgaagcctacgaagtgtataaagggttttctacattgcataatgctgagaatgagttgctcgatactgatgcggatcctgtattcgatgatttagccaatgttcgagtcgatgtgacagaagttgaattgagtacgtcaggtcatccgttgtatgtgggaagtgttttcaaaaacaagcaagtcatacagcagaccatgcgacttgttgcaatcaaaaagtgcttccgctacaaacaaactcggtcatgccctaaaagattagagatgttctgcgtagatcgcaattgttcgtggcatttgactgcacatgtcatacccaattccaaatgtttcaaaatcacagggtatgattccatccatgtttgcaagatcgacactcgaaaggattatcgtaaacatgcaacttacaagcttttaggcgaggttatgaagaatagatatagttcttcgcaacggggtcctagagctgtagatttgcctcgattggtcttaaatgaccttaacgttcggatctcatattcttcagcatggagagctagagaggttgcagtaaactctataaggggtgatgatatggctagttacaggtttttacctacatatctgtatcttttacaattagcaaatcccggtacaatctgtcatctccactccactcctgaagataaaggtcgccagcgcttcaaatatgtattcgtttctctctcggcgtctataaaaggttggaaatatatgaggaaagtcgttgttgtagacggaacccagctagtcggtcgttacaaatgatgcctccttatagcatgtgcacaagacgggaacttccaaatttttccattagcttttggggttgttgacggcgagaccgatgcttcatggatttggttctttgagaaattatcagagattgttccagatactgacgatttgatgattgtctcggacaggcattcttccatatataaaggcgttagtgtggtgtacccgaaagccaatcatggagcatgtatagtacacctggagcgaaacatatcggtgtcttacgcaaggtacggtgtgtctggtttattctttagcgccgctaaagcgtatcgggttagagattttgaaaaatactttgaagagttaagaggtcggagccccggatgcgcaaagtatttagaggatgttggatttgagcattggactagggcatactgcaaaggggagcggtacaatatcatgacgagcaacaactccgaggcaatgaacaatgtcttaagcaaggcaaaagcctatccaattgtctatatgctagagttcatccgagaggtcatcatgcgatggtttgcagcaaggcggaaaaaagtgtcgaagtgtaactctttggtcaccccggaggtagatgaacgtttccttcaagacttgcctgcgtcaggaaagttctcagtcatgatgtctgggccttggagttatcaagttacttcaaagactggtgagcattttcacgttgtcctagatgagtgtacgtgtacttgtcttaggtacacaattttaagaaccccatgcgagcatgctctagctgctgcaatacattttggcatcaacccgaaggctgttgttggattgtggtatagccttcaagtgttttctgattctttccaagaacccgttttacctataccggacccaaaagacgttgttattcctcaagagttatcggacatgattctcatacctccacgcagcagacgaccacctgggagaccacccaccaagaggataccatctactggggaaaaccgggtaagattttcccccatcctcacttctatgcaatttttccttccttttaggcgccttaccattttttaactttcagaaaaagaggcagaaaagactcattcctaatcagtgtacaagatgtcggcaaacggggcataacaagaagacatgcaaaaaccctatttaggcctcgcgatggttagagtttacgtctccgtgcttttggaagctgttctacgtacgtttttggaaatcttttgatcagtctatgtagtaatatgacatattattttgtctgtacgttaccttatgtacgtacgtaagtggacctcgtattatcggtgtatttgattatccttcaactttttgtcaatcccgttgttttctgtacgtacttttggtaaacgttttcatttgtacgtatattgggtacttctaattatacagagttgacggttacatttttttgctatactgttacatcaatttgggaccaatcatcgcgtctttctaaaatctatttaagaaactggtgataacacccttaattcatttaaacaaaattccacacccatcacacacataagacagaaagtcggtcattttggtttttgttattgtcatcatggatgatggatatcatgccatttccgaactttgtcccatgatcacaggatggagtatacgcgcttttgtggtcagggtgtttcaaaaatgcgtgggcataaatgagttcgacctgggtctcatcttggcagataatcgagtaatatttcgtcaacgtctttctaacgtttttactttcacataccgtacatgtccctaatcatgatgatttgttgtagggaatgcgttcccgcatagagactaccattaatcgttgccttgcttcattttactctgaccgtatccgagaaaatgagtggatagttatcaatactttctcagttcgtctccacaacgagggaatacacgcaacgtcccatgactaccggatctgttttatggatcagaccattgttaccaaagtatcgggattgcctgcaataccgtattatgattttactccttttgactacatcatcgagaggacagtttctaccagagtgttagtcggttagtatatttgactgtctattcatttttgtaaatatgtacgtacacataatgcttttatcttccattacgtacactagatgttattggtgcgctcattgaggttggcaacttgaccgaagactaccgtggacggaagcttccttttaagataatggataaacagtaagttgtttatttttaattatttagggtttagggtttgttatatcctgtgtataatatatattctctgtagcaaggaagttcttcaatgtgaagcacaaaatgaccaagctttcgaatttcaaagattcttccagcggctaactggtcctcaaaacattatcgcactcgtatcctggcgtctaaccgggattcataaactgaaggctgtgaccaatggccccatctccaaagtcattgctaatccggatataccggaagtggaagaaatcagagtcgtcgtctattagttaattattgtttcttttattctaaataactacagatttgtaaccgaatttaaacatatccctacttttatgctaaagttttaccttctaattgctacagtttacttattacaaatacagcctaattgtaatgactttccatggacgtacaattatgtttttgtacgttcaaataggtgtactagatgtataatgtaaacaaacttagttccattcataagataaacaataaaacaaggaaataaaaaaacgttaaaataagagtaggaaatacaaagcataacaacaaaccgagtagagcatacaaccatgttaataaagccgaagcatataacaggaaaacatatgctttacaaacaacacgaaattatagccgatgcatagaatgggaaatcagatgctgaacgaacgcctttccttaataaaatatgcacaactccctagcataccagtagaagaagcaattgcggcagcaggctccgtagctgcaacgacccaagcagtctggtgaaaccacgaacctccatgaacgattccacaaacgagttccttcagcatgcagtcgacttatgtgatacataaccaactcccccactgtgtttgcagcttcgaatgatggcactaaatcccagaaagtcgcgttcacggcttcaacctctcgtccgttgccagttgcggtgaggaacagaccatgagagaaacatgcgtaagcgtcgatgggcgagatagaactcaacatggttaaaccatgagcaaccgtaacgaaattgcaagctaaacgaaccccttcaaggtaaatcgccggccttgctccacgttcaagcaggagggtgaaatatgttcggaaaggtgtttccggcaacacgaaatcaggccacgtcataaactcatccatgttgatagcggtcggctccagcgtgctaacgagacctctgagtgtttcaatgggagttacggaaacgggtaagtagttgacgaggatgctgagtgggttaggtagctgaatggccagtaaatttccgccggtgggggtgtggggacgtccattgccgagactgagggatttatttgtgagtttaggttatatatggcgtagtaagagcaatgaaaagtgtggagaagatgacttgtcgaggagtacatgttatatagaccaaatggcgaggagacaactaattaaatgtttcacgtcccacttacatattgtaggtggtattaatattggacattaactcgtgtttacatgaaaatagtaaactataaactatttccgattaaaaccgaaacttcaaattacaattttcgagtttattggtttatgtacgttcagatttacacgtgtacgtctatattgaaatttgtatttattatgcctggccacgtctatcacaaaactgtctttttgcgtcaatccaatcatgtttattcctacatttatagtaactttaaagttataatgtaagtacagaaagaagtatggattacgaaacttcaaatttattgcttacatccgaataaacccttaaaccgataaaccttgtaaaccagaggttaagcacaaattgaaacataactttatagaagcattacaagaacttgaacaacttcacgcatagaggataaaacgaaatagaaacataacggcattagaagaactaggaacataacttagacgataacattaaatcacaacttcaaataactagtagatttatatgactagagcatttggctaactcgcctagcacaccaccagaggtaacaacagttacacacgttcttgaacggtccagatacaatgtagcaaagcaaggcgcaatctggagttttaataccatggctgttaggataagagaacgtcgatccgtaagtattattatatggagggcgaaacttctttaaatcctccaggaactcctcacacaaatcccgtgtctcttctgtccccaaaggataatgattgcgtccaaataggtttagaaaaatggctcccatgtaatcattcccgtcaattatgtaaagtatcgcacaagcaagtgtagcatgggcttgtgatggaacatgaggtcgtaagaggttgatggctcccttaatgtcacgttcatgcgttaaaacacgaagagcttcaaaatacatggcagtcggattgccagcatccacacacattttgaaaaaggctcgatgtcggccttcttcttgtgggccggatggatgatggctgccatcaacttggtagtcgtcgggatcctcacacatgctaaaaatattagcacctttcaggacatccggacggtaaacaacatctctgccacgtctgcctgaccgtagtagtggctgaaggtcccaccagcatttgtgcgccactgtcttagcaatctttgcgagtaaatcgtcaggaatagttgggttgaccatgttagaaatgagatactccgaagaggtcagatcattgtccttttaataaccgaggagggagggtaacggatggggagatagcgtttacaataaatttgccaataaatgtacgtatagagtaacagtgtacgtacatttataattctcatatttgcggtataatccgaaggaaatttatattaaataattgatatatgtacgtctaataaggagttacacgtgtacgtatagagtaacagtgtacgtacatatataattctcatatttgcggtctaatccgaaggaaatttatattaaataattgatatatgtacgtctaataaggagttacacgtatacgtatagagtaacagtgtacgtacatatataattctcatatttgcggtctaatccgaaggaaatttatattaaataattgatatatgtacgtctaataaggagttacacgtgtacgtatatttccaataagactaaagttcttgcaattatgacaagtgggagtgtatttattaattaacgcatggcacgtcaattgaataagactgacattcttattcaattcactgacatatatccttacatttactattacatttatagttagaatataggtacttgttataatgtaagtacttgttagaatgcaagtacacctaccagtttagtttgacaacacaaatatattattcatgacagatagaaccaaaccgcatgaaaaagacacagaagttgtaaataggaatttaaaggaaacggaaacaaaacaacataataggcgcattgtggatgaagcaaaaacaaaatacataggaccaaacccctaacaaacttgaaacacgtgacagtgtacgtacaccaaacacacgtacaaatgagagacctagagaattcggctaattcgcctagcacacgaccataggtaacacttgttgcaaacgttctggtatgcaccagaaaccatgaaacaatggtaggcgcattgtggcattttaattccatggctgctgggataacagaacgaacgagcgtaagtattattgtacggcgggttaaacttgtttatctcctcgaagaactcctcacacaaatctcgtgtgaaatcggaatccaatggatgatggttgcgtgtgtagaggtccagaaacaacccacccatataatcataccccgcacatatgaatatgatggcgcaggcgatggttgcatctgctcggacgggtgcatgacgctgcatgagcttaagtgctccattgatgtcagtttcatgaattagaacacgtattgcttcgttatacacagccgtcggattgttagcgagaaggcaccttttgaaaaatagtcgattgcggccttctccttggggtccggttggattatggccacctcctacttggaaatcatcgggaacacggcacaagctgtagatgttagcgtctttaaggacatccggtcggtagacaatgtctcttccacgagtgccggatcgtatcagtggcttaaggtccaactagcttttgtctgccactttcttagctatcatagcgagcaagtcgtctgaaatagtgggattgaccatcttagaaatgagatactccgaagaggtcaaattcttcctctcatttaataaccacggatggagatattgttggggaaattacagttacattgaatgacaaatttaattttacattgatggatgtcaaatcaatggtaccgcttgtatacacaacagtcgtgtaatgtgtacacgtggacacgtagtttgtacgtactttggtcagatatcttgtttttgtacgttgttaattactacataaaatgttgcatagcatacaaaagtaataaattgtttagaaaacaaacaagtaaatgtaaacacaacaaaacacaagttccaaaaggcatacaaaacacataagtttgcttcagttgcaacttcgaataactaggttaatggcccaattccatgctcgtagagctcgactgcgtaacccttacggaagttgtacatatcatcttcttcaatcgaaaacctgtcctcaacaggagtgttaagcatgtacaactcaataaacttcatcgcgtacggaccgcaatctccggtagttggattctgtggtagacgttgattccttatgtatgtaaaaggagtcacgggataaggcttatcgagataatctttgcatgtcgctctgactaggtacggtagcatctccattattggaaggatacgtgacctaaccacagactcccgcgtaagcgaacgcaaaggatccatgatttcaataacacgacgttgcaggcatatagccaacccaacccaatgcttctcagctttccagttcatgggaacaaatatgatgtccacatctctgatccaatgcagctgtggttcacgattaaggcattctcccttgggaaaccgtgtgagaagtttgtcccatttgaaagtgtcgggtttacgacaggatctgaatgcattggcacagcttgacagaaggaaagtgagtctgggatccacaacgacataccgatttctcttcatatgctccccgttcttatgccacatcaagagtgccatcatttccatgtgctgaaaagtacataaaagtatgatgttatgtacgtactttcaaaaacatattattacatatacgtacaattacaacagtgtacgtaattaatggtcacttacgtatgagccaacccaatcattagcctcggctagagtagtgaagaattcgttgtccactttccgaaagccgaaaagagtatggcacctgaaattagtaagacatatgaaatagttaggattgatataagattgacaaacaatcagataattgtgtgaatgcacagatgcataccttttttctccttgagttatagtacataatttctggaatttagcttcgtcaaccttctccaaaggattgtacaacgaatcgccagccttaaccaaaacctccgggcctgcctctctctcctcaacaaatgttacatcaggatcttttttatcatcatttttggtgtcatcggagaaggtaactctccgtcttacacttttcttctctttctcattgacgggagcaacgattgcttcagttttagagacacccgcttcgacaacatcgtcctcctttcctgtctgcaagcacaaaatcatataattagattggtcatggaaacaggtacaagagtacgtacactatatgcccgtctagttgaaatattaataggtacacgggataatatactgacctcttcggggatggcaaccttttcagatactttttcttcgagaacatcgtctttcaattgagtaagcacctaatgaaaacaatttaacaaacttcaaattataactccgacagtaatgttattaatagttagctaataaattacctcttcagggacggcaaccttctcaggaattttagatacattttctgcgagaatatcgtccttcaattgagtaagcacctaatgaaaacaatataacaaacatcaaatgatatctccgactttaatgttatagttagttaggaacttaccttgctaacaactacggttggtgaagacgggtcactgagattcgcttcataattaaaatcccctacagtcgtcggagaaacaaatccaggtaacgcagtgtccttcatatttagtaaccaaataattggttatatctctaattggcaaataagcgttacaaagagcaaaatagtaacacatacctccaaggcttcatctacaacggttggagatttatcctccttcaaagcttcctctccttccccacaaattgtttcagcctgacctcattatatggagatggatggccattgtattagtcaaactcacagcaaaacattcaaaggtgcgaaacagatttcaaaaacattgtacgtacactgggattgccatcttctgtaacttcaaaagcaaattcttgcctaaccttgacctccggtgactgtggctcctccaactgttgtgactcaggagcaacaacttcttcttcaggattaccaccaagtcctttctgaacgtcctatacaaatgcaaagcatacaaattagaaataatatgtacgtacacaaaaattagtagtacgtaccctgtacctgatgggacgaggaagatacatcatctgacattttctcaagggctgggtcagacagtattgggtcaggcaagagttgttcaaagttaccaccatcaggaatgccatgttcgggctgttatgtcaaaagtaagaacattaagaacataaaatattttgtacatacaataatgaaataataagaacacaagttacctggtgagatggtgatggaacacgatcgacattgtcttccattacagagtcagatacattttggtgtaactttgaagaatcttcttcaatctccgagttccctccttcctccttcgaaatcaaaaccatacaattggtcagtaatatttctttttgtacgtataataaggcataaattataacatgactattacacaagtgagttacctcttcagttgatgatgctccacccaaatatatgttttccatatcatagtcagagacggtctgttttgctgaaacttcgccatccccatcattgcctggtacctcctgtgaataaacaccaatataacgcattcctaagtatttggttgtacgtacacataataaaaaccttttttcgattgtatttacacaaggtacatgctgtagacgtacctcgacaggaagactaccagttgcagccttcttgggagtattgttcaacctggaagatcttcttggaacaaattttcttggtttggtggatttctttacagattttctctgtacctgttcagctgccttctcaactcttttgttcgccttctcaacccttttgttcaccttctcaacagttttggtcaccctctcaaccttctcagatggtgaatcagatttgtgagatgatcgtgggccttcttcctttcggtcctgggactgtagagcagcacgtatctcttcacggacaaatacttttaaatcttcaaactttttatccaaaagttgtgtttgcctcttgaagaaactcctcaattcgcccgcatacttatcgaacgcttcgtctccaacttcaccatcagcaccattgggtccaccttcaccatcagcaccattgggtccaccttcaccatcaccaccacttggtccaccttcaccatcaccaccacttggtccaccttcaccatcaccaccacttggtccaccttcaccatcaccaccactgggtccaccttcaccatcatcagagtgactaattttcctttttttgttttcaacaggatctgacacccgtctttgcctcttcaaaataactatattaaacggttaaatcatgcattactactcttagaggaacctaattctgatataagttatacgatgaaaagatatggttacctctctctccagttgctgagggccggacttgcttcttaggcgcatcatcgcctccaacccacattttttcattccactcctgctcagatttcaacatccttaaaatgttatcaactcttgggtcctctttttctttcctccatacaaaagattttgggcaattactgtctgctgggtccacaatatatgtgatatccacctacatagacgatcattgttaatttcagagtgtatgtacttcatttttttataccaatgtacgtacaacaacaactgcacaaacctgttcagcagactcgcacgccaatatggtggatgtcttgattggacgcaatttggaaaggtttttaatagtcctctctgtaaacacggcggtatctccttcagaaggtaggagactagcaatagacggtatagttgcgaatgcaaggagttggagtccaagtgggaagccatggagtgcataagaatgttgcttgcaaccactccggagttttttaacgtcggtgtctcctttgaaacttgcgatacgctccaaagtaagcagaaatgatgtccttccccagggatatttacagaagaaatcaaggttcttcgtcagctcaactgtcatctcatttggtctcaaaggaggagacttgtcacatattagcacaccatccacaatgataattagggcgagagctaatttcttccatgcaggcatgtcagtttcagaaatcaatctatcccttaattcttcaactgttggcttagctttatcatctccaaacagagtagcccacactgtattttcaccttcctcacgctgcataacactttctacatccttatctttaggataggttccacattccaaaccagttataagtgcccattctcttaatccgagcctaataggatgaccagcgaataccatccacatctcataacgtttatttgtaactaactgacggcatattaatccaagaacaagtttaccagaaaaggatgccttgttagtagggatcctaaagaggtcaccaaatggagaatctagaaggaacgtcatttctggtgtgtccttaagcgcagctgctatttgaccaatgtactccgctctggagtacgcatttatcttcgccttgctagggtagtgatcgagtgcaaacaacctctgtggtaattcacccggatcattagaagtacttcctgaaagttgagcaagacgaagaagttcttaacacgtacactatatccaaataccaactaaacataaactcgattttcatatacacgtacaccgaaaccttttatactcaatcaactgtttttggcggaaaaaaacaaaatccctttgtcaattgaaaatttatgagttgaaatctctaaaattaacctagattttgaatcaatcattctccaaacgaagttagggaaaactaacccagatttgtcgtcgccgccgatgcctcatcaatatccgaaactcctcgccgccgactactcttcctcgtcgccgccattagagctcttctatgaacagttaatcgataaacccaaaaagcgtattattgttccacactttaacacgaaccctatcgaaattttctccactttagcaacgactagaactcgaacagagcctcaatcggaattgtgattcagttttgtcggaatttctctggttcttcgaaaccactcttcgtttcgacggaactgttctgctttctcgaagaagacagtttttgatttattttcagttttaaaattaataattttaaatatttaaattattttgaaaccagaaaacggttaaggaaactgaaccggttccacgaaacgaaaccgcctccgtcagtttctcgttggagggcaaattcggccattttgggcctaatggctaaaacgtggttgacccagcccactttgcctatttgtgaaagaaaaagtcacaagggtgttataacgtgaaattttcttttgtttatataatgctttgtgaaccctaatccctttatgattttgttttgtttatttccttttttccagatttaccgaagattcggattaagattatttttggttagatttatcttttcttattcttattaattaatttaatataaacaattatcctatttttcaccactgatttaaacaaaaataaaaaaaaatactttcaactgaaaaattgtattattttctaaaatattgaaatttacactacaataaagagcaagtacgtttaaatacatacaaactagaatatcaacaaagaatttaatatttgatcaatatatttgcaagttaattttgaaaaatatcacattgaaatatatatatatatatatatatatatatatatatatataaataaataaatggcgagtttatatagtaaacatgagtgtaagggaaatatatgaaaattggtttcatggatttctttgaaagaaaaaaaaaaattgagaattacataaatcttgctaaccaaatattattttttttaacaaaaagagtatttaaactttaactttgaacaaaccctagctccccggaaaataagccgtcgccgttttcatcttcttctccatggagagttctagcaaggaatcggccgccaaagttgttcgattgggtaagcgaaagccggaagctgatttggagaccaaaccttttctcaggaaacataaggaaacgtctgaggagaaggagacaacggaaggatttgcttgtagtcttgagcaacaagataatctaatctcagcgaaggctgtttccgtaacgctctttgtatccgagctctctaggcaaacaaaaatttcagatatcatcgatttcttcagtgatgttggagaagttgttaatgttcgaatttgcttaagccacacgggaagctgttgcgttctggctttgttgagttttcttctgctagtgaggcaaacaaggcactggaaaagaagaatggtgaatatttgcacgatcaagagatttctcttaaagttgctcagacaagtccataccgtccaatcaagttttgcatcgagcacaaggtttggaaccaagactcctttcaactagatagccttgtcatcgaagaagatgagacacctcctgattttgttgacgaagtagtcattgtttccaatctctctcccctaactaaaatagcacatatcaaaggtttcttcaatggtgttgcacaagttgttagcgttcgacttgttgtaaaccacgagggtaagcatgtgggctatggatttgttgagtttgcttctgcttacggagcaaacaaggctctggaagagaaaaatggtgaatatctgcacaatcataagattctgttgatgaaaggacatgaatctcctggttttgctgaggaagctgccataacaaaaacgctctttgttgccaatctccgtgactccattcagatatcagatatcatcaatttcttcaaagatgttggagaagttgttcatgttcgacttattgtaaacagccagggaaagcatgcgggctggggttttgttgagtttgcttctgctaacgaagcagagaaggcgctggtaaagaacggtgaatatttgcacaattacaagatttctcttgacggagctaagacagctccacaccgtccacccaagttttgcctagatcacaaggtttggtacgaagactaccttcgaagagagagccttctcattaaagaagttgagggagtggaaggacttgatgaaactcctgattttcttgaggaagttgctgcaagaaaaaatacagtttttgtcgccaatctcccttacaactgtcgtctaatagtaccaactatcatcaatttcttcagtgatgttggagaaattgttcatattcgaattattgtagaccacatgggtgagcctgtgggctgtggctttgtggagtttaattcttccaacgaagcagagaaggcgctgcaaaagaagactggtaagatttctgttgacgtggctgagatagcttcataccctgttggacccaagtacaacgttgctaagaagctttggtacgaagacaaccttcgacgaggaatgcttctgaggaccaaaccggatctgaagaaaccttcactgatgagtttatgctgcggtcagagggttacccttctctgatagaagaagaaagattttaagctctttggtgtgatagaatgtgcaactctttttgttattagttcggctttatattatgggatcctggttaagtttttgtctgaacgtaaccttaagctaagatatgcttacttttgaatgtcttggtgttaaatcactatataccttcattattacctaaacgtataaaaaaaactttaactttgtcgaaatcgctgctaaccacataggtattaagttctaaccgaaacaaaaccaaaaaccgatccataatcctttggttcggttcggttagggtttatgagacagaagctaaaaagacaccatttttagctttggaagataaacagagaagaagcttaacacagagaagtgcgcgggaatggcgagagtttgtcttccttgttctttccttcgtacctctactctctcgattctcttccgttcaccgattctctccacaaccgccgcaatttcattttgctcgtcgtcggagttcgccgactctgtagccaaggatgattcaaaacgcgtaaaaattcactcatctctgtttctggatcaaattcgattacggttttagggtttcttacaatttagctgctttcagggtcctctcaagcctgggctttacctcgtcggaactccaatcggaaacctcgaagatatcactttacggtactcttcaatatctaagcttctttgcattgtttgaaatgtgttctgatttctaatgcttagaatttgttagtgcgattcgtgtattgagatctgcggatgtgatactctctgaggatacaagacactctgggaagttgctacagtattacaatattaaagctcagcttgtaagttacttgtatatggaaagtagtagtagtagtctctttggtttttatcatgtgatggttttgaatttatgaggtttaggtttgtagcttagttatcacaagttcaacgaggctcagagagaacaagcggtgttgacacggttgaaacaaggagagattgttgcacttatcagcgatgctggcacaccgggaattagtgatcccggtactcaacttgtgagtgcatattatagcttctcctttgagcttttttccaggctagttttgtttataatcaacttacttactagtgtgttacacatagtctgaaaatgttctctagtcacttataagctgaagagtatgagaaacaagtgctatcatctttcctcaggctaaaatgtgtgcgaaagaaaatatagatgtgattccaatccctggggcttgtgctgtagttgctgctctttctgcatctggtttggagacagatgagttcacattcggtaacttcttctccgatttaccggtcaacctgatgcgaacctggctttatataaagtttataatttctgaactactttgtttttaatacagttggatttcttcctaagcattctggaacaaggaaggagaggctgattgtttcatcaaatgagacaagaacacagatcttttatgttccccctcataagttgtcacagtttcttgaagaaacaaccccttactttggtgaatcaaggtttgttgcatgtttcaagcaagttatgttaacatctgctggattgatatctatgtacatccactttcttttctctcttgttccttattgttgatatttgatgaattaagcctctctcaatgcgatatcttttatcttctagtgttacgacttagaagcagtcccatgcctggtcctgacatagatttatggtgcaggcaatgtgtaatagctcgagagattacaaagctgcatgaagaggtaacatcctttatcactttatatgtaacgtgtgttagtaatacatgaaactttatggtaaaccccccactgatgagagatgctcttctactatagttttggaggggttcgatagcggaagccaagcaagagtttctgatccgccaaccaaaaggagaaatcacgcttttgatagaaggaaaggaagaaaccaaagctgaaaatccaacagagtctcaacttgaagaagagttgagaggcctgatctctgatgggcatagcctttccacggtaaccattttgatttgagaacttactcttcttggaaactaagcttcaattaccatacgttacagatatagaattgaacttagactgttcagttcatagatattgatcgatatgtgacttaatgacttaatgattccggatttaacatcaaactttatcaggcggtgaaaacggttgcagaaagaacatcaatgagaaagaaagaagtatattctctggcattgaagaaattcgggaagcagattcgggtagaagaagaagatgaagctgatgagtaaaatgagaggatattgccatgtcaaagcttttgcttcaaactcattgatgtcatgttgtaaaactgttgcgttaagtctcacacctcaaagctcttgagctttggatcttgatttggtgaatttagagtatagtaagagttagtacctccagattgttttagtattcacttggttaggtttggtgctgataaaaattttagctaccaaaatggatactcattagaaaccaaactggtagcgtttgttatatgttaaaataaattattgagaaacaggatcttacattttctctaatttagtgagagtttttttagtaattgacaattattcaaattattatatgaatcaccgaaaatactattagaagtaataatagattttagttagtatatacttaggctatacttgtgaataatagaagtggttaagggctcggtatagtccggtttattcatctaaggtgaatctcttggttatttctggtttagtagagtctgtatactatacatgattgtaataaactctttggatcattaatgagaaattgagctttcaccatgttttccctctcgttcatggttcctattatggtatcagagcattttctgctcttgcttctctgatttctcatcgatttctcattgttttcttcgtttttcaccgttaaagtgttgaatctatcctggatttgtgttgatttgagctctagctgatcagaatcacctcctgaagcttcgattcaagttccgttaacacatttgagcttcgatctctctatccatggtgaaacagaagaagaaagcgcagaatcggagttcttctccaacatctgagtattcaccgatgaagactcgagctggttcttcatatccagttgccgatgacatcgttgaacctccgtctctcaaaattacggctaatcgcgatcgttttcaatcacattccgcagcgattgaatcatacgacaatgctcatagtccgttcttccttcactcatcagatcatctaggtctgaatattgtttctcatgttcttgatggaacgagttacaacaattggtctatagctatgcgaatgagtttagatgcaaagaataagttgagctttgttgatggatctcttcctaggcctgatgttagtgatcgtatgttcaggatctggagtagatgcaatagtatggttaaaacttggttattgaatgtggtgagtaaggagatttatgatagcatactgtattatgaagatgcagttgaaatgtggaatgatctattctcaaggttcagagtgagtaatcttccaaggaagtatcagcttgaacagtcaattcatactctgaaacagagaaatctggatttatccacttattacacgaagaagaagacactttgggtacagctggctaacactagagttctcacagtgaggaagtgtaattgtgaccatgttaaggaattgctcgaagaggctgagactagcagaatcattcagtttcttatggggttgaatgataactttgctcacattaggggacagattctgaacatgaaaccacgtccaggcttaactgagatatacaatatgcttgatcaagatgagagtcagcgtctagttggaagtactcccttatcaaatctgactgctgcctttcaagttcaagcttctcctgttattgattctcaagttaatatggctcaaggttcatacaagaaacctaagtgttctttctgcaacaagcttggtcatttggtagacaaatgctataagaagcatggttatccacctggttccaaatggactaaagcgcagactattggttctaccaatcttgcaagtactcagctccagccggtgaatgagacaccgagtgagaagacagattcttgtgaagagttctcgactgatcaaatccagactatgatttcttatcttagtactaagcttcacactgcatctatctcacccatgccgataacatcttctgcttcgacttctgcaagtccctccgtacctatgatctcacagatctcaagtacattcctgtcactattctcaaatgcctattatgacatgcttatttcttctatatctcaagaaccggctgtgtctcctagagcttgggtaatagattcaggagccattcaccatgttacacacaatagagacctatatctagaattcaggatcttagaaaatacctttgttagactcccaaatgattgtactgttaagatagcaggcatagggttcattcaactgtctgatgcaatctctctccacaatgtgcttatattcctgaatttaaattcaatttgatcagtgttagtgttctcacaaaatctttaaaaacaaaagttagttttacgtctgatgaatgttttgttcaggaacttacaaaggagttgatgattggtagaggtagtcaagttgggaatctttatgttctggattcaatgaaaataatcatactgtgtctttaaaaggtaccaattctatgagtcctgagttttctatttgctcgtctgttgttgttgattctattacatggcataagagattaggttatcctgcttattctaagatagatttgttgtctgatgtattgaatcttaaagataaaaagataaataaagaacattcaccagtttgtcgtgtttgtcatttgtcaaaacaaaaacatttatcttttcaatctagacaaaacatgtgtaaggctgcatttgatttggttcatattgatacttggggacctttctatgtccttactaaagatggttttagatatttcctcactattgttgatgattttagtagagccacttggaattatttgctaaagaacaaatcagatgttttgcatgcttttccgactttcattaatatggttcacactcaatatcagactaagctaaaatcagttagatcagacaatgcacatgaattgaaatttactgatttgtttgctgcacatggtattgttgcatatcattcatgtcctgaaactcctgaacaaaattctgtggtagagagaaagcatcaacacatcttgaatgttgctagagccttactgttttagaattttggggagattatgtattaaccgcagtgtttctaatcaataaattacctacccatgtcttatataataagtctccttatgagaagcttaagaacatacctcctacttatgaatctttaaagacctttggttgtttgtgttatagttcatcttctcctaaacatagacataagtttgagcctagggctagagcctgtgtctttctaggatatcctctaggttacaaagggtataagctattagatatagagacacatgccgtttctatttcaagacatgtcattttccatgaggatattttttctttcatatcatccactatcaaggatgatatcaaagagttatttcctctattacagttccctgctaaacccgatgatttgcctcttgagcaaacatcactctctgatgcacatccacatcaagatgtgtcatcctccaaggctttggttcctttcgatccacagtctaaaagacaaaagaaacccccaaaacactttcaggattttcattgttataataatactagtactatcttatatcccataaaagactatatctcttattcatatatagttgagccttttcatgcctttattaacaatatcacaaatgcggtagtcccacaaagatattcagaagctaaagattttaaggcatggtgtgatgcgatgaaagaggagattggtgctatgattcagactaatacctggagtgtggtaagtcttcctcctaataagaaagctattggttgtaaatgggtcttcactatcaaacacaatgcagatggaagtatagagagatacaaggcacgtttggttgcaaaagggtatactcaagaggagagtttggattatgaagaaaccttctcacctgttgctaagttgacttctgttagaatgatgttgttgcttgctgccaaaatgaagtggtcagttcttcaactagacatttctaatgcatttttgaatggagatttggatgaagagatatatatgaagattcccccaggttatgcagatcttattggtgaatctttgcctcctcatgctgtttgtcgtttgcataaatcaatttacggcctcaaacaagcttctcggcaatggtatctcaaactgtccaacactttgaagggaatgggttttcagaagtctaatgcagatcatactttgtttatcaagtttgcaagtggagttttgatgggagttttggtctatgtggatgacataatgattgtgagtaacagtgataatgcagtgactcagtttactacagaactgaagtcttatttcaagttgagagatttgagtgcagctaaatacttttttggtattgagattgcacgttcagctaaagggatttcaatttgccaaaggaaatacattttggagttgttatctactacaggttttcttggtagtaagccttcttcaattcctttggatacgagtgtcaagttgaacaaagaagatggtgttcctctgactgattctacctcttataaaaagttggttgagaagttgatgtacttgcagattacaagacatggtattgcctatgcagtcaacactgtgtgtcagttttctcatgctccaacaagtgttcatttgagtgttgttcataaagttctccgatatttaaaaggcacagttgggcaaggtcttttctatcctgcagatgataaatttgatttgaaaggttacacagattcagactttggttcttgtaccgattctcgtcgttgtgttgctgcttattgcatgttcattggagactctttggtttcatgaaaatcaaagaagcaagatacagtttctatgagtacagcagaagcaaagtttcgagctatgtcacaaggcactaaggagatgatttggctttctaggcttcttaatgacttcaaggtgccattcgttcctccagcttatctctattgtgataatacagctgctttgcacatcgtcaacaattcattgttataagacacgggaggcagttgaatcaggttttattaaaaccatgcttgtggagactggcgaacatgtggctgatccattgactaaggccatttatccggctcagtttcacaagcttattggcaagatgggagtgtgcagccccactaccatcttgggtgtgtgtgtgtggtgggggggggggggggggattagcttgtatatacttaggctatacttgtgaataatagaagtggttaaaggatcggtatagtccggtttattcatctaattaaggtgaatcttttggttatttctggtttagtagagtctatatactatagatgattataacaaactctttagatcattaatgataaattgagctttcaccatgttttccctctcgttcatggttcctattagttagaaagtatattaactacagtcaggctcggcagcaaaatatattatagttttaagaagcattaaattttgagaaaaagtcttaccgtaaaactgttgtagtctcgattttaaagtaacatctactaggtactaattctgaagttaaagatttgatgtatagttatatattgacaattacaaaaacggtaattttagtggtataatatagttattagtgtaaatttgttttagacctatagtcaaatttaacttggtttgacacggatctatactcttaagttttaggatagcctttatcaaatctgatcgtcacagattggaaaacaaaattattttacccaattctatctaaacctggatatgagtttgataatgtttttctttattgtataataaacgatagtataactgtttttacgtaagatatatatatatatatacaatattttcttgattttattttatgtttagatgaataaaataattatttgtatactatattactgtatgaagactttacataaatataggaactttttatgtgtttttcctacattcttattcatacaaggataataataatgagcaaattcaaattattcagttttttaaaacaatcagttacaaatatataaatttcgcggacaaaattacaaatatataaagagattttgaatcttataattttcatcaaatattgtagtttatgatcttgttaccgattgatatatgttagagtaagacatagtttctgtaaaagccaatgttgataagggtgaaatagaatctctttcggttcatcgatttagggcttgaagattgtttctttttcttcagattgtgtctcatacatttttgaaatgaacataattcttatgaagtgtacgaaaattttatcataatgtttgggggaatgatgtcctttgaacatgaaaatattaattttgaaacatatgttgacctcttattttatttacaatcattgcttgtcaaatgaccacttaatattgatatgagaatgcttaacattattatttacacgtataatgtcatttcgtctggatcagccatacaccgacgtaaacggaacggagattaagcggcgtttacgtgtataacaattttcaataagagtgacaaacggcgcttaaacggcatctcactcctcgttatcaacaaaactaatcaaaagctccactgtcactgcagtgcgcatctttttactcttagtttttgatttatatctttataatcatgattccataatcatttttaatccagtcgtcacaaaatatccgatattcacatatcaatttatttttacgcatccactaacgattcatttttcctttttgggcatccactaacaatatttaaagacaaatgcatacacgaattcaaatcaaatggtattataagctgtgatggtacacggataaacataaactacgaaatctatgtaacaatctaattcgtgttgacttgacaaaaatttggttttggctaggtatgatgatagaaaaacactgataaattatttaaggaaaaaattcggaaaaaattcgaaaagaacttcaactaatttttatttgaaattttaatattcaactgttttttattggaaaataaaaacataatatataaaattgatcttaaaaaatacgatataattttgattggtgaaatcatacatacaagttaacaagcgttaatttgggtgacataattgctaaagtggagttaatagttaacaagccagtttgaaaacaaatgaggggactgtaattttttacttagtccagttaaccacggatttttaactattaatctcggtttaacgattctgttacccaaattaacgtcttttaactcgtacgtatgatttaaccaatcaaaaatatatcgtattttttttacaccaatttaattcattagatttttattttttataaaacaattgagtattaaaattctaaaaaaaattaattagcgtttttttgaaattttcccaattatttagctatcatactatcagttatgatcatatatagctatatataatagaatttatctatatgaaaacagatattattcacgtaattaaagaaacaaaataaacccgttatagctaatctattgtgacaacactttttcctaaagaggaacaataggtggcacacaaatcagaaatcataggtccaaatttgtttacgtaaagaagctaggttaatagaagatgatgagcacatgttcaaaatcctcgtggaagctaagttttaatcattttggaaggacattgagtgaaaccaaagtatgcatggaatatggattgagaccaaagtatactgtcgtccacgacccaatgaaacaaaactaaaaataaatgtaatgcacatgaactatcagataaatttcttggaataatatattatggatatatgtataatgcaaaggataaaataaaagaattgtaaatctggatcacgatcacatgcaatggagcccagcaaacccatcaccgtgttgcttcttcttctgcttctccttgttgtcgttttcgcacatgtttctatggtccggttcctattaagctattataaatcatgatttcaacatcaaacctaattcattatctcatcgactttaaatttcattagtcggtgtgggtgttgccagttttatttggtctatattgtttattggattataatgtccggttttctttagtcaaacatgaacttttttgttgcaaagtttttatttggtatgcttttgttaacatgaacttgtagtccggttttcaatatagttttaaaaggtaattagccaaatagctttatttgattaacgaaaataaaaaatgtcgtgagaactattcttttgcgtttttctcaaatgaaattatatctgatatttaaaagactatataatcaagaatcatttgtttcttttagaaactttcacaatttttcaaaataatgctaattaacaaactgttcataatgtccgtgtcttcccgtattatatattatgtatgtaaacaagatttctcctaattggctttctaaaccttcaattaatacaatactggacaaaacgaaaaagaataccgatcatggctcgtaatctttctaaaatactctgcatgctataattattcttcccataattaatagtaactttataaatgacataatatacaactccttctgtttcattatatttgtagtttaaggaattttgtttttctgcaaaatgttatttttattcatctatgcaaaaattaatatatttaataatttttgaccaattatattttacagtatattttcttattggttgaattaaatgtagttaatgatatttttatagaaaaaaagataaattaaataagatttttgtgttttcttaatctttgtgaaaaaaccttaaactacaaatatagtgaatcagaaggagtactaattaaatagtaagtatagccaattcatttatgataacatttaatttaattatgtactaaaccaatatagttgatatagttgttacttgttagagatattttttccaaataaacataaacgttattagcatagggccccctacttaactatatgcgtttgtcatgcgagatatgaccaaaaaatatggctcacattcgtttggtaagattagcgttagtcagaaaaagcgaaacacaaattaatccaattcactacccgtacatgtataatctgagaaacttgttactattttagatttattgtaattgtatctcatctcatgtatattttgcctaaatactcataaggaataaatagtagatgtgatgtgacgttgttgcttttttgcctcggcccttcttccatgtggagccatttcctaactttaaacttttgtctcttgtttctctcattaaaaatgattcaatattaacaaaatttcttttgcaagttacattttatgatatgaaaataacactaatatcaataagcaaaaatacgttaaagcaaggatattatcaagatatttttttctatagtaattctctaagactataagtctaaacctataaatataacgaaaatgtgtagaataaattatttatttttgtatttaaatggtttcgaaatcttgagaattcactttgtcaagatgaaacatacaaatttaaactaatatttagaaataagttctactttcactttcgagtttctacatttttaacttgcaaactacaaaatttatgaaaattcagtctataataaaattaaatattgaaactctaaaacttgcaacaaaaaaaactctgaactacctcaagattaaaatctaaaataatttatttttaaaaaatatgaaaaattgaaatataagtaacacataattccaaccacaataaaacctctataaattaataatgttgggatgagaaaattaataatttagagaggtattaatttatcgataaattaataattattaatttataaagagattttacaaattttgtattttttttacaaaaatttgatataaaagtagttttttctttaaaattaattatttttctaaaactaattacaaagaaaaaataattattaaatttcaaaaaataatacaaagtttttttcgacgtaataaaaatattagaattaaactctacaaataattaatggaaatcgaagaaaaaataatactaagtcatattttaataaatattgatatatatatatatatatatatatgtgtatatattagtaaatttacataattattaatttataatattgatgagaccatatatttatataagattttcgaaaaagttattatcttattaatttatcgatttgtatcaatttttacactggtcccaactcgggaccggaagaatttattaatttatagatgttactaatttatcgaatattaatttatggaggttatactgtagtattaacaaatcatcaaatacgatttcacacaaaattttgaaaaaaaaacaaaattagtaatctaacaacacaagattataattgcatttccaatacacaaatcaacaactcttcattctcaacaaccattcaatatctaaatcaaaattttctacaaaacccatagaaaagcaatcacttttccaccacaataaaatcgaaaacaaacattttgtatgtatatgtaaaagttaatgcaaacattaatttaaaactatatggaaagctccattaatttatttttaatctcccaactaattcactacaccaattttgtatgagagtaggcgacgaaaccacaagtacctatatcagagaatcagagaccaacgtcacttatttacacactctgttttcttttttttggttgcttcttctctgatctttctttctttttttttttttgaaagaatcaatttccctctcaaatcagaaatctaaaaatgggaacaacgatcttggttctctccaagatcctaactttcttactaacaacaatgctgattggatccagtgtgatccagtgtagtagtgtaacctacgataagaaagctatcgtcatcaatggccaccgtagaatcctcctctctggttctattcactacccaagaagcactcctgaggtaagaaaaatcgaatctttatcatagaacaaaaatgggttttgtttaaatttgatgttttctttttgtttatagatgtgggaagatcttataaagaaagctaaagacggtggcttggatgttattgatacttatgttttctggaatggtcatgaaccttctcctggaactgtacacaattcttcttctttcttgttaaattcttctttaaagttactaactttatcaaatctagatttgggtttttggagttttagattctcttctatactatgagtgaagttggtggggttttgttttttttattgcagtacaatttcgaaggaagatatgatttggtaagattcattaagacgattcaggaagtgggtctttatgttcatctcagaattggtccttatgtttgtgcagaatggaattttgggtaatgttcattaaatttctctttaaaaaagtcaatttttgaaatttgaaactgatttcttgaaagttgtgttttttttttttttggtggcagagggtttcctgtgtggttgaagtatgtagatgggattagtttcagaactgacaatggacccttcaaggtaataataaatgttggttattgtttaattttggattagtatagtgttaacatttgtgtattggttaaagtctgcaatgcaaggattcacagagaagattgttcagatgatgaaagaacatagattctttgcgtcacaaggtggacctatcattctttctcaggtattatacaagttcactaatctttttttttttttgtgacattgcttaaaaggtttgatctttgaatgtattagattgagaatgagtttgaaccagatcttaaagggcttggaccggctggtcactcgtatgtcaattgggctgcgaaaatggcggtcggtttaaacacgggagtaccgtgggtgatgtgcaaggaagatgatgcacctgacccaattgtgagactaatcttttaaacttttgtgattgataagagtagtaatgtactatgttgtaatttcttgtgcttcttgttttgtagataaacacttgcaacggattctactgtgattattttactccaaataaaccgtataagccaactatgtggacagaggcatggagtggctggtaaaaacaaatactttctttgcaaaactgtaatgttattagagacacaaaatgtttactgattgtgtttgttgtccactatgatggtgaaaaggttcacagagtttggtggaactgttcctaaacgacctgtagaggatctagcatttggagtagctcgtttcattcaaaagggcggttcgtatataaactactacatggtaattagtccttgcacgaacattacgaaaaactgttttcggtttcggtttcattctgatgcttgttgtgtggtgatgtgacagtaccatggaggaacaaactttggacgcaccgcaggaggtccatttatcaccactagttatgactatgatgctcctatcgatgaatacggtacaattttcttacattcagttgtgcaaaatgttgtttagccttttacaattttacgaaaaaagtctgttttttcgatgatgcagggttggtccaagagcccaagtacagtcatcttaagcagcttcatcaggcaatcaagcaatgtgaagctgccttagtttcttctgatccacatgttactaaactaggaaactacgaggaggctcatgtgttcactgctggcaaaggaagttgtgtagctttcttaacgaactatcacatgaatgcacctgcaaaagtagtgttcaataaccgacactatactctacctgcttggtccatcagcattcttccagattgtagaaacgttgttttcaacactgcgacggtaagtaatggactagtagttgctgttttggtgggaaagcctttagttgcatcatgttgaagctaatatgaagttgttggacaggttgctgcaaagacatcacatgtgcaaatggtgccatctggttccatattgtactcggttgctagatacgatgaagatattgctacttatggaaaccgtgggacaatcacagctcgtggattgttggagcaggttaatgttacacgagatacaactgattacctgtggtacacaaccaggtacattttgaatatccaatagtaacattatctttgcttctcaaacatgatttgttcttggaaaatgaatcggtgtttccggggattgcagtgtggatattaaggcatcagaatcattcttgcgtggaggaaaatggccaactcttacagtggattctgcagggcatgctgttcatgtgtttgtcaatggacatttttacggtatgatacattcttttgctaactcactcctaagaaaacagctgtttcatcattttctgtttgaatgaaataggatctgcctttggaacaagagaaaacagaaagttttcatttagctcccaagtcaatctacgaggtggagctaacaaaatcgcactactgagtgtagcagttgggttgccggttagttctaaggatgaaataaactgcatgtttgttttagtttctgttgcagactgataaatattgtttcctttttgtgtgttgtgaagaatgttggaccacattttgagacgtgggccacaggaatcgtcgggtctgtggtgcttcatggccttgacgagggtaacaaagacttgagttggcagaaatggacttatcaggtgagattcaataatgcttacaagatgaaactctcatggatagttaacaaccgaaactaaataacatttccgccttttcgggtacttcaacaggctggtctgcgaggggaatcaatgaacttggtctctcctactgaggactcctctgttgattggatcaaaggctcattggctaagcaaaacaaacaacctttgacatggtacaaggtaaataagaaactctgacttgtccaagccctttttaaccaataatctgtaatattaagtcttgagtctagttatagtagacctatagacatgacaagctgaaacatgttcacgttgacccaatgtgtatttgcttatcacatatgcaggcctattttgacgcgcctagagggaacgagccgctggctttggatctaaagagtatggggaaagggcaagcttggataaacgggcaaagcatagggagatactggatggcatttgccaaaggagactgcggaagttgtaactacgctggaacatacaggcagaacaaatgccagtctggttgtggcgagccgacacaaagatggtaacaataatgctttgttcttaactatacattttcgagctacttaagctctcttctagtattaaaatgagtcttttttgtatgtaggtatcatgttccgcgttcgtggttgaagccaaaagggaacttgttagtactttttgaagaacttggtggagatatatccaaagtctctgttgtgaagagatcagtaaactaacttaaaaaataaaaccaatattgtgtgtgcattacactaaaagcattactcgtgctgtgtttaatttatccctctttgtgaacagaaaccatatttgaaactcgagatagttataatacaaaatgtgtagtaaaaatgcatcattttattatataccaaaggtaaaattaaactttgaagtaatagcgatttaggaaattaggatagagagatttagaaaccattagcaatcaagcagaagcaacatggccactatggtgcacaagcttccgctggaggatttcgcagcgccgaaaacacgatcaataacttggccctttttcatgaagacgaaagtgggcaatattgtcctaaattcgaaatcatcacgcggtgcaatgcaatctaacggtgaatttagtgggctaaaggtcaatggtgtgatgatgacacgatgctcttgacaaagttcctatgacgaccacgcctaaggtcaacggcgtcgtagtgacacgatgctttttttttaaaaaaaattttagcttgcatcaagacttgaaatgtaacttaacggagagcacggtagagggcagatcaacaataaagtcgcgattgacaatcttatcaaaggagatgtctaaactattcacactctcataataaattatcctattgcctatcttttaataaaatcctaataatactccttcatttctaagaattttttaataaaaatttcacatttttttaaaaataatatataatgacaattttaacctttatatacactttaaaaataatactaaatttctatctaattatttaataagggtaaaattagataaacagttttaaaatttgcattggaaatataaaatttctatttttatgacacaaattattttctaaaaaattcatctttgtgagacggagagaatattaacctattagaattatgaatcgtttaattatagagagaataaagtgctctacatactatattatagcacatgtttagtgctatattgtaaagcactaaaccttatagtgtttagtgcacatgaatactaaacatatgctataatatagtatttttctggaagcattttcttctaggagaagcatcctctttctcatgtcacaattttcttcttccaacaactttattttctttatcatatctgagttttctttaccaaaccatgaaacattttcttcaaatctcatggtgagatgctgcttgaaactttttggttgcagttgggccaattcaatctctctctccctcttctcctcaaaaatcggaattatcgaaagcggatgcagtttttccaaacaaacatccaacatgctgcaatacttgtaagtttagaaaggtagactgcagcagatttggtggtatatgggcgggagtattggcaggttgcattgttcttcagtagccttatcatcagattcgctttacctctttggatcgaagagacaaggcttaccaagttagaagcaaagtccggattttctttggcatagccatacagaagatggtgtatatgtgtaaacccatatgcgacaaaatgctttctcaaagcttcagaaggagcatcatgaatagagatcttctttgacctcttattcttcttcttcttctcatgacaaaaaagctttgctgctatagatgcatccagatgttgcaattctgttggaggagcatatgaatacttggtggtagatatgagaaccgacgagataatttacaaaatagcactaaatcatggctaaatactatctctcgagctgatccatgatttctgaaaagtctttatgtaaccattgaccagttaatgaaggatcaagaagatcaactctacatgaaagaattattgagacacgtcatgattaagaccaacaaaactgaaacaagaatcataagctagtaaattaaagagatttcaagtaaatgaacaacaaggggacaaaaggcagtatccttaaacatctaaccgggacatgtcaagattgaggtagttttctttcacattctcttcaagtgcctaatgaagaataaggttaagaaaattgtatcagaataagaagactattgtccctttcactagtcaagcatatatcactcatcttcaccaacctatataataattttagatttccacttaaagttttttatcttaacgtttattaaacactattatatatagaatttttatgttagcatttattaaaccctattatatagtaaccaaaactttttttttttttttgccatccgattaaaattaggactcaaacgagccaaaactgaggaatgttgtttacataagttatatgaagcggttcagtgcgaacttttcgcgctaagttatccgcttttacatttgcattacgagaaattaaggataaagaaaagtatgtgaattcttccctgtcgctctgtagttcctccaaataagctgagaacgtcggccattcggttggagaagacaccatcttcaccagatctgaacagtccgtaaaaaatgctacatcttggctgtcggcaccaatcatacacttcatcgcccatagtagagcttcgacttcggtatgtaatggagatagacttcttcgtagattagcagctcccatggttggtggctctccggttgctgatgtacaaaaccatcatgtacctgaaaacttattgctttctttccatgatccatccacaaaacaacgatatcctgaataagtattatcatttgagatatctcgcacccgagttgttttgtccgatccgaaactaccttgaatttcagtatgaagctcagcttgagctaactaccacaattgtgcctctttctctgcgagacgtaatatctctagaggatctttatccacattttcaaatatcttctcattccttgctttccaaatataccaaattaaccacggataaaaagatgaatccacttctttaggtattcttgagaataaatgatccaaattcgcaagaatagagttgaaaggaaaaaatcttgggaccgtcgggatcgatgaaagagcccatatctgccgggttgggtggcattgaaatagggtatgattaattgtttcctccatagcaccacatctggcgcaaccagaatcacaattaatccctctcttccgtagattttccgtaaccggcacacaacctgataaaacttgccataaaaagtgtcgtaacttaggcgggcattgcactttccaaatatgtgcttttagagttttgatatctgggccaataaaggctaaattaacatcaaaatgatctagtcgcgtcgtatgataaccagatttaactgtatattttcctgatttggtaaaatgccaacctaaagaatcctcttttgttgacgaacccaagtgcattgcacttatcagaaggacatcttccggaacaaagatctcgtttaagaaatcaatattccaaaaatttgaccgactgtctatgagattgttgacttttaaagatggatcaattactgaaccattacttattgctggtctcgggaattgagctggaatccatggatcctcccagactgagatggatgccccagaaccgaccctattaattagtccttttttaaccagagatctagctgaaattatacttctccaaccataagatggagaatatgattttaatttatccagaggattagatttccgaaaatatcttcctttaaacactttagcaaagagtgaatcaggaactgtaattagacgccacaattgtttggctagtagagccgaattaaagtcgttgacactacgaaagcctaagccaccatccgccttgctactacacaatttattccaagccatccagtgcattcccctggactcaccatctgaactccaccaaaatttcgcaaccgcacttgtaagtttagaagtaattgttttcggtaatctgaagcatgacataacataagttggcaataccgcaaccaccgatttgatcattacttcttttccaccttttgataagaattttgccgaccatccatttatccgagtttgaagtctgtctctaacaaaagagaagattcttgtcttcgaaccacctagactttccggcaatccgagatacgaacccattccaccaatgctatgaatacccaacgctgatttaatttctgcttttatatcatcacctaccttatggccaaattgaatcgatgatttggaaaaatttatcatttgtcccgagaccgcttcatattgttttaaaatacccaaaattactccgcattgttctttattagctttacaaaagaataaactatcattcgcaaacaacaaatgagagactgatgggcttgctgttgccactttgatacccgtaatcaatttttcttgctctgcctttcgaatatttgcaatgagcacctctgtacataggataaatagataaggagagagtggatctccttgtcttaaacccctctttgggactattagtcctctaggttgtccattaagtaggaccctatactggactgttgtgatacaccacattatccacgatatccacttttcacagaaacccattttctttaataattcctcgataaaattccattcaactctatcatacgccttactcatatcagttttgatcgccatgaattttcctttacatgacggattagttcttaatccatgaaacatctcctgggcaataagaatattgtctgaaattaaacgtccttcaacaaaagcagagtgtgtttccgaaataagacttggaagaatcttcttaagtctttgacaaaggatttttgaaataattttgtacccgacattacaaagactaatgggtcttaattccgtcattcgagtcggtcgttccgtttttgggatcaaacatatattagtcgtatttaactgtttatcgaaaactccatcttgtaaaaaagagttaaccagaaaaagcatatccatttttatggtagcccatggtttttgaaagaataacgctgtcataccatcaggccctggtgctttttccgggtgcatcaaaaacaaagccgctcttacctcatcttctgtagcaggtgtcgttaagaagtcatttatttgatccgttattaaagttttaacctctgataaagattccgcaatattctggggattcgacttattaaacaaagtctcaaaataagacaccgctatatgttggacatctttatcctctgcaaaccattttccattttcatcatgaagtcctatgatccgattcctagcccgtctctgttttgttagagcatggaaatattttgagttattatccccaaccttcatccataaactcctacttttctggtaccaatattgttcttcatctatataagcctccttcaaccgtattgttaaatccgttatctcctcacttgttctcgaatcatctctctgtgccgcatctatgaactcatttttaatatgaactatgaactcatcttttattgcagtagggaaaactgatctatcctcgtgtgctattgatatggattatttttgtagtggatcactaaccaagtcctaccagctctaacctgctgtatgcagtctgacgcttgttcaagtagagtcactatgtgtctatgctagtcccatcgacaggcctactctgacgcgcctagagggaacgagcggctggctttggatctaaagagcatagggaaatgtttgaatctacaggtcagcttcatcttctcttgttttctctgtttcagttcttgttcaaggataaaaacagagaaacgttggataaaacttcaaggaacttaaagagatatagacgtgacgtagatggagaaatatgagctgttgaaagtgatttttccatagtattacataacattttcacacatttatagtggaaatcagagaactaatcactgctctgttcataactacatattttcaacctacgctctcttatcgtgtttaaaaccagtcttaatgtgtgtcgctattttcgtgttcgtggttgaagccaagagataacaaaccagtaatcgaaaaatcaacatagttataatacaaatgtgcagtagcaatgcatcacttttatttcatacgaaagataaaaactttattatgatgcaaagagttagaaactgaaatcaatcaagcagaagctacaagaccaccatgcttcatcagcttctcattgatctcatctttcgcagcaccgacaacacgatcaatgatgttgccttctttcatgaaaacaaaagtaggcattgcctcaactttgaattcctgagcaacagcttgcaattcatcaacatcgatcttgaagaagacaacattagtgaacttcttagccatctctgcaaacactggtgcaatgaaacggcaaggtggacaccatgatgctgtgaagtctatcacaatctggtttcaatcaaaatttcagaacaaatcagaacacaaacatcattcaccactaaactaactaatcaagaaaaccctaaaccataacgtaatcaaatcaaattgaaaaaaagccctggacataacaagagaaagtaaagtttctataatttcagaccatatcaggatacaattatcattcaccactaaggtagctaatcaagacgaaccgtaatccctaagtaaagtaatcaaatcaaattgaacaaaaccctagacaggacaagagaaagttctagcttctatcaatttgggaccaccagagcaagatatgggacaagaacgggatcaaaagcaaccgtttctcgaacatcattcaccattaagctaactaaccaagaaagccctaaaccctaagtaacgtaaccaactcaaattaaaaaacaaaaaaaaccctagacaggacgagaaaataccagtttctatcaaatttcagaccaaatcaagacatggtacatgaacatgataaaaaccaaggttttgtatctaacatgaattaccagtttaccactagatcaagaaaactgaaaaccctaagtaaagtaatcaaatcaaatagaagaagaaaccctagagaggagaagaagagaaaagtaccagtttcttggattcattggcgtctttgaccttctcgttccaaacttcgagggtatggcaagcaatcacttctccttcaccggccatttttattatttgttcttaagcttttaagagttttgtttgattgatgagttttttttggtgaatgaaagaattattcttgttgggatcagcttttataggcaagacttgaccacctatacctctacctcttctcggtctttttttttaattattttcctaaaatgagttcgatcttgacgcgtaggagtgtgaagggatccaacggtttatattaaacgattaaagaataggcatgagtctaggtcaacggcgtgatgatggtaacgagtaacgacagttctagatgtagaagacacgcatgttttgtgtgcacgatatatgagtttatccgttcttttctcgtccttgcagatataaaaaagtaacgtttgtttttgtcggcacgaatataagtttttttctatgtgataatttgtggactattccgagcttttagacgtgcaaagttgaatggaaactttatctaagacaataagaaaaatattatctataatatgctagatttatgttttgaataataatgcaagctgtttttgatcaatcttctttattcctctaataaatcaaattctagtaatgttctttcactaatgatagaaccgagagctggctgtatgtgtgtttacgctttgacactaattttattctcaaacgacgtcgttttagactgattaacagtcactaacggataataacgggtttctaggttctattaattactgataaaaacatgtctattttggtcaggtcaacgaattgttcatatcttaaatggtagtcaacgtttagttcatgttttaaatggccaagttgatgtttaaaatgaccacaatttaaaacttgactaataaagtcgttaacagatgataacagacgttagaagttccgttaataactgataacatcatgtctattttggcctggtcgacgaatgatcatgttttaaaagttagtcaacgtttagttcatgttttaaacgaccgcatacgaagttgacgaataaaatggccattttttgaaagttggggattaaataacattttttcctaatttttagtcagtgtaggttttatatccttttttgttggatgattatgtcttgtgcccttccattcatacgtgactatgatgaatgatatcaacctagcaccacataaaatgagctttttcagatacagtatttcccaacaaattaaagaatcagaagtacaaagcaaatctatctattttattattttcatactaattaacctttttcactggtaatctagacattgttagagttttcttgttatgttcttttattattaacttagggctaaccgagagtgtttatagatactaaacgatctggttactcaagatggtctacatgtgttgtacacttctcctcgcaatacatcgatcggtctatgttccaaagtgtagcgctccggccccgtgtacacccctgtcttctccaatagccccatcgcttcctctcttccgtattttgactcatacagcttcaagtactcataatcctgattcattctccaaataagccaactggaacagtttttcgttgttatctgattggtaaaactataaagttgacgtacctgtaagccactaagaaggcgctctagcctaagtgaagcaactggctctgaagaagatgagaaaacttcaccggggtagtaaagaactccatcaccaggaggaagaccgcgcctaaactttacctattcatttggttatataatatcatgaagcaatcgatcaagaaacatttacaacagaactaaggataagaaaataacctcggcgcttggaaccgttgccttctcatagcaatttgcaccccagtacaagaacccggttccaccttctttccacacacgccacatcactgcccgttgctgtgtaccacgcatccccagatgccaatttgggtgaggatctgaaggtccaaggcatatgtatgtccaccattcctgcaccagcaagaaaagtcctctttatgattcttgttgctaaaatgctaacacatacaggaccactaatgagcacatcattaagatgaccttgaatcaaatttaaccattccataactacagtactttgatcgacatatgatgattccattactaccaaagctagatgtattcatgtacacgtgcaaacgttttcaaagcttatgataactaattaactatattgaccaaactctagtctttatttctattcagttaagtatacttcaggtgtatggaccagacgatttcaaacctcattgagaataacatagacttgggtcaatggataatattctctaaagaagaagtaaaagggttgatggagatctgagagaccctacctcaccattctctgtctgcaattcgtcaagaatatccttcaccaaatcctcccggttaccaagcacccactcactgaatatcaaaccatgatttaacaacactgagataaaagattaaagtaacgagagcctagttgaaaacagatttctctataagttcaccaaattcatcagactttcttaaatcatagattcatatactaaactcacctgcctccatgtctatccaagtaggtgagtggcggaaaagggaaaatttaagaccaaagacgtatttgctcaaaatatattgacaaaggaaatgatttttttgttaactgacagatgatatacaatttattctgaaccaattaggtgtcttttaataggtataaacacaacacacatagtacacccaccggatattaaaattaaagattggtaaggttaagatcttgtcctcattaatcacaaaacctaagtaagagaaggcaatttatttgaatgattaaattactgccacctaagagaatttgaatgatcaattaccttgtgcagtatatctgagtatagggtcgaaggagatttggaactttgacaaaagattcaaaaggtgtcggagcaagaggtgcatctcccggtcctacaaaaaaaaaagagtaagactatttgactaaacttctcaagtagctaaagcattgttaaattatgaactttaattcatagtcacagtttaacctagtagatttcagttcccttttcaccaacatacatgtatgaatatccataagctctgtaatgaagcatatgatacaactaccagaccattgtgaaaactgcttacaaactaacgttacccaataaactaatattatgggctgcataataacatagtgtggtatactgatcaacctactgatacaaactacatttatggttcaccattgaccaattttggagctcatatcaacaggaagacaaagccatgagaaccaataaaacagagccccagcagaaaataggaagtaaatttgagagacagaaactaattaaaacatgtgaattccacaaaaaataaaccataccacagtagtatgtagtcaaaacacgagaatccggggcataggcgtaaatttcactggccatcttgcgaacgttgtcaaagtgctccatattcagtggctgccaaaaaaaattgaatagtaataagaaagatgtcaaaaagttattaaaagtaagacaacacatcaacgatggtacatgagatatagaaatggaatagaatgttactattaccacagtaaaactacatccttttgacaatcagtgaaaaatattaatgaagcatacctcatcccacaagtaaaagtaagctttgttccaatggggtttacttctcaatatctcaacttctttccgcagataactttcccttgaatcatccctgtttgcacatcaacaggcagatgaaagttagtttgggtacctacaaaaaaatcttgagtgggataacacatgcataccctgctataacttgtctatacggtactgcatatgcggcaagccttgaatcagagagatattcatcagattttggatgatcagctgtgaaaccaaaaagtggaacgcaaatggagagctcagagcgtgaagcaaaacgattagcttgcacaacacaaaacaaatacagatggtgcataaaaaattaagaagaggttgcagtaccaggccatggtgaggtgtatgtcaagacacgcatgctttcaccccatttgcaaaagtacggactgatccgatactgaagaagccatttaaaatggagatccaatttcttgtaccaatcttcacttccatgttcaacagcaaaacgatcctcaataacagtgtcagagacaccaataacagcagggagtgatggagtcactggaataataaattcccaaactgtcaatcttagcttgatacgcagtgaaaggtttgaaacaacatcttcttccatcatatcagttgatccattcgtagaaatgaactccgaaaatgatggagagaagagaattcttcttaatgacgaacttgcacatttaattctttctacctaaaagataagctgcagatcattgacgcgtaaaatatttatcaaaggtgaggcaataaagtacaaggaaagtaaatattaccacttcatccatgggttttccctctattggttccataatatcaagacaggtattaagttccacacagagctgatccttctcatgctttgccaagtgagaagaaccgctgttaccaaacacataattggttataagtatgtcaaatccatgatgaacaaaataatcattttcacactgacataagtggacctgtacgaatcctaaagtagatcaaagaaatggtatacagagagagactcaccctccatcagttttcatagcagaaataatgatctctccttcatattgaccaggaggctgcccagtaggaacgtctattgagacccaaatgacacttgtttctctacaacaggaagcattccggctatgtcagtctcaggaaataagacagcaatgtcaccacataccagattaagaaattggactagtgagtggtcgtaccctggaaataagctaagttgagaaacaggcaaatcaaggggcaccaaagcatcaggaacgcctaagacaggcaccactcgccgcaactttagtgactggccaacaaccaatctgcgatgatacaggaaccatgtcaaaatatgaaaatattacatttgataccaaagatatcatttacatgttctccaaagaagaggataaacatgatcaaggtttaacagctcacctatctccagcagaagagcataagtcactgcactgaacctgaacaatcccggaagggctggaagcagcccaagaaactttaggacgcatggctatctgaaaactttctctttcatttctagccgccaaaagatttatctgtagaaacacaatatggaagccatatgtaactcatgcatcaactcataagaaacagaacgataaatcagttattgatataactcctctaaaagagatcttctgtatcatccccacggaccccacctttcaaactagttcatagaataggaccaggtaccattccactagaatatttacagctaattcagagttaaagcttttggactccataaacacctaacagaacataagaataaacactaaccacaagcatacaaatagaaagcttacaggctctagagctcgaggtgtttcttgtgaaccaacattaactgtattaggcatacaccaaacattcaccaaatcagcagttggaacctctgatggatctgtagattgtttaagtggctcagcatcattaaacccataagctgttcctccaccagccactccttctactggcacagtcatctcttgagatactacaaaattctcaaaaacgattaaagattgtcttcaatcatctataagctaatttctacaatcactttccaatttcaaataaaaactacgaaatagaagctagcttatgaaatcttcaagcgtttcgttctcaaagaagcacatcgagtgataaattttcatcaactcctattgagataatctcgagaaaacgacggagaattgcgatagtagagaagaaattgaaaattgagtatgtgattgtaccgtacgaaagagaattgagtcttattattaccattgttgtccatttttttttttggttttccgagaaagtcgcagagaatctggagattctttcagggcttgaagaaggaggagagacgatcgcgttttgcgagagatttgtgaaaggaagccaaagaacacgtaagggagttcaatttcaagctttttgttttgttttgtttttcttagccgtcgtggctaaactgaaaaagtagcttgcaggctttaactcattgaagcttttttgctgcaatattcttttgggaatttgcaacaaaatggtttatgaaataaaagagagttaaatttttttttatccaccctaaattttgtttaaaaaaaaaaaaacactttaaatttgtcaactatagaaatttttttacatatttttagaagatttcttattgattagttgattttataaccaaaatcatatgttatttgattattaatttgttcactattaaaatacaaaaatcttttaagccatgttttatctaattaaatttacagattttaatcttcttattttttttatacctttttaatttttgaagctaatttggttttctaagtaacactaattatttatagtcagtttttacaaaaaaaaaaattgtcgtcttaaatttattatttattacaaattatgataagacgatgcattttactccttctccatgctcttcatgcacaccttcaatgatcttctctgcgtagaatcctggcgaacggctataattatacatcgttggagatctcttgtagttcattaatctgcaaatcttctaataaatggtagtattgggactcaacctcatacctcttagtgtagaaccattaatgaacccttccaccaaagtttttacaattaaaacttaaaataaaagaaaagccttaattaatcaccccataatctagtaggggtagtttttcataacatgaagaatactgaaagcatgtacagtatgttgcgtcatcatcataagctgttatttgcctaaggtgtgttagtctcttaagtcctttgtagtctttggactgattcgaaagattagtgtgatctcattatgaaataactttctcaaatctttttttgccaataatcagaaaccgctttttttttttcattgacggtgaccttggtgggattgatgcaagttttggtcttgtcttctgatagagtgatgaagacttctttcgagaataaaagttatggaagtgggatgcccataattcagtaaccaaagcgctctcttatttccatcagcctcaatacacacaagcttatacacatgtatatgtgtgttgttgccacgcaataaatacttggatttgcatttgaaatggttccaaatcaatttatgacaaaactgaaaataattacccaaagaccttgaggtaacaatttcagcatagtagcagcagcagctacaacggtcaaagcagggcgcaaaccagagaaaacagcggactaaggccacctttgacggttgtaggagagctctacgttccatggcttttaaagggtgagtctcctcctcctttagctggatccttttgcaatagcacatcatgattgattgaagccaattgtgacaaattctgcatcatcataacatgctgttaatatcctgtacttcaataataattatcccaagacagaactacccaacaactccaatcaacgtaaactgggattcatatttcagcttttagcagccaaatttaccttgaaagaaaagttaatgagcgagagataataaggcggagaatcaaacttctccaggttggtgcattcatccaactaaaaaacacacaaaagcaggaaaaataatttgcgatagatacgatgattgcaaatagagtacctagagagaaaaggatggagtttccaaatgcctacctcgtctcctgaatctggatttgacccactgttgttaccagtttcagtatcgctgcaactgctttcactaaagcgtgatacgaaatagcttgtgtcatttatactctcaggttgcggaacaaaagcagcctaccaaaaagaaataaaaggaaaggcagctaaggctttaaagaacctttcactcttcacattcataatatgcatttgtgaagactaagctcgatttgatcaaacagcttctgctttattttctattttctttcttcatccagtaagtaacatgtatttatttgcataatttgtcttgaatgtaaaaagaggttccgagtggagtacttaccttttgcaaagcaagattctcccagtcaactccttgaaaaaagggatgcgactttacctgaaaatgagaccagcgatgttactgaaaattttagtaatgaccacaacaacagcatctaataggcatttgtttctcaattgtgcggctttaataaaaagtaaagggaaaattgaagtaacctctgcagcaccgttcgcccccagtcgcttttccggctcatggacaagaagcctattacggagagaaaatgaatctatatgaatatgagaaaaagtagtaaacgtcaaacctataaagtgtttataatatttctgtcaaacttaacatctccttaacggtgaccagcataaagtctaaaaatcagctgatgttgtaggtaaccaatatgcagaaactaggataaatgttaattcattagctggaaatatagtaattctgcttagagaaacatgaatgggactgtgggaaagacggatgatatgaaaacgggagcagaatcctcaaaacagacctgttaatcaaatcctgagcttcataagacatttcaccaggaacatctggccagggcattttaccattgaggatgttgtcaaatattttctgtacagcaaaattaaaaaggtcaatctgtgatgaattgtacacccattggaaactagattttgtttataactcagctcaatataattcagagaatcttttgccaaaaagacatagctactattgttcaatcagatatatgcaaacaaaattccaagtgttattatgaaaggggaatcaagtaaccaagtcccaaaaatgacaaacgcacaatcacctatataccaaacgatttctgtgatttgaatgtttaagatgcctaaaacacattggactccaatgaacaaacatattattatgataccactaagctttaatagcttcaaaacttgttgacagcttcagacctagattctagacaggaaaaaccatgcttgaaagtccagaagtaaattttaatatgtacgcacctctgggcgggatgcggtaaaaggtggaattccagttaataattcaaacaagacaattccagcagaccaccaatccgcagcataacctgcaagcaacaccaataaggtaaatacaatttactggtgcttcatgaaagcctgatttaaaggttgtatccaaaccgtgttcagttccaagaagaatctctggtgccaagtagtcaggtgtcccaacagccgaatgccgaattctttcttcttcttggttcttctgaaaatgatgagaatttgttcttggggatacatctgactcatggccagataaatcaattgtgttgtttataagaccaatctttgaaagcccaaagtctgttagctggtaccaaaaataataataagttaggttgtaaaacaaagtacttcaacaaccaaaagggaaaacaatattagtatatggttattttcatatttttgtacaggcgtgggaaaacaatctgtgtttgcacatctgctgcatataactctcttttttatcaagtaaagaagggcatctttcacttttttttgtatgcactaaggaaaaaacatttgaccacctaactgcaagaacatattagctacgtgagagtttaaatatcagaccttgatgtgcccattataggcgattaacaggttatcaggctttagatcacggtggacaatcttcagagaatggaggtactccaatgcaagaacctgaaataaatgagaactctttcttaaggaatccaaacaaactttggtacagtatggatataaagccttcaacttaccagttccgcgatgtatatacgagcaatttcttcgtcaagacagccaactttctggagcagagagtatagatcaccaccattaagatattccattaccaagtagagattatctctgcaggtgaatgagtaaaaaaatcgaacctgcattaataacatcaggtgttcagcctttgaaagaatattatagttggacagtagcaaagaagtaaaacatttaccaaaaaggggtatctgacagttattagtatatttcgctcttgtagtatcctctcgatatcatttttccttatcatatccaactttttgagtacctgcatatgagctaaacaagattagcacatggacaagctgactctgaatagtacaacgaataacaatgcagcaattgatacaacatagggatttaggatactagcctgattcacttatattagcttttcaagtagaattttcataactaagaattccatcttaagagtttttcattatgagaggtttgaacaatatggcaaaaacgactaggctgtctaaaattggacaaaagaatctactactatttaactatatttaaatttatattcttgtcactaaaatatatggttcaaagccctgcgcatatctatctgcaacaaagcgaaataaacaccaatctatctgcatcaaagaaagaaaaaacaaaatgcatctacctttattgcaaaaaagtctccagttgttcttttgcgtgcaagaaagactttaccaaaggcacctctacttattggtttgatgatctcaaagtcatcgatgcttatcctatctttcagcagtaactgtggagtagccgatgcatgctccaagacatcttcactctctttaatgttacccaccgaacttttatcggcagtcaattcacgagcatgtaaatatttctcgctgtaggtaatatcagagttagtaaaacttataggacgagtgcagtagttagtatactattgcacagtgaatttaccagagaagtttctcgatccgccccccgaaagtatctattacaagtgctttgagcttgccctgcttcaagacagcttgtatgtcttgcatgcatgccattatatagtcacaggacccctctttcgagaaatctgtgcttgctccacagcgggcaatatcagaaaggtccatcatctgcaagatgaagaaaacgaagaaaaaacactggaagatattatgcttcgaaatgtttatttattcaaagatcagtgaaacaggtaagaaaatgatatctatatgatctggagaatagagacccgccatggacaagtaacaaagtaatgaataagaagaagttgaagctaggaactcgctataacctagagaggttataacaagaggagaaattctcaacccatcaatggcatcagtaatactcgcaaaagtttgagcatccaaagttttattgattaagacattaaggattctaagattccagcaacaaccaatctatatatcaaaaactcagcatgatatgacctaattcaatgtataagaatggatactgcaaggcacagtagtaaactagtaaagcaacatataacgctgaaccaatacttaatctacctaaaaagagaatataatggaaacagaaaactaaccagtcgaagatcctcttgctctggacaatgccgttctagccaataggagtcaaagtgacttgttctgggggtatttgttgaagatactgacgtgatgctacctgttgatgatgaagtggcatgatggcaaaatttggcccctacatggctcttaaggtgaataggatatgtgtaagactcgtctatgaaggcagtgtccatctcgtgcagatcctcaaacattccctctaaacctttattccgccattcgtttatcttgggagaacaaccttcagatgcaactccagatttccgcagaacagagttttccaagccaccagcttgagtgaaggaatttaaacttcgtgaatcaattatctgttccagtatctcctccagtttcaaaaggcgctcatcaacatccacacaatttatttcacatttatctgcgtatgcacatatgtaagagtgcggttccagatggaagagaggaacttcctcctcacatatcctgcagattacataatcagatccgcctaactcttttccaggctcatttgacatcttatcttcatactcatcgctcaaataaaatctttgttctaccactttactatcaaattgaggttcatgcgatggaaattcttgtttagcagctgcataaccttctctagcagcattattgccatgatcatttggtaccacataatcaagtgctgtctctgactccaaagattctttgtctcgtcttttgaatttctgcccagcttcatttctttgatattcaggataaccagaaccagaatcatcaactctaggagtagaaccccaatctgtttccaaagcagggatgcgttctaaacattccttaaatttgcgaaaggagctctcatcaattggctcagtctccttctgaaacatcacaactcttgtacaatgagtcaatataaaaagcaactgagagaacaaccacttcacaagtcctgcttggcactgtttccttttcctagttaagtcttggacaatagattcacaagtagcacgaagttgagcagatgtcatctccatacaggctcgagccacatcaagtaactgctctgccatttctcgatcttcaggacatgatggatccattttctccatagcctctttgacatctctgacaaagacatccagcttcttatccacagtctctttagcaacatcaaatcttgagtgaagtgagcccagaagttcctgaaaatcattgcaattcaaaaaatagaaccaaataacataattagaccccaacaaaatgagtcactggactagctatatcatatatggcatagagagtttaattgaattccttcaattttagaaaacagaactcaaccctgagaagtttcatcaatttgtatagcaatatcttccgacaattttcaaactcaattaaagaaaattctaaaacttaagattgttgtagtaccttcagatcgttatagctgtgcggacgagggtagggagtttgaacaccaccccttggtcctaattcatgggaaaagctctttatacccattgactttgaacagggagggttagtttcagatatcttaatcatcttctcttcgtctttaccagagttcttgcctcttaacttgatctcctgccaccaaaaaaaaaaacggttaattcaaagccaatcccgtcctttcatggaaaatccgaagcaaaactacattttacctcactactcgttgtactcgagcaagcatattttggagggtgacaagaatacttgggtttataggaagcaagccaccttgacaattttgttcccttacgctctagtagatatacgaaacagagaattaacaacactcaccagcaacaaaacttatcaactacaatatatgaatctataagcacatctctcattttcttctttctgtagcagagataacaatttttttttttactatgatcatgtggaaatttttgatatcctaattgatcatacaaaccataaatctagcacaacgaattctaacttagtactgagaaaaaaaaaaaccataaatcagatgaacaaagggaaaaacaaaagttcataatcttaaaatcaaaaccttgtttcgaagagccagtggttctaccatgaccacgaggaacaatagtcttctgattccgattaaacggaggtttaagaacggtatcggaggaatcttcaggtctaggacctgacgaagctaaccgagttttgatccggttcaaaccagaaggaatcgcaacagtagaagaaacacctcgatccttacgattctcttccgccatagcaaaatcaatgagaaattccgaaaagaaaaccctaatacctccaagctctggcgtctccggtatgaagagccgctttcatcgccggaagaagcgacgaggaaggtgaaactaggaacggcgatgagagaatcggaatccagagtgaggtcggcgatgaggaagaagacgatgacgatgatgatgatgagacgaagaagaagaaggattcatggttttggtgagagcttaagtgctcaatggggttggttggtttttaggcttcaacgactcgcggccgtgacatctttcaatttttattaattgttttatttgatctgttaccgtttcaaaacccaaaacaaattatttttttaatgagcacacaacacatgggaaagatattctgattcatgaattacaataataataaatctctgtttgaaaaaaatctttgatattttactttttcgattagttttttctatctaaatattggttgtatatgtatatgtttattgataactatgtaattctaattcctgattcaagttaataaagtaagatgttagaaacccgaaacaaaagtatatttgtaccaatttaatttttatgagaaagcaacacatgggaaaaagatatactgattttgtttgtacatctatatcaaataggcctgttacggatccggatatccggtattttggaggtatccggatccgtatccgtaacaggcggatccgtcatttcagtctccggatccgtatccgccaacccctgatattcgggatcctgaagtccgtgaaaaagtacgagtatccgcggatatccggatctgatccggttttttttatcatcttctctcctcccgaacacaagcaaccgaacttcaccaccaagattcttcccagaaaaaacagctccaaatctgcaacgaaagagtgaatccaacgccaaggagaagaggaagagatagaggcagcggttgtttcggtggaggttgaggatgaggatgatttggtggaggaggatgacgatttggtgccatggtggtagagatggtcgtttggtggaggctggtgtctagaggaatgagtgaggaagatgaaaggattagattttttggaaaatgggccaagatatgagctggaaaatatcataattttaatttttaatatggcccaataaaacccataaacataaaacattgaatattaccggatccggatatccggtcatattttttattattatccggatccggatccgtatccggcggatatgaaatattactatccatatcctgaaccgtttcacacggatatccggttttttggatcggatcccggttccagatacggatacccgcggatcccggatatttgtcccagggctaatatcaaatgtttatgaataataaatcttatttttgaaaaataaaaaagagggtaataaatctgtctattaaatgctcctcaactaaatacataaaataaaaatggcctgtcctcagtaaagggtgtgaacaaaagtgtctaactattattaaatttatttaaggtcaccaataatgcgtctccatattgctttgatcatattgtatcctatttagatctggtatcatcagttgctcaggtttagttgtctctttcgtttggacttaagcttctcttcctcgattatattattttgttagtttggagttgagctctttggttatgtctagtatctatctcatttagtattaactattaagcgatgtttggcttaattacttattcgttgtggcgttgaaaggtttaagtgggtctcgattatcttacggtttattcaggagacccttgacaaagacacactcatagagaagatgcatcttgtgcggataagaccaaaatccactctcatgtttccgtcattttgtgttgaagcctgttttcatatattattatgcgggaagttcttatagtgtgtttcgagagtcttgagacaagttgggtttgatttttacaatgtatcaaaatcttctttcctacttgtaggttatgaaagatcattgtgtttttctgtaatttaactttcgtcttgttttttgtgatttgtaatctttccaaaattctgattatcagtatttttttggagaaaaaaaaaaatctttcaccaataaaaatggtaaaataaatatctttttgctactaaaaataatcaattatctgcaactttaaacattcatagggttgtagacattgaacatttatagggttgaggatccgtaaccgtaacataacccgcgtactattgtttattggttaacattgagattcaatcaacgatattgtgcacgatctgttctacacgccccactaaaaatttcctttgaaaagatatttggatatgcatctaaaagatatgtaatatgaaaattacaattttttatatcttcaagatcttgatcgatgtacacaattttttaaaaggaataccaacaatattcttctattattattattagatcattataatataataatgaatagaaagattttgcatctctggatagtggatacttctttaaagttttctgtgatcaaagatctggtcgaagaagcactcattgtaactcgatcgagttgtctttttgttctaaaaaaaaaaccttcatcatctacatagagaaaagattaaagtaaacatagtattataagatatgatttaaaatgttgaaagaaaaaagtctatttaccagtatacttgtcaattcctataagattttgtgattagtgtagctaggtcttggcctacgatgatttcgataataataaaatatataaatagaagaagtatcaaatgcatgagttctttttatttcaatataggaaatgattaagaaagaattgcaatggcgaagaattaaacaatgattactgtgttttatcgaaaaagaaaaagaaaaacaagcaaaccaaatgtttgtgatgaactaatcctaccgaccacaattcatataaatgtatataaactaatcctaccgaccaaaatttctatcatataatattagaccaaatagatgtttgtgaatcgtgatatggtaggcattatattgcacgaacaacgtgagtaaactcttagattctcccgtttgtcctaaacatagaaaacgccaaaaacacacttaattaaactacttaaacatagtacatttgtatatacacacttgttatgtatcttaaaattctatcctcaagcaaacaattatatcatcatctcaaacaataaacgtaatattgtataagcgattaagcgaaactactcgtagcatggataatcacttaggctaacaatggattatcaaagtatatacaacgagtttttgtgatgattaaccgttgaaaatttgcttgattcatcttttcattgtctttccaaaaagatctgattccttattaatatatgttatcagaagtcagaagaggtcatctactttttttgtttattttttgactccacatagacacgtaaatatatttaatcgtgaaaccgtccaatggctcccctgaaacccaagaaaggtgttttaaaagatctaatatataatttagtattaagaaatgacaattgtatgatgacaagatattacaaaattaaaactagagaattttcagtctatgacaaaaatcacaaaactttgtataacaaattacaaaaatagttgtgtcataatatataattgtctaaatactttttggaaaagtttaggtgattttacctctaatttaactgttatgagatatgtaattttttcgtgtagcatatatattttattttatatagaaatctaatcttacaaaatagagggtagaattgaaataaaatatctaaattgtatttttttcaatatatttacattgtcccaattttcattttaaggggttattacggattttgtaatttttggtagtggcatttatggatttttcatatttgttaaaatcttaaggatttgtcattttttaacatttaaaaatgttcatatttatgttgtttttttgcttgcttaatacttgggttcaccccctagtataatccatccatacactcccttttaatgaccaattagaatttgacatgtcatctatttaaagaataaataaattaaaatcaataaaacaaaacaaattcggtagaatttcaattaaggaaattatttgtttgagtttataaaatagtggttagagtttatattttgtgattaaacgaaattatattttggtttgacttgataaaatagtggttagggtttagattttgtgattaaacgaaattatatttcggtttgggttaataaaatagcggttagggtttagattttatgattaaaacgaaattatattttggtttgggttgataaaatagcggttagggtttagattttgtgattaaaacgaaattatatttcggttggggttgataaaatagcggttagggtttagattttgtgattaaaacgaaattatattttggtttgggttgataaaatagcggttagggtttagattttttgattaaaacgaaattatatttcagtttgggttaataaaatagcggttagggtttagattttgtgattaaaacaaaattatatttcggtttgggttgataaaatagcggttagggtttagattttgtgattaaaatgaaataatatttcggtttgggttgataaaatagcggttagagtttagattttgtgattaaaacgaaataatatttcggtttgggttgataaaatagcggttagggtttaggttttgtgattaaaacgaaattatatttcggtttgggttgataaaatagcggttagggtttagattttgtgattaaaacgaaataatatttcggtttgggttgataaaatagcggttagggtttagattttgtgattaaacgaaattatattttggtttgagttgataaaatagtggttaagatttaatttatttattctttaaatagatgacatgtcaaattctaattagttaattaaaagggggtgaatgaatggatcgaccccctaagggatgaacccatgaattgttcaaaatacatactttatacagaatatttaaccctagaaatattcaatatatgactaagaattcaattggtagaaaagcttggaaagaaacttataggctatctatgatatggctaagaattcaatattttttgtgcaataatcaatttatacttagtttctagaagtaaaccaaatatgcatacacgtttggttctgcagtgatgcagattggtagatgaatgtgatatggttgcacatgttgtgagcccgtcggtgtcgccgctcttttcgcttaccctatatgtagcagtagtagattggtgcttgaagtaccaacctgatgtgccccgcctaattgccataatgtctctcccaagtttttttttatttacctaagagttgtatatacttagatgtcaagttcatagttgttttgaagctagaaagctgagagtgtttgttggagttaaccaacaaacaaatacctcatggaattaattcataatgtagagactagagagtatgttgaatgttgggtaatactcgtgaagctaattttgctgcttgtgtactcactttgcttttgattctactattattctctcactaaaccaagttcataaatggattggggaaaataattccatcctaaatgcaaattcttcatgtatttgtgagtattagctcgaaatgttgaataaaaacaccttcgttgacaaactctacatttttgggtattcttttactactaattggactcactaatactagaatagcaatttttgtggtcattatagtcttcacaatgataaacaaggaaacgactagaaatgttctagattcctctgtcaagacttttgaatccacatcaaacaaccgaaagaattgagactttttgggagctaaagttccaggttccatgtagtttctgcggtcagttttggcggcttcaattcctcagctagattcattgatgcacatacctgttgaaacagtaagagaaactcattaaccacgactgcaaaaagaaccaattttagctaagtgcttatgaaacaatgtttaaaagatcgattgcagcattcaagagaagttctagttccccattcacacattaacatgttcaacccaaactaacctataagaaaacctggtcgatggtacaacaaattattcaacccaaccaccagaaccaagtaagaggaacttaatccctaaccagaggattgtaattcaagtctcttgttaacactctctcaagatcaccatgcatcttttatgcattaataaagatcacacccatgccattaggagatttgcatcattcataccaagtttatatcaccgcttaagcttcagtctttcttaaattcttagtaagcaacaatagataaacaacatggctgggttaagaatttttaacctacttgatagaactaaatgtcattacaagaagagcaatatagtctcatacctacatgcacatatatgcttgttttaaagaacaaattttgagaagagacaggaccgtaagaagaaatgctaagataacagtatataagagtatctagtgtcaactgttgggatagtgatatatgtaaaattcaatctactcctgccaaaagaagtagtgctatgaacaaaaacagagaagtgaaaatagtatttaccttgaaagatccagttgatttagagttgttcgaccattccaaaccaagcatcttactagaagtctgataagttgccttgagattatcaccaccataaagtttatgagaaatcgcaaagtcccacatattcttagccacgtcataacaaggctcaaatgtagctatccctccatgaacataagtatacttcagcttacaattctttgtacccaccatgtaattagcagacaacttgtttgctggatcaatcacaaaactcccgtcaacaatcgtccggttatctcctctcatatgaatgtaagtcagattcaaaggcttctctgcaattctgatagtgttcataaactgaaacctaacatcctgcagcataaaaaccgaaactttttacttcaatttcattcatttgcaaagaatccattcaaatagaaccttgtgtaacatcctgcagcagaaaaaccgaaaatttctacttaaatttcactcatttttcatagaatccatacaaaaatagaaccttgtgtaaactaacattctgtagcataaaaatcgaaactttatacttcaatttacactcctaacctagtttaatctccaaaaactcttaactttctcagagactccatacaatttcatccatttctcattccttataggtttgaagctaaaagggttaacttcaaaaacttgaaactaagaaaaaaggagtaacctttttagggacgttgtagtcgatgatgaagaagccaggcttctcaacggcgagagagagaccattaaagctaggaccggcgacgaaggaagcatcagtcatggtggctcgtagcttagcattgccggcgttgaaggtaagcgaagcaacgctaccgctcttgtcgacatcgaactttcccttgaaagaagccttcatcatggaatcaatcggagaatccaatcggaattttcaggataaaacccattgaagttttcaaatttgggcttttcgtgggcttcttaaaaatgtataaaacgccgttccgtgggcttcttaagaatgtatataaggcgggtttgaattgtctaacgtcctttcacaattaacttctttggattcggtttcatcaactttaaaatttaagaaaagaaagccgcgtgcgtttggttgggacgtgagacaatagacaaagacaacttctcacttctcagtttttaattttgccaacttgctttttgtcttatttcttcccattttaccaattcacattttattacaaaaaaaatagaactatatatatacacatctattactatattttccaatattgtgattctttacctctttattagctaaatatgtattcaaatttgtcttttggtaactgcactttttttatttgactttttcttagaaaagtttccatcttttctaatatttttgaaaaatatactgtcttgataaatgtgaatttgaacctaacctatatatatgtaataataataataatcttctctccggattctattctcatttggtttgtgtgctttgctttcgctttcctcaattctcttcttcttcattatttttgccttttacctcttttctctgcaatcggtttcttctctcattgtctttgacgaaagaatctacccataagagcgtttctttgctttctcaaccataactttctcagatcgattggtttcttcaagcgattggtgggttattattagctttctgtgttttgttcatcgtaatattcaatacaatctctcgtgactaaaaattgagtttttgaaatagattttagcatgggttgtgatatttgaatggatatctctgtttttaggaacgaacttgtttggtgtttctttggcaaaaggttattgctttatggtttcactatggtgtttgtattggtggtttgttgatacgaatatgttattgttcctcatgttgcagtgttagtttttgacttgagagtttgctaaaggtttgatctttatcttatttactgatgctattcttgttgtagctatgtggattgttataggttgcttgattttgatgttcatgtgtcaaattgataatgtagcttttgtagctgattaattaagtataaagattgtaatgcagttgagtttttggtcttaagattaggcattgtatattatacttttgcttgcatatcttgaattgctgtattgtatttttctttggctgaaagataactccttatgtatttcaatgtgaaggtaactcttttctttttttttattttagtttccaggatttgctagattgtgaaaagtggtgagagtctcttgatttgtcaagtgtcaactgtggttaacgataggatgcagggagagagggctagtcttggttctttatcaaaggctttgaactttgagcgcggttctacgtctagtaacgctgtggtagatcagcaaattcgttgggagaatcttcacaattatggtgataatgatttgcaggattacatgagttcagctgctgatacaaatcctacttttgcaaactcagtttatcatgagaaacggggcttgcagaggtttaacattggtgaggctagctctagtgggacgaagaacgaaggggcaagtctcactgaacaatggaagggaattggaaggtttgaggaacagaggaatgataagcttgagttgagccctttgtttgtgcaaccatctaatggaagccgcgtggttcgtgatgtcaatctaaatgcagaatacaatgagcatcttgaggatatgaatccggttacagttcatcctggtcattttgaggttaatggacttaggtctgagtttttactagataacagtgttagagctggttcctctgttgatggacgtcgtgcatcctgtaaaagaaaagctcttgatgcaagcggtggtcagtcctcttcaactggaggtttccgtgagttccagcgtggagtatccagttcttggatctcaggtcctacgtattacagcccagcaatgacagcaaatgatttaaacatatctcttgatcatggtcgaaggggtttggtatctagcgctgttccaaatctatctcctcctaccatcacagagagctctagtagaaattaccctgtctgggttaatcccacatatcaacaagaaaccgtaagcaattttgctccatccttgaactcaccagggcttatacctgcagatcaccagcagatcagcatgagatatggacatgcgttaggcaattttgcatctcagaacccaaatgctcctgctactcatatgccccctgtttcaagaaatacatttcaatggaacacaagccccgtggcagcggttatatcatctagttctgctactcctgttgacagaaatgttattcatcgaaatgcaaccagacaaagaagtaatactctagagattcccttgtttgtcccagctcctgaactgagaaatgtggcccatggtcatattagcagaaatgcaagtggtgctagacatgttgcatcgtcttcatccaggacaagtgttcagccatcaccgtctagtccagcattgactccttaccagaataactcactacataatcaaagaagattatctgaaaactttcgtaggtcattgctttcttcccttgttacacagcagagggctgctcgttcattggcccatcctgcctctccaaatgagcacgtgcttcaatctggtggtgataacacctctcaggtgcataatcgagcttcctcgagagcaggtccaagacaagggcaagatgcaactggcatttctcattctttgcgaggcttggcatccacaagtcgaggaagaaccagaatgggggcatccgaggttagtttcttatcaagattagtgttaccttgtgtttcttatagatagtggtgttagatttatgttcatatcgactgtaaaccctatagttttcttgagcaactgcgtaatatagagctgagactgtgcttctcttctgaaacagatccgtaacatcttggagcacatgcgtagagcagggaacttgcgtttggaggtactgttttcgatttacgtataatacaaaaagattttacctgaatgatcgtttaatctttttttgtgatgcttttttcaggatgttatgcttctcaatcagtccataatgctaggtgcggctgatattcatgaccgatatagagacatgcgacttgatgttgacaacatgacatatgaggtaaagccagagcaaacccataatcatttatttgctcatcatactaactatgagtataaaatctgcaggagctgttgtctctagaagaacggattggagatgtttgtaccggtttgaacgaggaaaccatatcaaaccgattgaagcagcagaagtacaaaagtagtactagatcttcacaagaagtagaaccatgctgtgtttgtcaggtaaacaatatcagatttgcataaaattttgtatcgcaatcctgttaatgacttgcacttttgattcttcctattaataaccatgactgattgctaaaattgatgcaaaaactgtaggaggaatataaggaagaagaagaaataggaaggctggaatgtggacacgactttcatagtcaatgcatcaaagaatggctgaagcagaagaatctttgcccgatttgcaaaacaacaggattaaacactgcaaataagccacaaagataatgatcgaaagactgttgggttctaaccatttgtcgaatcttcaataccattgaagcctcatcagaacactgcaggcaagttggtgtctgcttttggggttgactgaagataggaatgaagggaaagtaactgagggggatagagagaacaggagaacctaagaaaaaactttggttcttctgaatttatttctataagttaattttaccaattagttttattattattattattattattattattattattattattattattattattattattattattatttattactagttaaaattttctcatacaccgctaaactaatcgtataaattgtttaatgctcactctatttcaacatataggaatttgttgaactacaatcagataaataaaaactgcagatttttaatggttataaaataagacatcaatctattatttatatagaaatttgaaaatatcatgtaatatgaaataaaaaaatatatattcaaaacatcttatcttattatataaaatatggttttcaaagttactaattcataggatcgtgtcacgtgtcaagtcaaacgatcaaatgtttcttattatataaagtatggttttcaaagttactattcataggaccgtgccacgtgtcaagtcaaacgatcaaatgtttacatatgtcactaaaaatttaaattttttattctcttaaaaaaatagaaaatctaaaaaagtaaacaaatttacatatactaatttatatgtctcgatatatatataaattttacttttattcaacaaaaggaaaattaacaaatttgtttttacatgtgttattggtcatttaaatgtagcacatattaatttttttaaaaataatttagtatggataataatactaattaaaaagaccattgaaatttaaaatagtaatataatttatttaacattagtttagttggataaaattatatttgtcaatgtaatataatgttttcattcgttaaatcaaaactcaaaatattaatgaacttataagaataaatttttgaatacttatgttttaacctaagaattttaacgcatcatacgatggagcgtcttgcatcctttgatgtgttattatacctatgttttattctaaaaattttaactcatgtaatcataagtgaaaataggatattttgagaaaaattggttataggatttaacttttcaattacttttaatgagaatattttcatttattaattttaactcatgttttagatatagacataatttttttatttttcgccagataagataagatataaatttattcaaatatttagtaatgatatttaaattttgaatagcaaatatgtcaaataataattcatatatttttaaaatatttaattttgtatcatacacatttaattttaccatacattttaaatatttatttatttatagtaaagtactttgttagtctatacattatctctttttttgtaatgtgtagggtcaaaagcttcctacgatgttttcataacataaaaattacactcgaacatagatcccgtggaaacaacgtctcatatgtatcctctaacaacgtcagacttacaacactcagacaaacatcaaataaattcagaccaagcgataacgaaaacgcatagtttgttaattcatctgctaggcgattaggtttcatacacacatgagtaaactgcactatctagttcatatacactccatcttattgatgatatttcaattttaaatagtaactcatatacttttcagtatttaatttattatttccttaaaccaaatttcaatcttacaatttcgaatttgcaatacaatttaaatatctattttatgataataaaaataaaatttaatttgattgtataaaattcaaatacaattcgattttgcaatagaaaacaatttaattctatacactccatctactattaattttccattatagttataaattagtatatgtaaatttgtttattttttttaggttttttctcttctaagagaaaaaaaaaaagttaaaatcttttccgatacatgtcaaaatataagatcgatagatttgccatgtgttacgatcgtatgagttattaactttgaaaatcatactttatataatacaaaacatgtaaatacatgtttatacatatatttacaactaaaaacatgtgtaaaatctaatggatttttaaatacatgcttttagctcgaaaaaaatttgatacggagaaaaaaatttgacgggaaataacatacgtaaatatctgatcaaattatctatagtacgattttgacgggaaaaaaaattattttaaaggaagagcttaactttgaatctcactaaaccagatcatacataatcaatcctttcttttatctttttttttcttttcattacgtgtaatcgtgttgtgtctaatatatcagtttgatttgtaataatttgaataaaaaagggagtgttgttatctttaagtttgcccaaaatctatagtcatgttcgatgtaaacgtatcttaaacaaaattattaaatgttaaagatagtaacatacaattattaatgaataaatgtttaactaattaaatatcatttagtgattgtcctataaaatctcttgttttcttgtttcatatcatcaatcttacattcaaaacttaaagtattcttacatccaaaaacaaaaacaaatatggcaaaatctcttctcatggtaatgctcgtgtctatagtaatgttttacatggctcgtccaatttgctcccaaaaaattaatccacattcacaggagatgccagaagatgtggccatatctccatcttcagattttgattacgtcgaagctcccgatgaagctccattcgaagaagctgattcacccgcaatggaatatgatagggagcttgctcaccattactcggacaaacagctcaagtttcttgaggcttgctctgaaaagccgagttcaaaatgcggaaatgaggttttcaagaacatgttaaatgagacaatgccaattacggaggaatgttgtcgtgatatattgaagatgggcaaagattgccatctaggattggttaaactcatatttgccacatatgagtataaaaatattgcatctaagggcattccaaagagcaaacaagcatggaatgaatgtattcgtagagtaggtagcaagattggtgctccagtctcttttgaacaataaactaatatttttatgtgttgatgtgtctatgggtttttgtaaattgactattatcattataaaacaactgctaccattttatttttgataatcaagaagccaaagcctttcaagattttacgtttctattcatcatttgaattaatctatccagcaaaaactaaaaacgcatatgtaaactaaaaacttttcaaatataacatgatttcgccaggatggtaaaattttctaaattcaacatttattttcgatctactcggatatgaaatttaaattatatatatagactttcaaagttgaatttcaaaatataatttaattctcaatcaaaggtaaatagtgaaaatataaattactatgtcttaattatattttaacgcatgtaatcataagtaaaacacacaaagtgtttggaaaatcaagtttataggattgacttttcaattacttaataagaagttagtatacttgtatttattaatttaaactcatttaaaattagtttgcataaggtaaactaactaacgagattaagcatctataaaaaaagtattttatttttaatacagtatagtttgatttttttttttaaaggataacttgcagatttgctaaaagggaatacctaagagctcacaattggatctcttttcaagaaattttatcttgcatagatttctgttggatcgaacattcattttattttgtttggacatctaacttgacttgatttttctcattgaaggttttagatcatgaaacgaatcaaacatgcatgacttcttatttaatttacaactctctattgataaatgaccgctcatctttagtggtatccagcttaaacacctttttcttctttctaacctcatgcactcttttttctactaacttatatgtagttacgtgcaaaaacgttgaagaaaaaagagcgagacggtttttcgaccatattagatgagagttttggaaaaacaattggtggagtaggaagatccaattttagaactaaaaattctatgggattcacaaaataatgcacattgcgtgctcatgaggaaaaaagtaccgtttcatgtttcttagaaaaaaccgtgaaatctgaaactgaaaggaaagaaaatggttactattcataagagtctcatatataggaaactcccgacaagaaccatggatcacttaacagagaggatgagtcatttacagaagacacccacacaaaaaaaaataagtccaaggagttatgaaaaagaagaaaatgcgttaaaagatgtactggtgttggattcatccgaaaattgccaagtagaccaaaagtcaacagaacaacggtcaactcagtgtgctcccagactgaaactcatggctgaagccaagagaacccgaagagttcatacaagcggagcaaagaggagatgatttcaggatgggcaatgggacgagcgttcggaggcccatgaatggtctataagaattcaaatataaacgttaagaccgacatatttaagagcaattattacatcagttagctaattaatgcaaatcattgtatataaacatgagaccctaattagttagctaattaatgcaaatcattgtatataaacatgagacccccccccacccccccaccccccacacccacccccccaagaaataagggggtacatcaattttttgctacaaagctactatactattttctctcagcattttaaacacattttcatatttagtatacaaatccattcttgtacccacactttttgatcttgagagcttaaacccataaataaacaaaatacttgagtgtgtgaatctggtatccatattttggtaccgtctatagggacgctaagttctcacgcttttcagaaatctcaaactccaaacagattaccatggccgagggaaattgtaccaatcaaaccgttactgaccctatcaggcgtaactcaaaagtttacgaacgtggaaaaatccgtaactgaccttcaaacttctcaagtaacacttaattgaaattttgataaaattaattcttgtgtggagccaatcatcgagggatccgtcgtacaattttatatccgatcctcatcatccatttcactcgtttgatccgacatcgcaaccgtctagccatctgtcaccatgacattgatcttaatcgttgataattcgacatcaaacaagatcaaatctgtcttaggtatgtatttttgtttgtttgataaaactatttatggttttaagtttttatctcaaggaagatgtaaatagagatctatgtcatcaaattcgacttaactaaaccaatttaagctgatgtcaagcgataaagagagatcacacggttagtcaccatttaccacccactatccacagtccaccattccacccgatacaaggtgacattgttcttaacctaacgctactctttattttgtttacttgagacatttttgtccaatttttacatcaatacgttttgtcaatccaaaagtttttattgagtcaaaactagatttaatttttaaaagtttacagatgttatgctaattaaaagttatattataattataaagttataaaaccgtatcaaattattatataaagtatggttttcaaagttactaattcataggatcgtgccaggtgtcaagtcaaacgatcaaatgtttacatgtgccattaaaaatttaacttttttattctcttaaaaaaatagtaaatctgaaaaagtaaacaaatttacatatactaatttatacgtctctatatatataaattttacttttattcaacaaaaggaaaattaacaaatttgtttttacatgtgttattgatcatttaaatgtagcacttattaattttttttaaaataatttagtatggataataatactaattaaaaagaccattgaagtttaaaatagtaatataatttatttaacattagtttagttggataaaattatatttgtcaatgtaatataatgttttcattcgttaaatcaaaactcaaaatattaatgaacttataagaataaatttttgaatacttatgttttaacctaagaattttaacgcatcatacgatggagcgtcttgcatcctttgttgtgttactatacctatgttttattctaaattttttaactcatgtaatcataaatgaaaataggatattttgagaaaaattgcttacaggatttgacttttcaattacttttaatgagaatattttcatttaaaattaatttccatgatgtaaaattaacttacgagattacggcatataaaaaaaaatattttcaacaatgtttggtttctaaatatttttgtagatttctgttttttttagttcattataaatttatatcttagatggtaaaattatataaagtatttgtaaagtattagagttgtatagtattattataatttacaaatatttttttttgccccatttttattatataaagtatggttttcaaagttactaactcacgtgatcgtgacacgtgtcaagtctatcgttcatatgttgacatgtgtcaaaaactatttacttttttcttaaataaataggaaaactaaaaataaaagaaacatagatatctaaaatatttaactttattaactaaaaaggaaaactaaaaataagatggaatttataaaataaaactatatttgtattacaaaattgacttgtatttcaattttaatataatcgaattaaagtgtattgtattatgataaagtagatatttaagattgaaatttggtttaagaaaatattaaattaaatatttaaaaagtatctgagttaatatataaaatccaaatatcaactataagatggagcgtataaaattaaaatgtattttcttatcctgaaatctatactattaattgggaatcattaaaaataaacaaccttatttagggtaaaatattacacagaatgccattgattgttagtgtttttaaatatattcattaacgatacaatagtaatcacaaaattaatagatttaaatataaaaaatggtaatattcttttaagcaattattagtttcccaaaattaaactcactttctctttcctattaattatggacgaaaaattaaaatttatttcttaaaagttgttaaccaataaaaattgaaaaactaagattttatatcaaattatactatattattaaactaacattttggaagttaatttttattttaaaattttctaaaatcataacacttgcttaataccatgaataaaaaatcataatttgtgatagataaataaattcaattctagaatcttgggtttagtattttgaaatagaaaacgaaaatttatttcaaaatttctaaaaactagattagatgttacaatgatttctatgaattaaacaaaaataattaatttaaagtaattatcattatgtgttacatttagaaatatctaaacaataaattgtacatactaatttcgaaatatttggggttttattttttctttttttcaaccggatctttttttaaataaatccataatatattattgaacaaacttttaaaataatgtaaactaattatacatttttcattcaaaacaaattatccaaataaattgcttttataggtgtatttcaaaattttaattatattccaaaaatccaattaattatgattaaataagagaaagaagaatatttaaaatgtagcaaatgaaataaacattattacatttgttaaaatatatttttttacaaaattatttgttataatgctattcatatttttgaatttgaagaaggaaaaaaaatcaagaaaagatatttgtgtgttttaatttatgatatatttgtaaactttaacatcctatatgttaatccgcaaaactcagtcatatatacattggtatttaaaggtaagcaaataagaaatgaaaataggaattatgagacacaaacggcatgaaaagaaagagaagtactatataaaataatttgaaaccaaactggacatcaaattaaatatctaactagtatgagtttgggttatgaacactatataaaataattttgtttacacacataaccaatgtatatatgacacacaaataattttgtttacacacataactggtatgagtttgggttatgagcatgtacgtattttgtgacacaaattctatttgtgatggttacgggttggtagtatttttatttcacatatagagacaggttatgggacaaagaatttatgatagatacatcacatgttttccattccaagaaatataagtcaaatatacgtttttattttctaaactaatcaaaacattttaacagtttgattactggtgtaaaataggatataaatttggttttagtttgggttatttctccgtgtgagtccgaattttaaaatataactatacacgaacataattgaacttcgattattactcttaactttataatatatatatatatatactattacaaagtttacttataacaatatattatatatttttaaaatctattaaaaattgatattttgtacgtatatgggagttcagatatctaatatattgtattataatttatatcacaaaataaaaaaaatctacattgaattaaaaatatgaaattccgcacgtacgtgcgggtcaggatctagtatatatatattttttgcagcgtataaaattaaaatgtattttcttatcctgaaatatatagttaaaatgtatagtaaaattgaatgtgtatgattaatattttgtttaatacaaaaattaccaaaatgaatgtgtgtgaatcactatttactattcaaattttaaatattatcgatcaaaatttgaatttatatcttacacccgcctatttagacgggcatgatctagtatctatataaataataactaatctttttaacaccctcatgttttaactcatgtaatcataagtgaaaataggttattttgagaaaaattgcttataggatttaacttttcagttacttttaatgagaatattttcatttattaattttaactcatttaaaattaatttccatgatgtaaaattaacttacgagattacggcatataaaaaaaaaatcaacaatgtttggtttctaaatatttttgtagatttctgttttttttagttaattatgttttgttaattgttaattatttttattactaactaggatatagatttgatatgtcagaaatattattttgatatgaaaatgttatcatttaaaatgaagtgtgtagaatttagatcaagtttattatgatgacatagatagttaaactgtattacaaaattgaatgtgtaagataataatttgtttttttttccttttttagatactaaattaaatatagaataagggtcggttactatttagaattc

SEQ ID NO: 23 - DNA, 77424 bp, Arabidopsis thaliana
aagctttttcctactcacttgttggggaagctgcttcttggttgaagcaattgaaggctggttcactcactacttggagaagcatcaagatagccttcctgaacaacttctatgatgatgctaagtctgaggagctgcgaaagaagctgtctaccttcactcaaggtctgacagaagcttccaaagcagtctgggttcgtttcaagaaatatcaacgggactacctgcatcatggcttcggtgaggtacaacttctcggtaccttgttcagaggatttgattggagatatcagatggcttgatttagcgagcattggtaacttcaataccaggtatccagcagatgctactgatcatctatttcctgagaataccctaaatctgacgttttattatcttgtcttataacctccaatctgcttattttactttcttttatttactcattatctatctagcttaattttgatattttagcctattgtgtgaacaaaagagctttgtggaagtcgaccctaaagtactatcgacgatctcttatttgagagagtggtcttaaggcatttgaaacatatcatcaagcgaaaggaaaacgaaccaacaatgccttagaaaggggaatttcaagctctaattttcgcaatgcagaactgttggagcaaaggaattattagagtgtgttttgaaggggacaacaaggaagtaacaaaattactcactggacaaaaacttaactttggaatcttcaattggataagggaagcaagaagatggaggtttcgattcacagattgcaaattttcttgttgcaaaagggataataacaagccaacagatcatctagcaaaacactacttaccaattaacacttcttttgttttttcataatttgatacctcatgtaatatcttctatgctacacagcgattttgctatataaagtatagttttcaaaggtactaattcataggatcgtgtcacgtgtcaattcaaacgatcagatgtttacatgtgtcattaaagatttaacttttttattctcttaaaaaaatagaaaatttaaaaaagtaaacaaatttacatatactaatttatatgtctaaatatatagaaacaatttacttttattcaacaaaaagaaaattaacaaattagtttttacatgtgaattggtcatttaagtgtaccacatattaaattttttaaaaagaataaattttcgaatacgtatgttttattctaagaattttaaggcatcatacatcgtatgatggagcgtcttgcatcctttgatgtgttactatacctatgttttattctaagaattttaactcatgtaatcataagtgaaaatagaatattttgagatattatataaagtatagttttcaaaggtactaattcataggatcgtgccacgtgtcaattcaaacgatcagatgtttacatgtgtcattaaagatttaacttttttattctcttaaaaaaatagaaaatttttaaaagtaaacaaatttacatatactaatttatatgtctaaatatatagaaacaatttacttttattcaacaaaaggaaaattaacaaattagtttttacatgtgaattggtcatttaagtgtaccacatattaaatttttaaaaaagaataaatttttgaatacgtatgttttattctaagaattttaaggcatcgtacatcgtatgatggagcgtcttgcatcctttgatgtgttactatacctatgttttattctaagaattttaactcatgtaatcataagtgaaaatagaatattttgagaaaaatagcttataggatttaactttttagttactttattgagactatttttatttattataacttttcaattactttcatatatctaggatatagatttttatttgttataacttttcaattactttcatatatctaggatatagatttgatatgtcataaatattattttgatatgaaacttaaaatgaagtgtgtagaatttaaatcgagtttattatgatgacatagatagttaaattgtgttacaaaattgaatgtttaagatataaatttgtttttcttttctttttagatattaaattaaatatagaataagggtcagttactatttaaaattcaaatatcattgataagattgagtgggtataattaaaataaaatgcataaaatagaaattttgtttaaaacaataattattaaattaaatatcaagaaaaatatattgattactatacaaattcaaatactatcgataaaaatttatttttgtatcttatacccgcctaaataggtgggccttatctagtagtataatacaatgatctattcagtagaaaaaaaagagacaaacccctctatttatacaagattatgacggtttatcatgaaaagttaaacttcctattctttagggcttggatcttcttatttcctgcatctccgagattctcctttgtctaaaaggaaaactttttttttctctgatttaggaagtcggccaggcgacctctttacaccaggttgatcggacgatctcttctttttggcctattaacaagctaaaccagagtaccccggtttgactgaattctcagtttaattcttaattcttctggtttaagccgatattgtcggatgtgctaattcttgcatcaacaattagtcttcccccattttcggaaatttccgaattaaggaagtgaatattggcttatacattaggaagatgcgaattaattataatataattgcgtgtcgttccacattctcggacgcatcaggctgcttttgaaacctgatatcgctggagatttcactgtcctcgtcagattctttgaccgaactagagtaccataatgatcaagaaggacaaggtcagcgtaagagatctttaatgttccaatggatttggaaagaggattgtctctattggcaacccatacataagttctctcagagattgacttgtagcaaatcccatgataccaacgatcaccatttagagagcttgctgtagttttgaagaaacctagctcgaagacgttaccgtgagacacaatggttcggttgcttgagattgttagagtttttgtagatgacaaagtattgatcgagaacacataaaaaatagagctaataagacaacgaagaagaaaaagaatgtgtacgaatggtaatagtttggtgttacgcctctcatcttcataatttggagaagttgtagacagattatagatgatggactctgtgtgtgtcgttctgtttttcaaacacctagactttattttttcaaaaaagaaacacagttcattaaaaacaaccattctctcggcccttgattttgtttctcataaaaaaaaccaattcgtttttaattgtattaaaatttaaaaggtagcctttttattttttattttttattttttataattaattattttaaaactaaccgagccgattcaaccaaatttatcctaatttaactaaattttaaccagaaaactaaaaagttcggttaatttcgataacaaaataaaagaagcaaaaaagtgtaataatttcgataattgtgttgtgtctactatattactttgatttgtaatcatttgaagaaaaaatggagtgttgttatctttaagtttgcccaaaatctatagtaatgtttgatccaagacaaagtttaaagttacaacttgtaaaaatagcatagtgtctaatgtaaacgtatcttaaacataattattaaatgttgaagttagtaacatacaaatattaatgaataaatgtttaatcaattaaataccctttagtgattgtcctataaaatctcttgtttcttgtttcatgtcatcaatcttacatctaaaactaaaagtattcttacatcaaaaaaaacaaagatgacaaagactcttctcatggttacgctcgtgtctatagtaatgttttacatggctcgtccaattttctcccaagaaattgatccatattcgctagaggtgctagaagatgtggccttatcttcatcttcaaagtttaatatttacgttgaagctcccgatgaagctctattcgaagaagctgattcacccgcaatagaatatgacaaggaccggtacaaaatacccgattttattgcggcttgcgctatgaagcaaagctggatatgcttaaatgtggttttcgaaaacatgaaagatgagatgatgccaattataaatgaatgttgtcgtgaaatattgaaaatgggcaaagattgccatttcagattggttgaaggctggtccgccatgtatgtgtatggtaatagtattgcatctaaagacattccatatagcaaacaatcatggaacgaatgtgtccgtagagtagggagcaagtttggtgctccggtctcttttgaacagtaaactaatatatttgtgtgttgatgtgtctatggatttttttaatttgattattaccattataaaacaacaactactattaaattggtaagcaagaagcctaaccgttacaatattttacgtttttattcatcatttgaattaatccatccagcataaactaaaaacgcatatgcaaactaaaaaatttcaaatataacatgatttcgcaggggtggtaaaatgttccgaattcaacattcattttcgatataatcggatagaaaatttaaattatatatatagactttcaaagttggttttcaaaatatttctaattttgtattattattcttaaatattgtttagtggatatggatatctataaagcacggatcatataaatttccgattttctaaaatatatcaagatatccagttttcatatctaataataaaggccttttttgacatatatatctggacctccgtcgacataatttctcatatccatgagctctcagtccaaatcacacaaccgacccaccatttcggatatccttattcgcaaacccggtagagttacaatccttagaacacctctccttacattcattcaacccaattgtcttatccacaattgttgtgcttgtctccggcagcctcatcatcttcatcagaataaaaaccccatctccgtggtagttgtcatgtcgcaataactgtcacgaccacatatttggtacaaatcgcatttcgcggtcggtaaaacgcaaaacaagttccattccgatgatgttgtatcccatctggatatctctaatatataatccttcgggagtcagtgttaatctcacgtagtgcgtgctatggtcggtaactttgaaattgtaagcaacttcctctctattgtctatgaagttgttaacaacgtcagagtagctcctgttttgcatcgtcggtatgccactaaacccaactccattccatggaccggattggtacaatagaaactctttcttgtaaagataaaactcatgtagccttgagttccgagtttgaacgagaagcctccgcttaagggagtctccaaaaactgaggaaagtctcgtatcctgttttgagatcccgaccaatcttcatctctgggagtaatgtgtccaccggataatcaaagctttgccacaagaatcggttttgatagttgattttggagtctcgaagcacgaagttgccgttatcgagcagctctgccaccactggagattttaccgttctcgtcagattctttgaccaaacaggagtacgagaatgatcttagcgtaagagatctttaatgttccaatggatttggaaagaggattgtctctgttggcaacccatccataagttctctcagagattgacttgtaccaaatcccaagataccaaccatatccatttcgagagcttgctgtggttttgaagaaacctagctagaagacgttaccgggagacacaatagttcggttgcttgagattgtcagagtttctgtacatgacaaagtattgatagggagaaacaattgattgtcgcccccaaaattttgggaattttttctttacaaaaaagcccccaattttttttttcccttttagaaattttttaggccccccaaattttagggctgacagtgagtattgttcgagaacacataaagaaacagagctaataagacatcgacgaagaagaagaaagtgtaagaacggtaatagtttggtgttacgcctctcatcttcacgattttctttctttttttggtaggcgtacgactctctttcttatgcttttctttgtttcttaaaacctatatttatagatttcttcacatgttttttttcttttgaatttaatattaaattatattcaagaaaaaataaacatgtttacatcaaagtgcatactgtttttaatttaaatcatgataggaagaactcatagattaaaactgttgtcatgattgaaaccaaaattgtatgcctcctgcgtactttgagtcccctccactctgaatggtgcttagcctgctgcgaatgtttttgtcgatcatttttacaagtctcataattgttgagtgatcttcactgtgtttcctgttatttcgctctctccaaatagagtgaatggcattctgaaaaatgtaccgaaggatgagacactttgttttgccaagatcatttccttgtatcaacttgaggatgtctctccagctagctgtgaagtcggtggtgagaatcccctttgctagttcccgccacacctgaaaagaaaagggacataagaagaacagatgttcccaagtctccataggatcttggcaaaagatgcaacttgaatcagcttgtctattccacttgagcatccgagctccggttgttactctgttttttgcgactaaccaagtgatgaaggagtattttggagtcaagtaggggaaccagattcctttgtaatcctccatcaatggcctagtgttacgtatctgcatccacgtttctttcgaattaaaaacgtttcggtgatggtcatttctccctttccatagcccgatatcagtctcatcattttgttgtgcaggtttctggcttttgatagcgttttcaaccgtatttaagaggtcctgcctatgtttctttcttcgattcatggacattacctcccccacagttgcagtaactcagattcccaagtcaatacatcctcttatcccaagtttttcatatagacagcctatattactccattcatcaaaccaaaatgaggtcgtttctccatttttgacctctactctatagaactgttgtgctatccctctatattccatatccaagaaccgcaagttgtagtgtcttttactgccgagaaggagccttttcttatgaaatatttctttacccattcaacccacaaagatcctttagccgacagtatacgccatatcaactttaatacacttactttgtttgcttcttcaatcgaccgcagccctagtccaccttcattctttggtgtgcagacctcagtccatgccacttttacctttcaagggttcatcgatggtcttgaccacagagaacttgaacacagtttatctatttcttgaaagcatgctttgggcagccggaaagcagctatccaaaaatttgtaagactgaagatcaacaaaaatttcttcacatgttgattttcaaatttggaaaactctatacaattgtttctagcagacaagataaatgtaaattttccacgttctatgacttttcagtacctcattgattcacttcaacagactactgtcatcattagtcgataacgtcaccatgtgaaattaatttgctcgtgcaacataacatatgttgttcaacaagtatatttattcatccatgatcctcgtcccaagaaagtcatgctatggcacttgtaaatgcatccaacgttacgttcgatgtattttaatctcctcgatcatggccgtgctatctttttttattatttgttttggccatgcaaaaatattgctacttcatttttgtaattttatcacatatataaatgtttgaactatgaaattctattaatttataaaagtattaatttatcgataaattaataattattaatttgtagagattttagactaattttgtaatttaaaaaaaaatattatgtctgaattttttcttcttctttataatcattatatttttaactttacgatggtaacgttaaacctcaaataataataaattattaactttagaaaataaaaaaaagaacgttttcgatgtagtaaaaagatattaaataaactttaccaagaattaatataaataaaaataaaaatattagcaaattcatatttcactatttttcttccgtataacatatatatatttaaaaaaacttttacaattattaatttatgatattaatgagaccatatatttacataaaattttcaaaaatttattatttaattaatatatcgatttgtgttattttttacattgatcttaactcttatacgataatctgaaaacaatttaggctcttattggtaacacacataatgcagaaaatttgccaataaaaaaaatctgcataattgtattagaaaacgcaaaaacgtaagatttgtatttttgttttaagtaaaaattcattatgccaaaaagtgtgtatataattatttatttgcataatataatcttattattctatgcatacaaatattagcaattgtaaaaaaaaaagtatcatagtttacacaaaattatatcattagtaatacaaaaaaacattttcataactttttaataaattttaattatcttacatttttagtatcgaaaattactcaaatatactaatttgttttaaacattattttttattaagtttatatatatatatatatatctacatatatattgttaatataatattttttttttaacaacttcaactttattaaattgtataaggttgatacaaataagaaagtaagaaacgaggagggacaataaagaactgatacagagtagtagtagacagaacgtattgagccatcttatctgcagcactatttcgttcacgattgacatggagtagagatacgttggatagtttggccatccaatgacgaatatcgtaaagaagagcccctatcagagaatgatcatcaccattattgatagttgctataagttcttggttgtctccatcaaaacaaacattttttattccacaagcccaaactacttgaaggacatgtaacaacccggtagcttccgcctgtaaaggtgaattagtcgatggtagttttcaacagcctgtaattaaaacctttccttcatcgtcccttatcaaccatcccgtatttgtaaaggatcgtcccagcataaagccactgtcaaaattacacttcacccatcctcttggtggtggtcgccattgagaacctctgtcatgaaccgtattcttgtttgtttgactacctcttgtgccttcagtataactgtttgcttccagccattcatttgcctcgtgtcgtcctatgtgttcttcggtttgtggcagtctcatgatcttcttgaaatatttatttgtcattttgcaaaatatatccaattaatatattttaaaattagtttcattcgacgattttttagtttgcaaattttcattctgcgaaatttttattctacaatttatgtcattatgctattatgcaattttagcaatcggaaccttaaggaaaaaaaccgacaagcgaaccgttctgtatgtatttcggttattttcagccagccctatttatttggttaagcttagattaaaaagtttcggtttggttcaatttgatatggtttggaggtcaacaacaaaatcaacgaactgaataaagcgatcgcgttggttctcttcttcaaaacaagctctctctgtccctctctgtctctctctttgggtaatcggaaaaatcagaaaaatgggaaccctaggacgagcgattcacactgtgggtaatcggattcgtggaactgcccaagcccaagctcgcgttggttctcttcttcaaggaagccaccacatcgagaaacatcgtaagcttccacttgcttcgctctattgaaccctagatccaattctgtatctctcatttgtatcaataatttccttttgattcgagaaatttgtagtttagattgaaaactttgatttgagaaatttgtggtttgttttcagtgtcgaggcatcggacgttgattactgtggctccgaacgcttctgtgattggtgatgttcagatcaataaaggctcgttcatttcgtatgcaagtgtttctcgtggtgagcctcctgatttctttacgaatgcattttgtagatacattgattaggtgttttgagaggtctatttgtgcgtgcacttcgtatttgactgtaaaaatacgcagatttgcagtatcctcgtgcaatgggaatgggacaggtccggagatttagcgaagatgtttctcacatgcctgaaatggaagactctgatgttctgaatgcattcaaagacttgatggctgcagattgggctgagcttccttctgctgttgttaaagatgctaaaaccgcgatatcgaaaaacacagatgacaaggcagggcaagaggctttgaaaaatgtgttccgagcagctgaagctgtagaggaatttggtgggattctcacttcgattaagatggaaatcgatgatagcattggaatgagtggggaggtttgtttgtttgtttccttcactaaaccattttcttgatttctggttgtttgatgttttagttgtattgtgtgcagggtgtgaagcctttaccaaatgatataaccgatgcgctgcgtactgcttatcagaggtatgctgagtatctagactcctttgaacctgaagaagtctacttgaagaagaaggttgagatggagttggggactaagatgatccacttgaagatgagatgcagcgggcttggttctgaatggggaaaggtaatcaaatctgatctatactctcaaaacacgtactctgttgatttgcatctttgacagcatcatataagctagaataagcctgattaaagtatgagtttgcataattatttacgatttcaacttgtcctccaaagtctcactcgtactatatgtgatctttttttctcaaccttatgcatcttttaggctagctatccgaatgaaatcatatagaatttggcagaaactagtgttttcatttagacgaaaccactgaaccagtagttgtcttgctaacgctttgttttaatatttttgtaggttactgttcttggaacctcaggactctcgggatcttacgtggagcaaagggcctaaaacaaaaagagaagatctagaattacgtgcgaagcttgttatgttgttattgcgttattttgtcttagcacataataaaggtcaatctgaccaaaagacatatcaggtgagtctgttcattgtttcctccaaatgaagctttaaaatttagagcttaacaccaattgaaaaataaactcacatgaatttgtgttcatttgttactgtttccttttatgagagatcttttgtttataatgattcaatattttgagctacctttttgtcaaacaaaaggaactggagtaactcttgtaggcttcctccaagaccatgactctgcaggtgactttggaagcggtggaagcaacgcagcttttcgtcccaatccaaatggccatccttggcaatgacagaactcttgaatcactgatcctttcttaatttcattaacgtaatgcatcttccattgattctccagctctaaacctttcaagcttgaactccttgagaactcagttttcgctgtcatgtatccttctatgctgatatcactcatgcaacattccgaaaaactgcttcttaccgaacagaattcgttttcgatgtcatattcttttacgaatttgtaagttagcccctccattcctgtccttcgcttcttccttagtttttccatcgcccgacttctgatctcgaaaacaacaacctgaaatcaacaatcacaaaacgaaaggttgtgtaattcgtgtaattcgtgttgtcgaagaatagttatagaagaaagcaaaaatgaaaaacaaaggcaaatgaatgagttttctagttacttcatggtcgtagtcaaaatccccgataggcttgttatcatcatcggcttcgtgatcagaaagtgtaacttttctgcctttgcatctgtaacaataagtgatagcatctctcacccctgtggcaacgtcgtcaccgcaaaataccattctcagctgcaaattttatttctaaactcaatgatttgtaatagaatacaaatgagtgaaaggttgaaatctctagataatttctgagtttaggatttatagacaaaactgagctgcacaatgacagtttatctaacatcacttgtgttcttttcaatgcacgcaacaccactttcgttttcatacctttctactgtttattatctgatgaacaattaaagaaatattacgaccattgaccaagattagattctgaaagtacaaaatcatcctaattaggcttccggatattaagacaaatcagggttaagtaaatagaaaacaactttacgaattcatctcaaaaaagttctaagttgattatgttgaaaaaatatcatatcttacttgaagcaaaatacatgaaagtgatagagaaactataagacatggcaccaaactaacgttatcatgacacgcaaagatagtatagatcttcttttctgttttacattttgtaatttttcttactcaccaataaaatacgtgtaaaacaaagaaatcgaccttatcttaaccttcttcaacattttgatattgtggttatattcaataattaaaagaaacataccttcaggatctttgtttgtaatctatattccttcaagaattaggacatttttacatcctcgagaagctaactgtactttagcaaaatatataacagaagcttagtgtatgtttatcaatggtttttcttctgaaatgtctttggattctgtatagatctattgtttttcttttgacatcatatatatcttatttttaggaaagctctaaatctatgaccaccattatttcattcacatgctcccacaaagtcataattacaccaagaacccaactcctttttggccgtgccttacttttatcccaaaatttgatttatttgctttaatttccacattattaaatttacaacgaccatctatatataatcataccattgccttctcgatttgtaattgactgggccatttcttttagtaatttggtgttgttgaatcaaaacataccatattgctgttacaatatttctctatcataggcccaagctaattgagtaaatcttattgtataaaacttgattcatctaattaaactacgtgaatattattagtacgtcttttcatacttttttgacttttgagtttattacaatcctgaatttagatcattatagtaagttatactatatatatacttagtgtacaatataacattccaatctatgttaatgttagatagatattttgaattttgatttatcttcaattattgtgatggttagaagatgaactctaaaatttacatatatagaaaaaaaattgcataactcttatcactgcagtaaaaagatttttttttatttttttttggcaaagtaaaaagaattatttatgttcatcactcgcatataactaatgaaaagatattgtaaagagaagattttaaagaattttggcacaacaaaaaaactgataatcaatacgtgtgaaacctaaacaagtgtgacaagcataatatgttaatttatatatttgtatcaattgtgcatttaaaattaaataatattgtaattcgatttatcaaaatatttttttaattttaatattatattttaaaattttaaagaaggattttgttttttgtttttttttggcaaaacgaagttttggtttctagaagactccttaaatggtatcatgatactttaactaccatgatcatcacaatttacaggctatatgtaatgatactgcactattttcgtttattttttcattaaaataaataaagtgaaatcaagtgagcttgagagaataaaatgctcgacgatttatagtgaaagtgttaagtagacaaaacataaaggaagccctagggccgttaaataattaatatacgaagtacaaaatcatggttggttcactacgctttagcctaatagagataaaattcattcatgctgctggagcgtaatcatagataacgtcatcatcgttgtcaccgttttcgacaaatgcagtttgagcatactcaaatacttgatcattgttagcgatgttgactccaatgcatgtttcgtagacattctcatgtacgtagagaacaagttcggagacagaaaccattttttttttttttggaaacgaaatgcttatcaagcgtcgaagagaaaatgcaaaacaaaaaagattgatttgagtttgatgagaaaacaagagatcattggactctttataggtgaaacaaaagtggatgtatgtttggactcgtttccgtcttctactgacctcaataaggagtgtgacatgctggtataaattgtggaatagcacaataaaaattacgaatcccactacactctttgacacatgggatttattctgacacgtccgcccacacatattggtttacacttgttgtttggctactttaaaagaaggaaagttataaaagttaaagctttttatctcatgagaatattatttgttgtggcaacataatgtcgtttgtcgccgaagtatttgtggtctagtagtaggggaagctttagtgagggatgaaacttccatattcgagttcaatcttgatccaattggtttcttccataaactaatgttattttttatagtgtaattaattgaataagtgctgctagctttacatgtgttggtataaaagaagtattttgtgccaagcacacttgtttctaagcatatcacacactttactgaggttgaccagagacacaatgagtccaaaaaatttctaacctttgtgagttttgttgcatatataaatatcccagcgatatctcatattccttcaccaacctcataaacctctttctgtttcctatttgctttatttagtattttgttttcttcattaaccaaaaaaaatatgttttctatttacaagtttgttctgtgcaaatgggaccaagttggtgaaacattcatccgaggagatgttacttacaataatggagaatttgaataccctcaggttgcatatgtggaaaacggcgacgatgatgacgacattatctaagattatgctccagcggcatgagtggatttgttactttcagtttttgaccaaagagtagaaaactcggttcttatatacgaatttgttgcttagggccttttatgtacttgttgagattattctcactggaaatagttggacacttggttttctcatcaacctctcttttatcattcttataactttcgatacaaatatgcaagagctcaagaaaccattaacgagttcataattgtgatatttgttaactagtcttcgtctaacaatgaatgttttttttttggatttgaatgtaaaaagtaaaaacgtttaagagttacgagaatgtagatcctataacattggtcctggccgtgacaaaaaaaaatataaaaaatatggaagcaaataacaattggtctatagatgttagcaaaattagtgacgcttttgaaatcaatgaagcgataaattgattttgagaaatcacttaaatgataccttaaagaagaatatacatgctgctaaacagcgattaccgattcatttatagccaagtgaatataagccttttcaccggtgggctgagaaaactaagccgtcaatggcgtagaacaataagtgttctttaaaatttagtatggatagaagtagagatttttatttatcttcatgatacacttcgttttcatgttttaatttcattaaaacaatttgatctgccactttgtatatatctatatgtataacgaataaataatcactgctttgattataatttttagtttttcagtttttaaacgaccaacccaaagttaagtagtttagtttttcacctaccatgtttgtttcaatgatcctaaatgtttttacgtaatcttctgatggatcaaaacttctacaaaattcaagttatttttttttgaatttaatgttaaattagattcaaaaagtaaacaaacatttgtacatcaagtgcaacttatacttagagagtagaaagaaaagttataaagagatttgaaagcttaagatcttgattgaaaccataattggagagccttctcatatcgatagtctccacttgcggtgatggttgatatttgatttcttatttgcttgtcaagccatcggattaattgagctgctgtatttggacgttccccatgtcttctaccatttctctcatgccatatggtgtgaatggctgcttggaagatataacgtgctagaaaactcttttactgtcccgccaagaagtactgagagaggttactaaagaggaccaacttgttgagaacttcgcctgatagatattgtttgctagattgctccaaatttctgcagagtagcagcaggagaaaagaagatggttccgtgtttccatagtgttgttacagagaacacaagttgatgacagtcccatgttccatttgagcatcctatcgccggtagtgagtctgttttgcaccgctagccatgtgcagaaagaatacttcggtgtggcatgagcgaaccaaattcccgtgtgccacgtaaccgtagctgaagttgtgcgaagctggttccatgtgtctctcgtggaaaattttggcctgaactcatcgtttcgtcctctccaaaattcaagttattaactgtctatatcctcgagctttattacaaccgataaattgcgagaattggaaggcaaggaatatatagatccaaatcaagaacaactcacatcatcactcgggaaatcacataagttttaaggactcgctcctcacattaaaagatcctcgatcagcacaagtactggacttacgctcatctcacaacatgttcacttacattcagttttcacatgagtaattttattacaccaattgaaatcatattttgtacgttttccttcattgaaaactatatatcaagttctcacttattttggtaaactagtcataaagatcaaactatcttctgtaaagttttaactttggcagtgaaaaaattaaataaccaacattttttttggaagacaaaatgtacatggattatatgctcgacatttgttttcttagcaaaatttatgtatgatttttaggaataacgaacccaacgaatggtaagacatcataaattttatttttcataagaatgttagcacatcactgtttttataaaaaaaaattagtaatgatctcaatgcgcataataaaacgttattgctttgaaatttttcgttcgatcgcttctataacgtgaaacaaagagctgtgtatagaagcaaatattaaaggatttatagtgaaagactgaaggtattaaatcaactaacataaagaaaccctagggcaaaaaatcattaatatataaaggtacaaaatcatgtttcatatgatccattcatgctgctggagcataatcatagatatcgtcatcatcgttgtcaccgtcttctacataaacagattgagcatacacaaatgcttgatcactgataacgaccttacctctcatgcacgtaccactaacattgtcatctatgcagagaacaaattcagaaacagaaatcatagttccttttttgaaaaaaaatgggaaaaggaaattataaattaagtgatgtaagagaaaatacgagacacaaaagtttgttaagagaacgagagatcgattggctatttatatgtgggaacaaaagttgatgaaaagtttagactcactcccgtcctctactgacctcagcaaggagtgtgacctgttgatagtaaatgttgaatggcacaatttaaattacgaaccacaatgaactttttgacacctaggatttgctatatgacacgtccactataaaatatattagttttacatttcttattcggggaaatttgtttatgaaatattatttttaaaaaagaaaagcaagagaaaagtgtagctttttttatctcatgggaatattatttgtagtggcgacataatggtgcataaagttaatttgtctgtattttgtaaatatattagactaccaacaaatcttgctgttttaacacatatatgcgtttttatttgccacgagtatagtgtaaactcttgttattcattaatgttcaggaatcttgattatttcgttgacgttttgtcttatttataggaatcgaatgttctttccgactattacaaaaatatcggaccaatttaacaaaaaacaagatttatgtagtgcatgattttatatacgtggactgtttttttccagcaaacactaaggctatttccttttcttttttgctaatcactaaggccgtttatatatatggtgaaaatagagtggtgccattatattatgaacatgataaaggtcttacgttcacatttatgttttggcatatttccatttcattttactagaaaacaacgcaagaaaattgaaaatagattgagagaatcacttatttaaggatctacaatgatgttatagcagcctgagccacaaattattataagaaaatacaaaatcacgtacggtgtatgtataattgtatattatccaaacaaattatctattcatatgatggatgcactcctgctgctggagcataatcatagatatcgtcctcattttggtcacctatttcggcatatgcagcttgacggtacttaatttctttatcataactagttgtatcgcccccaacgcaagattcactaatatggtcatatatgcggaaaacaaactccgataaagaaaacattctttttctctggtcaatgaacccaaaaaaaatgctaaattatgcaaatagaaaacaaagattttcgtttgttgagacaatgagagatcattggaatctttatatatatatgcaccaaaagaaagttaacaaaaatgtgaactcagtctgccttcagtgtaccctcaggtcaacctcactaaagagtgtgatgtgcttagaaacaagtgtgtttggtacacataacaaattgatttttctcaacacgtaggatttgctaacgacacattggaaatcatgatgtggtccagttcatgtaaagcaacatatagcattcattaataacagaacatcaaaatctttattttttctagacatcttatggaataaagctttacatgtaaagcatcaaaagacaaaataaaacatttagggtatacatatcgctttggctacaacgtgtcaataaaatagccagtccctgtttaatttcatattggaataaccgaatgagtagtgattattggaggtaaagtgagacttctagtatatatgtctgcgaaaaaagatcgttataaagaataataggtaacaatagatgttgccccaaaaagagaaaaaatgatgaaaaaataattttatggaaaacttcatcaatttcgtcatattgtttttcaattaattgatttcttttctttttttcatttagagcacttaactttgatcctttgacgaactgatatcctgtctaaaatttaaacggcacctagtaaaccaattgtggtgtctaggattaacgaaaattttatggtgttgtttatataattaaaacgatatatgcgcttcaaatgtattttaggattgaagacaaaaaaaatccgtaattcaaaaccctaattcaaaaccttagagttcttacaaaagtaattttaatttatgcgctctatcaagagatacggtaactcgaatcttaaagatggactgcgttttatttgttacgtaatagccaatgtcgtctatgatatatatagtcacttttatcggtctacaataggcaaataaaacagatgattactttgttcgtggataatcgtattttttatttattacttaaagatggtctcaatagccataaaaataatttgtccgtgaccaaagtaattgcatgttttatttgcctattgcagaccgataaaattgactatattcatcatagacgacaataatgcatataagatagcatactaactatttatcttccgaaattgatatgcatccatttacagatgacgcagcgttaaagcatttatttatgagactcattacatttatctcaactttttaccaatcaatatgaacggtcagtcaatttggtgtgactcgtaacactgacaccattttgtttgccttccgggatatgcatgtgaataaattttctatatgtattacgacatggcttatcatgttaaccatccgaaaagcgcctatgcgaggaggatgcgagttcaatttaccacaacaaacaaatccaaccaattcaataatgtagtactagtcgtgccagtgtggatagagcgaacgacaaattggtgtaccaagcaaacccatatgctttctggtatctaaatacatgggtcgcctccctttagtcttattcatattctgaattttgttcatacatgtgtgacttcgctttagtctaaaccaatttgttcacactttaaattcgactttttcgattggaaagtttcatgttgcgtaaatgaatagtaaaaaccagaaacacaaaaatctattaaaagaaatataatatcaaaaaagtaaaaattttggaaactagcaatattataaagttaaattaactttcaaaattaagagacaatatcaatccacaagtaaacatctatggaaaccatgtttgttcatctataagaagactcaccaaactatttagtacatacatggcctagctagatatctaaattaccttatcatctctgtctttttgtttcctcctaaattacaatcatatactaataggaaacaatcacgcagcaggagcataatcatagccactgtcatcgtcatcaccaccattctcactatatgccactcgagaactatctaccacatcttcaacatacacggtggaagcatggtcaaatctcttgatggccaagtttgcgacaaaagacatcattgatattttttgttggatatgaatgaaagtagagatatgaaagcaatgaagaggtgtaaagagaaagccacaagaagtatgatgagcttcaaatgttgatgtgagtttggtgaatataataagagagactaatgaggcttttataggtggaagccaaagatagaacaagtggggaacacactctgtggtcaagactgccttgtggagttttcgaattgctcatgttgctgtgtgtttggcacaatagttattgcatttttcctcacacgtaggattttaatatgacacatcagacgttaagtgagctcattggtccatttatattcctttctagtaacacatgtaaagcattttcctttatcactaatattcttccccaagctcaacaaaaataaaattaagaaagacttttggagctttatataagattctagtggcaacattggtcgcttctaaataatgtgattttgggaattgatatctctcgttatttattaacaattagttgtacatgtaccttgtgacctagcctgttcataaattataggttttgtcaagtgctaaattacacaatatcgtatatatgattccatgttatcggaatacactattttaaatattgtacttattaataaattttttagcaatggaacttaaactaaataaatagttcgggaatttaaactagaactagaaaacgaacaaatgaaaatattctagaagccagccaggtcacaacccgtgtccgtgtgtgacccaacgcaaaactaggtcatagatatcttcgtcatcttggtcaacgtttttgacatgtgcagcttgaccatattccgattcttgatcattattagccatgttgcccccaaggcaagaatcactatcaaggtcttatatgacgaaaaactcaacagaaaaaaacattttcttgtggttaatgaaccaaaacaaaatgcttaaactaagcaaaacggaagctagaagatttatttgcgtttgctgagcggaggagagatcgccactgggatcattatatgtgaaaaaaaaagttaacaatagtatgaactgatcaatctattaccatttcagcctcaggtcaacctcagtaaagactgtgatgcgcttagaaacaagtgtgcttggcacacatataatgaagagatttttcgcaacacattggacgaaatcataatgtggtccagtacttgtaaagccgcatcacattcaataattacaaatcgaaagaaatcaagacgtttacttgttctagtacatcctctagtatctttgactgattcgactttttatacctcctcaaacaaactacagaccaattttgtttttaataccaagaggttctgggctgaaaactgtaatcccttcaggccaacaatcacaacatgtaatattaggttcgtctcaagcgtaacaggaaccaacgacctctaaactacataccatttgtagaaagatatttagggttttataaattgtaaaactatatatgatttacgtacatgtaacatattctatgaaaccaatccatataatatgtatcacttgcactacagtactaacaaaaccatgaaaaaaatattggtctgatttctttgtgccataatttagccacgtttttttcatgatttggccataaattaaaaaatgagaaatatataactatgttgtgactagttatccatgaaaataatccatggctagttatcactaactggcaatggatttatagacaaaaaacaatttgccacgaagtagccgcatatgtttcatttgtcccttgagggttagttaaaacaattgtatctattttgaggcccttattacagtccaaaggagatatatatttgcgtaaaacaattatactgacaccatataaattttctccgagaatatgctagcttgataaataaatatttgcgcagtcatccaaaacaccaaaatatttatctacatgtcttgattttgtggagtaacagtgtcgaggtgtttcttatggtatttatctacatgtatacaaacacctaattattacaaactagtttgggtctgccgctctggatggataaatagatacgatgagctaataacgattaatgtacaaattcattaaccaaagaagattaaaacaaaaattagagaaattgatgaactaatgaaatacatgtatggctcccctttggtatactttcaaattgtaaaattttcacatcttgaatgatgaaccagttggttcaaactttagatccggatttcttcgagtgaaatttttaatcttgggtgaatgaagaaagtgaatactaaccacttaaaaattagtaaaagtgaatgttacactgataactttcaaaattaagagacaaaaaaaagtgattgtggttaaggactaagacactaggaaaccatgtttgctcattgacaagaaaactcgagacacaatctagtacataaatggtctaactaatatctaaattatcttatcatctctctctctctctttttttcttctaaattacattatactaataggagacaatcacgcagcaggagcataatcatagccactgtcatcgtcatcaccaccattctcaacacatgtcgctcgagagctatccaccacatcttcaacatacaccacggaagcacggtcaaaactcttgatgaccaagttagcaacgtaagacatcattttttttttctgttatgaagaggcctgaagaaagattcaccgagtgaagaagtgtgatgaggttttagtgttgatatgagtttggtgaatataataagagagactgatgaggcttttataggtggaagttaaaggtaaagcaagtgttgaacgcactctgtggtcagggatgcctctatggagtttgcgaattgctcatgttgatgtgtgtttggcacaatagatattacattttttctcacacgtaggatttggtaatgacacatcagacgttaagttaactcatcggtccatttatattcctttttagtaacacatgtaaagcattttcctttctcacttatattcttccccgagcaaaacaaagaaaatgaaaaagaaagtttttgagctttaatataagattctagtggcaacattggtcacttctaattaaaaattgcggaatgacttcaaactttaatctcaaaaacatcttccctatatctaaatagcttttaggttgcccatcaatcactttttgtaccaaaccttcccatctttctctcttgtgttgattgggaagatgcgtggtgttgatagcctttgttctcatagttgttgttgaattgcttcagttggaattatctacactatcgctgctatagaagaggatgttgtttctatagaagagtattatttttcgttgaaaatcaacataacagtctttttagtactaaatgtatatattgtctgtatgtgggttggatttttggcttcctaatccgagatttggggttaagctagccaagtcaacaatgtagaaaccaaacgacagcgcttcgtttgcccttttttttaacaaaataatgtccggctcaaagtcaagatgaagaacgagatagtggatcaagtttgctataaattaggaaattgtaaaaagaaaagaaaaaacgcaaaaaaaatgagcaacaacttgcaccatcaggtcttacaacgttaatttaggctgtgaacggtaaccaaaaccgcactcaaaactacatcgcaacaatgctgtaacagtatcaaaatctctacatatacatatgtatctatgtattttcgttactatttgaaccataccgcaaaacgcagtcaccattcggagctttagggtccgaatggtaaccgcggtttttgttgtgcggaaaaagcgttattatagtgcggtacggttcaactgcggtatgtgcgggagaaatatatttgcgggacaagtgcggtttgtacaaaataaacggtacaaaataatgtttgattggtgaaaaaaactacttgcggtgcggattatagattatatatatatatattaatatatattaataattataaatccgaatatattagatttttttagtaattcatatacatttaaatatatttgagataaaagtaaccaatgttatagttttctttttaggtaaatttagtattttggttattggtatatatgagtaaaaaatctgaaccgacccaaacccgaaaatattttgagtatttttggttacttttgcatttatactaaaataaccgaaccgatccgaactcgaatcgaaaccgaaccaaatttttagaatacccgaatggttcttaacatcatacctgaatagagccgatacccaaaagaaaaaaaaaaactaaatgggtacagatacccgaatgtccacgccttaaaaatatgatataaaaaagataaaaaatatgtatttagatacaaaaattatacatatacatatatttttaatagctaaagaaaaagaaatgaatatcattcatcgcgtattttacttgtaccacatggtaataagatgtttcagttataaaagggggtccatgtacttttacgctgtatatgaaaaacgcagtatacattttaagaaaaatataaaaaacgcaaatttgtaatgataaatgatgattggtgttctaagtgcggttctcaaaattctttcgtgaattccgcaaattatatgttaccattcacacccttagtgttttgttccctatttatagatgagatactggggaacaacttttcacctgattgtaagttaatatatagcatgtttcttcaatatgaattataataattcatgttgaacccatacattttctcaaattaattggcaaacatataataacatgtagaacagaacatataagaacagaacaaaaaaaacatgtagaacaagaaaacgcttttattgctatatcgcagtagctaacaaatgcttccaaagaaaataatttgggatagaactcagcatcgttagatgtaaactgagtccgtaaacattcaatctagtttgctataaaagttcgaaaataaattattatgccaagaaaaaaaaaaggaaaacaaaaaggaaaactagaaaacagaatatagttgtaaataaataacataccaaaaccacaaaagaagccagactaatgaaatcaaacttgtaatgctgcttttttagtttgacttcgaggtattgagaccaaactggggaaaaagctacaatgcaaaggccagggaccaaccacagaatctatttgaattttactgatcaacttattgtcccccacaacatagatccaagcttggccagtttggtcgcaagaacacacaacgagctttttatcgtcgatgaagtaacttgggtgtactaaaaccggcaagttaagagttgacacttccatgaaattcatccattccgctgaatccacatctccactagagcagtttctaatcttgttcttggtcacccaaatctcaatcttctttgttagatggcattgctttaacaacgaaagccgatcttccctaaaaatcctaagaacaagaacatcgtgatgatggttctccccacatggtagatcagaaaacttgtagaccttttcattggaaaaattgtagtaaaccaggacgaacaaggaattattctttagatgagaggcaacccaatacaaaattccattcagtgatacacttgcaccgaataaagtaacaccactactacaactcatgaccaaatttgtatatttccatgaattggaggcaaagtcatggattttccaaactgatctagtagggtctaattcattaggataagacacaagggtcttgtaaccactactctcaagtttcatgttatcatactcataacctatgccattgaaacacaaactaggttggtttacctttggctttatccatttagcctgtcttaaccacgggttccaaaccacgatgccttctttttccatgccacatagcaagaacccattgcaatcaatcaaaattttaggtttaagttctaaaccgggaatatccaaacttaactcacgcacttctatctttggagtcatgcttaccgagtagaacttagattcggttgctaagatgaatcgaaatgtcatcttgtggttgttaatgaacatcttatcgtcgaagagggcgttccatttcttagaaacggttctgaagcgaacaagagattcaggagggacacgagagagtatctcttcaatcagttcacacggaagcttctcctcaggagccattatctcttctttttttttttttttccgactctttttatatatatacaaaagttttcgtaattagggtttcaactgaatgttagtaaaatatatctcccaaagatttgagatctttcgaaacggaatttttttggattcacttttttttttttccttctaaaaacttttattagacaattagtattacaatagcaagtacaaagccaatacaaaacttcagaaaccaacttattacaaaagcaaaattatgtgccagaagatgacgaaactgaaaaagtgaatttaacgatgcttcctttcgataagtcttactcgataacatgttgttaaacatgttatgttcctctttcattagccatcttactcgaatgtgatatgtatgccatattggcattctttgtttgaaactccacatcacatacacaaagctcgttgctcctggagaaagttttgagaaaccgacaactcgataccaattagtccgtatcggtgtcatagtgcccattagaaaatttggcttgataccgaagtaatcccatccattcatacatctcaaaccaaagacgttgttagagatcttcacggcaaatgtctccgaagtgattccggggttccacatgcgtcgaagggcgcaaatttgcattaaaacgatgttggcaactattgctgccagactgagaagaccgggcatacccggaaaaacaccgtgaatgaaccatattatcatcacacggacaataacgcctttggtaaaaagaacgaagaccctaagaacgagaatcgaaatggcggcatcggatatcgatgtgaatccccaaacttgagacaaattcaaccatggatttgttaacaaaaacatcatcatatccagatcgctcccagacaaaaccatcaacgaaaacccatatcttactttgccacacgaagctattttgactgcaagaagggcaagcaatatcaattgggaatttggttataatcacaaaatcaatcgtgtcttttgattgagattttattttgaatttttttggattcacttttattcacactttctttttctacgcaatcaaaatctactacaaatatatatatttaattgtaaaatattttctcccaccaaaacaaagttataatatccttgttaacagaaaaaacaaagtaatatattggttttggatagtaagggagggttagagtttataacagagagtaagagtttatgttttataattaaacaaggttaaatattagtttaagtttatgaacgagtttagattttataatttaatgaggtaaaatgttggattcagtttataaaaaacggttaggggtttaaatttaataataaaacaaggttaaatatcgatttggttttataaaagaggaatatagtttagattttgtagttaaacgagattatatgtcagtttggagtcattaaaaattgtttaggattgaaatttttgacaattaaatgtgattaaattattgttttgtttggataaaagaatgattagagattagaaattagatttacaattaaattagtttttcttataattaaatttaagtgtttgattctgatgggtaagaataaaaagggtgaagaaaatgtttagtataaatatttatgtatagtcctaattatgaatttatgtatttggggagtaaaaacataagttgtaacctttaaagtgtaacaaatattattaagatatcattagaaaattgtaatagtgtaacgatagaaattcactaaataaatacacaggtcatgggtcataattcaggtttataaagatctacaaagattacatacagtaaaacatctataaattaatagtcgataaataaataacctctataaattaataaattattccgatctcgagttgagaccagtgtaaaaagtgatacaaatcgatacattaataagataataattttcctgaaaatcctatgtaaatatatggtctcatcaatatcataaattaataattatataaatgtatcaactacatatatatatatatatatatatatatatatatataagaaatttctttgaaattatatttctaatatttgtttgcttaaatttgtatttgttcttatttgaatttagttctaatattttacagtatcaaaaaattttggtgttgttttctaaacagaataattattttttactctaagctacctaaagtatttataataagtagggtctatacagtgtataatatttgaaatgtataagaataaaattatatatagtatgggtactatttcaaaatcaaagtattaaattgacctaaattatgtgtattttaaataaaagtatcattaacaaaaacaacaaaatgatgtttaaattcatgagacggatatatagggtgggacaggttttgatctatatttattcttcttcactaaacaaaacaaacaacaaatacttctagattaaaaatttgaaatttaatcaaattatatataatttaaataaatatattagttgaaagaaagaaaaaaatgatgtttagttatgacgagacgagtttatatggcgggacgagtttggataagacggatttatattgcaagatgagtttggatggaacatgtttggatgaatattaatatgagacaatatactacaagtggaatcctataattaacaatcaaattacaactatacaatcttaaacactattttttgtaatcttttaaaaatcaacattatatcaaaataagtgttaatcttctttgacacatctaaatgtgtaattgtaatacaaacttactaaattacaataattctacaagttaaatctataaacactgaaagttttagttatatatttttgatacaaaaatgtgaatataacataacagattaatattattttgtcttttaagatttgacccgtgatacaccaaaagataaacttattaatattgtaaacttatttctcactaaaaataataaacaaaattatcgagaatcattaatcaacacaaataacaacaaacattatacataaaaattcattttataaaaatcaaacataaataaaatatttgaccacgatatattgcggatcctatcctaatctctctctataaactcctaattcttgtgagaattcacaacccaaatgtgaaatcaatttattgtaaaaccataacataaaaatagaatacatttcaagatccaagtataaatagtcttttttttttttgtcgtactactacgtatggggtgtgttgaatttttggtgttgataatccgagatttgggggatgttaaaagccaggtcgaccacgtgagaactgaatacgacagcgtttcaatcagcgccgaataaaaacacacataacggtgcttattgctgcgagaacggcggaacatttttttttatatttttatttttattacttaataaacaaacaataaaaaaaaacaaattaaaaagagacagagagaagaaagagaacctcctcaccttcctcctctctttgcgcgttttctctcttctctctctcctacggctgttgaaaccaatggcatttctccacttcgccggaatttcgatcggaagatgaatcgtctccttcgtctctcttcgcttaatcgtcgatcttcttctgtcgccgtctaattgcaaatccaaatcgtaaacgcttcttctcttattcttccttcccccattgttatcgtttcttcgctcgatgtgatcatattcgattcttagagttttatcgcttctttcgatgagataatctgcgtttcacatttccagatcatttgattgcgtttgttttttgtgttcattcccgattttgaactttttatatgttttcactggatttatccgcgagcgacggagaattctcgaggacgcattctgattttgaatttgtgttgctcaaagaatttgaagatctaattcatgttttcttcgacgagatcgtttttttttcagagtttttttagtttgattctgcaatgtagatcggaatgttattgtaatttcacgagtatagattggatttatacattgaatttgactaacttggatttcaagtttcagattgttcaaatttagaggttctgattcttgaatgtttttttttcttttaattgtgtatcaggttttttgtatggtatagagatttggtgaagaactagacgcagcttagaggaagcttttatatttattgaagcttagggggaaacaatgtcaacaaagggagaacatcatacagttccactttctgtgttgcttaaacgtgaatcagctaatgaaaagatagacaatcctgaacttatacacggccagcacaaccaaagcaagaaaggagaggattttactcttgttaaaacagagtgtcaacgtgttatgggcgatggtgttaccaccttctccgtttttggggtaattatttgccttctttctctattgattgtggtcctatcgatttttgtagttaaaacattgaaatgtgtattgcagctttttgatggacacaatggttctgcagcagctatctacactaaagagaaccttttgaataatgtattagctgcaataccttctgatcttaacagagatgagtgggttgctgcacttcctagggctttggttgcaggatttgtgaaaactgataaagatttccaggaaagaggtatgaacttatcaatgaaaaaccttgtgatgtgattcaagtcccaagagggtgaactcgtctgtgtctttatattcttatatcattctggtgaaggctatgtttgaggttttattgttttcttgcatttcagcaaggacgtctggaacgactgtaacttttgtcatagtagaaggatgggtggtgagtgttgcatctgtaggtgactctcgttgcatacttgagcctgctgagggcggtgtctattatttgtctgctgatcatcggcttgaaataaacgaagaagagtaagtcagattttttcctgctattcacccaactgatgataatcttgattgtatacaatggcatctcaatattttggctttcttttcaggcgagatcgagtcactgcaagtggtggtgaagttggtcggttaaatactggtggcggtactgaggtacttctttagataattcttgaaagtttcttctgtatgcattaagtctcacgttatcatgcgctcttgatactagcaatatataactaaaaggtaactgagtgcaaacttctaggatgatgttccagaattggatgtttttgcgagactgtattatacttagctgatgaactgtcatattgtggtagctttgtagaatgtaacacatagggaaatatctttgtgccgtcaaattgaagagttttgataactaaatcttatttttttagattggtcctctgagatgttggcctggtggtctgtgtctctcaagatccattggagatctggatgttggcgaatacattgttccagttccttatgtaaagcaagtcaaggttcaaaactcataactaaatctaatctaaattgatctttatgcgcttatagcacaagctgacattctaattattgagttttatactgaaaactgtatctatttattttggttatgtagttgtcttcagctggtggtcgactgatcatctcaagtgatggtgtgtgggatgcaatatctgcagaagaggctcttgattgttgccgggggttgccacctgaatcttctgcggagcatatcgttaaagtatagtatctgaattactttattttagatatattctctacatattctttcttgcctttatagtaccttgatattttattactccatacaggaagctgtgggtaaaaaaggtattcgtgatgatacaacctgtattgttgttgatatattgccactagaaaaaccggctgcttccgtgccgcctccaaaaaagcaaggaaaaggaatgttaaagtccatgttcaaaaggaaaacatctgactcctcttctaatatcgagaaagagtacgcagaacctgatgtagttgaagaactctttgaagagggctctgctatgctatcagagaggtgtgattctctgaatatatgtgcttaagcatataccatttttcatacttgatagcttcatttcgatctactaatcttaaccaagttttctttcgtttttttcttctgtttattgcagattagacacaaagtacccgctttgcaatatgtttaagttgttcatgtgtgctgtgtgtcaagtagaagtgaaacctggagaaggtgtctcgatccatgccgggtcggataattgccgtaagcttcgtccctgggatggtccattcctttgtgcaagttgccaagataagaaagacgcaatggaagggaaaagatcatcgggaggtacacactatacttatatatccttctttattacctcccgttattttgcaaatcgactaagaatctgtctatagatttcttatgaaagctaattgtaatatatttttggaatgttcagatagacatagtagtgaaagcgactagccagcaatctgcaaattattggcaaagcaactaacaaaacagtattgtgagtaaattggagcagttcaaggatcttcgggttgtaatttttcacccatagagagatatgaagttccttgataaaccaccaacattcttaccattctccagcagactccaaggaagtttatttatttttctcccacttcacgacgtcttacatcaaacttgtttcaaagtagaggtaattcataagttcttttcatttttccttttcatttttttttgtccatttgtgatcactctgtgctttggtatttcaaaaatgagtagaactaactaccagagacagtagctttattacgtctgttgaaatgttgagtcgtttaggaagagagggtaaggaagatatgcaagtatgtgtgcaattatttcaatgtataaaccgaagacaaattcttgatagaaatcaaatcatttttcatgtaactttaattatatctcgtcttctacgctcataaattttatgtgcctctctctcttccagagttatgtcttcaaagataagaggacttatattgtttaaggaaccctcagaatttacatctcaaaatgtaagatggagattgtagtaacgtagataagaaaagtaaacctgtctagatttgttcttacaatctagaaacatgtcgaaaactgcaaatgtattgtgtaaggttatcctcaaacgaatgagatattggaaaacaaatggcatattcccccacaaattttattgttttggagtatttatacacataattttttggcgtgtgcttacaactacataaactcacaataaattttaatttcgtacaagaattaaacaattccggccgaaaccatcaaatcaccaaaggttgttattgttccgctaatgactaggataccacgtaatgcagtttgcgtttttaaccataaatggcagtcgttttattacaacaaaatcttaaaacaacataaaactaaaacacaagatcataccaaaagaaatggatctgaaacaaaacatcaaacttgaacaacatacaataacattaaaataatatgataattgatccaaaaatacatcataatccgagtatacaagctacataatcagatatcacatatagaaaattagagatgaatagtttgcatctcgttcatgatctcatgtaaagtggatgcaaaattttcttatttttctcttctttagtcatctcataaagattgaaaaatatgaataataagttttacactttcaacccaaatggtaaaatttgagatgaatctatatttcattcaattcttttctactgaaaatgcaatcatttttccacgtacttttctcttatcagacttgtgcctatgtgtgtaacacattgcatcttgttgtccttaagaaagtaaaacctggaatagttggtaaagaaatttgaatatagatgaattgaatgaaagagtactataggaaatttaatcaatattaattgctacttaacactctctacttgatgcaagaaagtaaatactttataaaaattggaaacttatgcaattagtttttccttctctagatcaacacctctattccgattgctttgatccagaaagtaaaaaaaaaaatacggtagccattaagcatatattatatagttttagttcaaatcaagagcatacataagcaatttccaaaccttcagacctcaaatcaaatctcaccaagactggttcctaactcattgcctatagctggttctcggatagtgaggagtgctgcattgtgaggaagtaatgttcataaaaccgtctaacatgggtcaagcaaaatcctttatatagatcatctattggattttttcctataaaacttctgacgatcattacactggttttgacagttggtaaggttatagacgtactctcatcaacccatggacatagctagagttttggtagcagatcagtttcttcaagtgacataccgtatatatatacttgatgtaaattcaggtggttcatccacaactagagctttatgtttaggttcatctactactagtgccggcttaagtacagggacgggtagtgcgaccgtcctacatccgaacaatttttcttcttttgtatatttaaaaggggtacaacttttttgtatatataaaagggatacaaaaaatattatatatgcaaaaggagtataaaatatatattttaaaaaaatttgccctaaaacacataatatgtatgagccggcactgtctactacacaagctttcgcgggactagttatggctgaaggaaaaacattttcagcttctttggtaaaaaaaattcacccgttcttttacgtacaaagtaattattattaaccactaagaagtaggaagtcttataatctgaaacatagaaattaggactttaatttctcggtttggacttaggttagcaccgccctattttaattttatttttaccacggctttcgtctctttggtgagttttaatttttaaatagtcttaaaaactctgtctttttatttggtgaagaaaacaaaaaaaatttcatattttgattccttttattttcagttagggtctctttattttcatggtagctaggtttgtctagttcttaatatctctgtctttgtgttcgaccagcaaataaaacgatcatgatttcagattccatccctaatgaactcatcctcgagatattgttgagaatacaaagtcaattgctaggtgcgatcgatatatatattacaaaaaaaacagtgttgttgcaacgatatttttgcaatgattatattcgttaaaaatttgtaacaaattttgctatacttttgcaatgatgagtgaacgttacaaacttacaatcgtattacaagtctattgcaaaataatgacaaaacaatattgcaacacgaaatatttaaacaaataacattattcattttctacgtaaattaatgttggttttgtgtagttatgtaaatggtttagataaatatgataaaatgataaaaaaaaaaattataatgggaaacagtggtggaataagacacatattaggttaataatagatagctacttaaaaaatttattttattttgaaagtaagtgatggagttgtagatagtaatagatagatagataaatttgggaaatgaaaaataaagatttaaaatatttagacatgtagtccctgttcatttgcctgtcgctggcgactgaaaccagcgacagcgaccaaaagttgttcgtttgcctgtcgctggttcaacgaccaaaagtagcgaccagcgaccgcaatttttgatcgctgaaatttttagcgatcagtcgctggtttcagcgattagtcgctgcttttggtcgctgaatccagcgacatgcaaacgaacaacttagcgatcaaaataaataaattaaagaataattaaaaataattaaattaaacaggattaaattaaattaaacttaaataaatgttttttgcactctgaacagttgtgtcttttaatcgcaactttccgtaaaaaatattgacggttgttttttctcgcttgtatcttttattgcaatttgcctatattgtaattttctgtcaaaatataaacaaatttataatattttctttgcaatatcacgagggatttgagttctagtttaattaaaataattcttattaaatttgataaaactaaaataaataaatatattaatttattttttctcatggtgtatgatatatgatttacattttgattttaaaatataaattagcacaaaaaataattatttttttttaaaaatatagcaactgtttataacgacagtcaaacgaacaacactttgacagttattagcgattgtcgctgtaattggtcgctgaatccaacgacaaacaaacgaacaatatatgttgtcgctggttgctgtcgctgatcgctggtcgctgtcgctgaatccagcgacagagaaacgaacaaggctgtatatgatttttttggctacggtaccttcttgtatttatccacgagttatgatatccatttttgaagcgttttttgtggactttcaaagctctctaatgaacgtactttgactatttatagatttaatagccaatttataaagtcgtcatgtgtttgtgacgactttgtactttagtgattctctttttttataaataagccaaagtacgttctactttttatccacaattcattagcctctctactctcttaatcaagaatcactaaagtacaaagtcgtcctcaatctcttatatatgacgagcgtgtctcctcggtacagaaatgttcctgtccctaaagtgttccttagtttccgaggagaagagattcgtcatgggtttatcagccacctcgctgatgctttagagagatatgggatcatgttcatcatagataaagacgagcaacgtggaaatgacttgacaagtctccttttaaggatcaaagagtcaaaagttgccctggtcatcttctctagcaggtataattatgaggaacctatcaatctctgattccttcacttaattaaaaccggaagtagttcatagatgcatctttttcttggttgcttaatgtttcaacattagctagggtttagagttatcacaaaattttaaaaatggttattgacttattgtcctagtcatcaatatctaatagtatttgtatggactatgtggcaattaatcctttaggtttgcggagtcgaggttttgtatggatgagattgtcaagatgaaggaatgcgtagatgaaagaaagcttctagtcattcctatcttctataaggttagggcaagagatgtgagcggccgcacaggtgactttggtaaaaagttttgggcgcttgctcaaaagtctcgaggatgtcaaatcaaggagtggatggaagccctagagtgtatttctaataagatgggtttgtccctgggagacggaaggtattttctaatgcttcttttgttttcctataatttgtttttcaaaaacatgtaatatcttatatatttaattagtgtatagaaataacccagtttccaatatgcgatattctaacattttaataggtttcattgagatgtgaatgagaaacgatccaacataaacagtccaaactcattaaaaacctcccgatttctttttaactaaggtttaacaacaataatataataattaattcccacagagacggccagatataattactaaggtaattttagttaaatttgtttagttaattgatttttatcgtttaatttgggctgcttgttctgaaagctagaaagattatagtagtttaaaactttaggttaaatcgttttgaaaatttgttttcgatggaatttgtattttgaaagcttgcatgagtagacgaatacccattattttttggtaaataagaatgcatggagtcatattttggttcccgaaggcttaaaagaataataataggtgaatttccaataggttttatctcatctatctcttccataagtttgtcacattatttttgtcgacttgtggatcacattttaatactactattatatatatatatttttaaaaatcgaaataatgtttgggagaaaagtatgccaatggatttgagtctctagatctgatttgtgtttgtgtgacaaacaaagataatgtaaaagatgtgtggagcttagggaattatagaaaaaacattttctgtagttttatgtttaggatcgaatgttcaccctttttgtacttatatctacttcattaatttctttcgttgatcctttcatcttgtggttgagaattcctcgattatatcacgtgaaaatatttagtttctctgcactttagaaaatatccattaattgagttacaatatatatatatggcaggtctgaagccgattttattaaggaaatcgttaaagaggttgagagagttctagccacatttacaagcgaggacacagaagatcatcactgtgtcaatttttgaaattgtatccttgattgaacctgcaaaaagagaaaagaggtcaagatgagcgaaatcaagaatctcctgattctcgtcgtggatgcagcaaaccgttaagcttttgaagggcctcgtcgtgggttgccttgcccatcaagaactgccgttggtgttggtttttactcaagtttactactatgttaagttttctattttcttcattgaggagatattctcatcatgttttaggaaagggtgtgttggcaaactagtcacctattgtattccatcttgttttgaaatctatcaaaaaaaaaccaaaaagaggtagtcttaactacccaaaagagctttgtcttaaagccctgcaaggaggacttgcaaatcaattcgatatcgattcctggaatcgatctcggttatatcatctcaccatcgtttcatcaccactaatcgtcatcttcatactctgttttctccctattaaaacggagccgccgtgtcctccgctcgtagcttctgcctttctatcagttggtatcagattcttgtcgttctgggcgttgaatttgttaatcatgcctcctaaagctaacgtgatgctttaattgcatctcaagaaaatttcaagaatatgatgcaacaagcgatgtacgaactgaatcaaatgttgctgcaaagtcttggcaacatagaccctcatcgtgatgttgcttttgaaaaccagccacaagaccaaccagatagtccgattgctcgtaacagacaacactaacgcgatctcgctaatgtttgtcaacatgaactacatgttgggaagctagttttcgtctcgatatcctgtagtttcatggtggaattcgtggtgattcgttactggattggatcgtatctgttgaagagatacttgaatttaaatgagtcccggaagaacgtagagttgctttggaagcaaccaaattctgtggtcacgctgcatattggtggaatcagacaaagacaactcgtgcccgcattggaaaagttctaattcatttttgggagaagctcaagaaaaagtttaaggacacgtatgacaggactgtaaggatttgaactataaactcagctcactaacactcgattcgaacttgattcttgtttgtaatcgatttgtgtaacaaagaaagtaaaagaatgttgacacagaggtttaacgagttcacgtttccttcaccgaaaacgctacgtctcgccggagtttaccttcggaatccactagaactttaatgggaacaaagtatcatacaatcactcaatctcagagctttctcactctaatctctctctctttactctcgaaataaactcaacaacaactctaacggaatcgaagaagagaagaagaagataaagaattgcagaggaacaccgaaattaccaaactgccctcattgaccgttgcagcttcagcgagtcaacacacgtgcttctcacgtggctcttcctctaactcatgaaatgaaaccctctgaatgcttcagagtctctcccatacttaagacattccttaagaacaatatgagccacttccttcaaatctccaccttggctcttattatcttctgagtctttacctgttctagttaccctggattccaactccggtacctgagctccaccgctcagtgactactgactcggagcatgttgagtgctccttcaagtttgttaactagtaacacttttgtgaagatatctgctgtattgcattcacttgcaattttcaccagcctaatcttcccttcagttatgacatctctcacgaagtgtaacatgatgtctatatgcttggtgttctcatgatgcactgagttctttgctaaggcgataacactctgagaatcacagtgaacctccacatctttctgtggaaaaccaagctcattcgcaagtcctttaagccacaaggcttctttgactgcttctgtaagtgccatatactcggattcggttgtggaaagagctaccactttctgcagcttagacttccagataatggtgtttccacctattgtaaacacataacctgatatcgatctccgagtatcaaagttacttccataatctgagtcacaataacctctcaacaggaaatcatcttgtttcatgtagcacaatttctttgtttctgtacccttcatgtatctcaagacccacttggccgcttgccagtgatctttcagtggtttactcatgaacctactgatcacatctaatggataagcaagatccggtcgagtgcctatcatagaatacattatgcttccaactgtgttagcatatggtacaaacctcattctttcaaattggttcttgtactcttcttctgttgctgctctcagcttaaaatgaactccaattggagttgacacaggcttagattgatccatgtgtgttgaacgcaggaccttcttcacataagcttcctgtgacaaagacaaaattccagcttctcgatctctagttatttccatacctagaatcttcttagcatctcccaagtctttcatttcaaattatttactcagtagtagcttcaattcctgaacaatagacttgtctactgaagcaattaacatgtcatctacatacaagagtaagtaggtgtatgtcttgcctagcttcttatagtaaacacaactgtcaaaagcactcctgacaaaacctattcctttcatgaattcatcaaatctgaggttccactgcctaggtgactgcttaagaccatacaaagagggtttcaggtaacataccttctcaggatttttcttatcctcaaaaccttcaggctgagccatgtagatgtcttcatctaagaatccgtgtaggaatgcagtttttacatccatctgctgcaattccatatcaaaatgtgctaccattgacacaatgtaccttatggagacatgtttcacaactggtgagaagatttctgtgtaatcaattccctctttctgtgtgaatccctttgctaccaaccgtgctttatatcttggagcttccactccttgtattcctgtctttctggtaaagatccatctgcagcctatgatcttgacaccttctggtttttctacaagatccaatgtctgattctttcccattgacatcatctcttctttcatggcttcattccatttatcccattcaggatctcttagtgctgcctgatatgaatttggttctgcctgttctccatcttctgtgaaaaacgagaaaccaaccaagtttgattcattatacctcgggtttatcttcacagctctatctctgactagctgatagtcactcaagtcttcttcttctgatttagactgattttcatttgagacttgagtttgtgttataacaggtgagttagcgtcttgtgcagaatcatcttgatatgtatctgtcacagtagctccaccttgatctgtaatttcatgatcacaagtaacaacaggagggttaagtctgatgttttctaagtcattttcaatcatacttgtgtgtgaatcatgcttcaggtctttgtacatgatctcttctctgaaaatcacattcctgctaataacacatttcttttcttctaaaacccaaactttgtatcctttaactccttcaagatagcttgtaaacacatctttcttcgctcttggattcagcttaccctgatcagcatgaatgtaaaccaaacacccaaactttcttaaaccttttaggtctggtaaagcaccagtccatttttcttctggcaagtcaaaatccagtgctgtagaaggtgatctgttgatgagatatactgcagtggatgctgcttctgcccagaatttcttatccattccactttcactcagcatactcctgactttatccatgatggttctattaagtctctctgcaatcccattctgttgcggtgtgtaagcacaagtcttgtgccttacaattccttcatctttgcagaacttctcaaaatagtgattgcagtactcaagaccattatctgttcttagtttcttgactttcttgtcagactaattctctaccatctttttccattccacgaacttttcaaaagcttcatctttcttctttaaaaagtatatccagacctttcgtgaataatcatctacaaatgagatgaaatattgacagttacctagagaagctggattgtgtggtgaaccccacaaatctgaatggatgtaagctagcttctctttggtgacatgttgagctggtgcaaagctcactctatggttcttcccatacacacaatcttcacagaacttcaactcctttatagtttccctctgtagacaatcctttttaaccaagatttccattcctttttgactcatgtgaccgagcctactatgccacagagaagtctcatctttcaactcagctgaggaatgtgattccccattttctgctaatccctctaggatataaagagtctctcttttttgtccttttaagattgtggaacagcctttaacaatctttaaaactccatcttgagatttaaaccaacaccctttgtcttctaatgttccaagtgatatgagatttcttgccatgttaggcacgtatctcacatcagttagaattacttgagttccatcattgtttctgatcttgatacttccaattcctttcaccggagaatatgtatcattgcccatcttgacaaaacctgaactcagttctttgaaatctttgaataagtctctccttggggtcatgtgaaacgaacatcctgtatccagaaaccattcatctgcatctctgcctgtaaccaacagtgtttctccagtagccattataaccattgcaggatcaaatatttcactagacttagccaaactcgactctccaacatctgaaccttgttgctttgatttgtttctttctaaccacttgtaacactgcttcttgaagtggccttccttgccacaaatccaacaaactcttttaccatctgcagacttagaccgagacctattctttcccttatttccttgattgttgttctttccttctggcctacctctagcataatgaccttctgctacaggcctattgttctgagacaattccctttctttatctctcgctccaaccatcacatcatctaacctcagcttttctctgctgttactatacttcatagtctctacaagaccatcatacctagcaggcaaagaactcagcaataggatcgcttgaacttcatcagttacctcaatctgtagatgattcagatctgcaacgatcttgagaaaatcatctatgttctcatcaatctttttattttcttgcatcttgaaagtgtagaaactcaattgagtatacactctatgcggtaaggatcgaatcatgaacaatcgatctaatgtttcccaggcttcttgagctgtttgacatagctcgatcttcctcaaaactttgtttgctacatttaggaagatcacattcttagccttatcacatcgttcgagtcttgatgcttcatcaacatctctcttctttcacttctcaggatcttcctcttcttctgctgtaagaggtgttatcgtcttcccaatcacaacgtctttcaatccgatgacgctgagatgagccatgatccttgtcttccacaatgagaagtctcctgattcgtcaaagactgcgatcggagttccagccatctcgaaatcgaatccgcttaacgaccttaagctctaataacaatttgtaaggatttgaactataaactcagctcactaacactcgattcgaacttgactcttgtttgtaatcgatttgtgtaacaaagaaagtaaaagaatgttgacacagaggtttaacgagttcacgtttccttcaccggaaaacgctacatctcgtcggagtttatctccggaatccactagaactttaatgggaacaaagtatcatataatcactcaatctcagagctttctcactctaatctctctctctctttactctcgaaacaaactcaacaacaactctaacagaatcgaagaagagaagaagaagataaagaattgcagaggaacaccgaaattaccgaactgccctcattgaccgttgcagcttcaacgagtcaacacacgtgcttctcacctggctcttcctctaactcatgaaatgaaaccctctgaatgcttcagagtctctcccatacttaagacattccttaagaacaatatgagccacttccttcaaataatgtataacaagttgcaaaatctgagacatgaaacacggtctgtggaagaatatgctgaagaattctacctactactcacgtttaatgacatcaatgatagtcagacacaacttgtttcaagattgatcggtgaattacgctctcagttacaaaattctttgtcacaattcgaccctacaaccgtctcggaggctcacaggcgagcagcttcttttgagaaacaaatgaggtcagcctcatggaactttactaacactcgtcctcgttcactagagcagcaaacacctccaacgaatattgcttctcgtgaaggggatgagcaaatcaaaatagtgacccgtaatacgaatgacgaacaaggtttgcgtcgatcagcaaggacagaaaacggtacaataaaaaaattcacccgttcttttacgtacaaagtaactattattaaccactaagaagtaggaagtcttaggttaggactttaatttttcggtttggacttaggttagcaccgccctattttaattttattttcaccaaggcttttcagaattcttttcttttgtttttttacttttctacttgtcacgacatataaattaggaacagtaaaaccctggttggtataatctaggtgaaattttaagcttggctagaaagctatctcctccaaaccctcgaagacactgcgttcgtctcttaggtgagttttaaatagtcttaaaaattctctgttttttttatttggtgaagaaacaaaaaaaaatcatattttgattccttttattttcaggtatggtctctctattttcatggtagctaggtttgtcttgttcttaatataatacgttttaacatatctctctctttgtgttcgaccagcaaataaaacgatcatgatttcagattccatccccaatgaactcatcctcgagatattgttgagattacaaagtcaattgctaggtttcattgcgtgtcgaagcaatgggcatcaatgcttagtcgtccatatttcacagaattgttcctaaccaggtcctcaactcagccgcgtctcttattcgccatcgaaaataatggcttgtgaagcttcttctcgttgcctcagcatcttactccatatgagaagtcttcatcgtcgtctcttgtagaaaccgctgaatttcatatgaagttccctccagatggtatgcagatctatcctcgtaacgaccgacggttttcatgtggctatgcgtctggtatgatgtatttctatggtatgcggatcaaagaggatgattacgatggagtgcctgtgctatgtaaccctataacgggacattatgcgaccttgcctgctattgcaaggtttagacaagcgtttagctttttcgggtatgatccgattgacaagcaattcaaggtattgttcatgatcatggcttacccatgtagtcctgatcatcataaagttctgaaacttggaagtggagaaatgagttggagaagattaaaacgtaccttaagacatgaaattatgagtgaaggtatatgcatcaatggggttgtgtattacttgggtgatacgtctgaggttttgacttcttttgtggtagtttgctttgatgtgaggtatgagacattcagctttctttaccctggaagctattgtgaactgataaattacaaaggaaagttgggtttggttttttatgatgattacgatggtgataccattaagttgcgtctttgggttctagaggacgaggagaaaaatgaatggtcgaaatatgcctacgtgttgtgggatgatatatttttggctcattatgtttcggtagttggagtgactgctacgggtgaaattgttttgtcgatggctgattatacatctaagcaacccttctatattttctactataaccctgaaatgaatactcttcaatgtgttgaaattcgaggttttggagaataccatgaagcgtcgggcaataggagtagagtctgcgtctttgtagacaacgtctttgagaaagattgtagtagattctacgctttagcagaccatgtagaagatattaacgtcatcgattcaaagctactcaagtcaaagatctatgaagatacttacccgaacttagaagattatgaacaatcagaccacgacgaaacatcagacgacgaagaatctttacgttcttataactattcttataagccatatatgtacgcaggagaagaagaacgcagaaaaagaagtagaagaacgagaaggagtacgataaggagaagatagagacgattattggagttagctagatgtcaatttgttctcttatctatgagttttatgctcttttgttttcataactattttcacaaatcaaattttcttttaaaattcatatcacttcaattctggatctataagactgtagttttgtattagtttttttcgttttaattttctcttttggtaaaagatctatccgatccgtttccttacgttaaaagtaatcatgacgaagtcttaatctcaaacaccaaaaccttaaccaaagtaacgaatcttttatcttttaaaaatttataaacgaactcatagtatatcataaagtttgagtggtctcatagtaaaattgtaatttaatcattattatttcttttgtccaaaaaaaaaaaatcattaatatttaggtggaaaaaaaaaaaaaaaaaaattctgctgaccttatcattgtactcaaagacaaggttcaatagtttattgagcttaaaattctgctgaccttattgttgagcgtgtttctcgtggctggtcaagttccctcgtcgagtctgttgctcttttgtgtagctactgtggtgtttgataagttgaggtttcagttatcggttgtagctatctctcctctccttttaagaactctgcaagtatatcaattctttggtttagttcaaggcatgttctctgttgtggcttcctgttgtaagtgctcttgtttgaagattgctttgccttgtgttctcgcctctttcttgcggcttgattgtgctttagaggactagtagggctaacaacttgaggtgcggctttattttgctctacactactgacttcgggaatgaacttggtagagggagcttgtacttttaacataatttagcatgtgaggttttgtttctgggaaagctcatggactgaaacaaaaaatcgatcccacatgacgcaaggatagtacatggtcgatgatttggagtttcaccgttgacggcttggtctcgggtctcatgcgaaaggtttctaaggctaagtgtatgtcgtataaaggtgttttactatctgcaatggcccttcttctttcgtaaatcatccgggaaagacaatagaaacgtcatcgcttcatcttgttccaatagcttcattgcctggttgagtagatggaccgaaaattggtttaattacttcatgtgtattgattgtaatctaacctgttttcattatctatgaaatatttacaatttagcaaaaaaaagaaaaagttgtttgaacttgcccattttacatgtaacaaaacctttttttttttagtttgttttttccttttgtgcttatctgcatttattatactcaaattaaaatacaaaatatgtttacttcaaatataaaagtactcttattcattacattagaatgataatagagtgaaattgtagaagattttattttaaaatggtatttggagtgaaaagtggagtaagaaaaatatttatgggcttttaatttattttaaagcttctaatttcctcttttaaatttgttataagaattttaggttaacccgccttttatctttttaaatggtcgatgagttctatgtaagaatatataattaccaaaacgaatgttatttcacacaatgttttttcaattatacaattcagtttccgaaattcgttctcctgattttgtgttttcaatttctctcgtgttgaaatttgtctttctctttcatttccatttgaaataattcactgatccttcagtttatggacttagttaacacttattgggctccaaattctgctgacctttactttgggcttgaaagttgtttgaagtggcccatttttcatgtaactttcttttcttacatatattttaattgatgacaagagaaaaaaaaaaaaaaaacttgtcagttgtcacaataatgctaaaaaaaactctgataaaaaaaataaataatgctaaagaaaactgctccaaactctccaaaacgtcgccgttgttcatccttcgccgccgttgatctcgtcggtgagttttaaaaattctctacatttctctcatttggtgaagaaaaacaaaaaaaaaactcttcttttggattctctcttttaccttttgcggttttttctaaggtttatgtttccgaattgaattttcagttcaaatttatgtctctgttacattcttcacaaaaaaatctcttcttttggattcttctctctatttacttttgctattttcttctaggatttatgtttgagagttcaggttttgtctctgttacattcacgttataggttcacttgtatcgttttcagcttcacaaacaaaactttagtaaggtgtttgatttacggagaaatccaaaatgttctcaaacacggtcattgtctctagctttggttgtggattttggttattatagctacctaaagttttgatttttggttattgtagctctctaaagtttttatttttggctattgtagcttcctgaagttatgattttttgttaaagttttgatttttaattactttagctagctaaagttttgatttttggctaaagttttgatttttggttattgtagcttcctgaagttatgatttttggttaaagttttgatttttagctaaagttttgatttttagctaaagttttgatttttggttattgtagcttcctgaagatatgatttttggttaaagttttgatttttggttatgatagctagctaaagttttgattgtagatattaaagttacgatatttggttattgtagctacctagagtaaatggtcttctgcttcttaaagttttgatttttgtttattgtagctatctaaagttttgattattgtttaaagtcatgatttttggttattgtagctagctaaagttttgatttttcgtttgaaatgctctcgttttgctatagctctcttaagggttgtttttcagttacaatttctctagttcttaatataagttttaacatctctctctctctctgtgtaggatcagcaaacagaacgttcatggtttcagtttccctcccgaaagaactcatcctcgagattttgaagagattgcctgcaaagtcagttaagaggtttcattgtgtgtcgaagcaatgggcatcaatgcttagttgtccacatttcagagagttgttcctgaccaggtcctcatctgctcagccgcgtctcttattcgccatcgaaaaacataatcagtggagcttgttctcgttgcctcagcgtctgactccatatgagaagtcttcttcgtcgtctgttgtagtaacccctgaatttcacatgaagttccctccagatggtatgctgatctatcctcgtcatgaccgacggttttcatttggctatgcctctggtttgatgtatttctatggtatgtggatcaacgagcacgattacgatggagtgcctgtgatatgcaaccctttaacaggacggtatgcgagcttgccttttctggaaaggtatagaaaggcgtttagctttttcgggtttgatccgattgagaagcagtacaaggtgttgttcatggcttacccttctggtcctgatcatcatacagttctaacatttggaactggagaaatgagttggagaaagatagaatgttctgtaaaacatgacattgtgagtgatgggatatgtatcaatggggtcatgtattacttaggcgatacgtctgagtttatgactgcttttgtggttgtttgctttgatgtgaggtctgagacattcagctttatttaccctggaagctattgtgaagtgataaactacaagggaaagttgggtttggttttttgtgatgattacactgatgatgctattgagttgcgtctgtgggttctagaggacaaggagaaaatagagtggtcaaagtatgcctacaagttgaaggatgagaaattctcggctcattacgtttccattgttggagtgagtgctgcgggtgagattgttctgtcaatggctgatttcacgtctaaacaaccgttttatgtgttctactacaatcccgaaaggaacacactccaatgtactgaaattcaaggctttgaagaacaccatggaacattcgacaggcgtagcagagtccgcgtctttgtagatgattgcagtagtttctaccgttttgctgaccatgttgagtatctgaatgttgacgaaccaaagctgctgaagtccaaaatctatgatggtccaaatgcgaagatagaatgggaagaggaagaagaagaagatgaagatgaagatcaagaaaaagaagaagaagatcaatggagttagggtaaaagcaatggtcatgtcttttggtgcttatctatgaggttacgttctttagttgtgaagtgaagtttagctggtaaattctgtctctcataagtactaaatcagtaattatctatgagtgtcttgtagcagagattgcagtaactctgtctggccaaaaggctctgtcgtttctttgttttgttaaagtagaatgttaccaccaagaagaacttttgtagtttagtattagctttttttctttcttttggtaaaagatccatccttttcattacaaagaaactattaaccagtcttaatctcaaacacacaaacgattctgttaaagaagtcatcttttaaggatacatagctaatctatcttcactcatatatgatcatcataaagtttgggtggactcttcatgttttggagccatggagtgtgaagaatctgaaggctctctcgtaggactcgatactgaaggttttcttgtaggacttgaatttgatggttttgttgtaggacttgaatctggtgtggccatatgagatgtttggttgggactagtggaacccgatgatgattgcgtgattgaggttatcacgcttggtagattctctggagaagcatgcatgttgactcttatcctgttgtggatgttcacatactcatcggtttcgtcaaggatctcttcctgaaaaatcagagcaaaaaaagaatgcctatgattctttacttctctaatgctaataactaaagcagatgctcatgcttcggtttgagttacctgaagaagctcttcgataacatcctccatggtgataactcctacaacctcctcattggtaggaaaatcaggtatgggagtattctcaatgtccaaaatgcagaacgaacagcctctatgtcgcttcttagctggagcagccaatagacttgttttccctgacccttgctgctcctcaccgttctcactcttgccggattttgcatctccggtttcaattttgaatactacaattccaaagaaaattaggctaacatgtgttctcatgtttatttatggaacgtcgctaagttatgccgagacacaccttccttctccgatacctcaaactgagcttttggtttcctacaactgtccttaaaaagttcgtctttcgttttcttgttttttctgcgctcaataccattttcacttgtttcgggagattgctcctgctcgtcaagatccttgtaaacaactgctatgtgactgtgacccttctggaactcgtttaagatatcatatagtggcatggtctcagagacactggaggaaataaatagtataaacatgaactctgtgtatgcattaaatcctggtcgtaaagaaagaaagttagctttagagagtcatttaccgtggaatttttctcatggacatttttctcagaggaacttcctttctggcatcaactgccaatagatttttaacctgcatcagcaaaaggggacattacatgctgtgaagctagacaatacaaaaacaaagtccatatgaaagataggtaccagaatgagcccaattatatgtgtgggatttctgaaataaactggaactctgctatgaccaactgacataattgtatttaaagtttccctgtattgtggatgaaagcagattataaggtcaaaatatttaagtaaactgaataagagtaaatagaagatgatggaagcaaaacaaaaaaaaaagaacccacaaattaagaggtgtatcaagctcaagggaaaatgcattcgatatgggagtcattgcatcttttgccgtcttttcagttaattcaagtgcacctgtgatgattgaagtctcatcggttgttagatctccacctttcccagcctagtaaacaagaattatatacaaaagtctgtcagaaaagttggctctaagagacacaacggttcagcgacacatctggaactatttaatatggaggacaacacagcttcagttttcaattccaaggtcatagcaaacatcactagctgcatacctcatttccatggaaattcacaaatgtctttagctctgctctccgtaaaagaactccatgtcccttacccaacatccaatcaagaacctgaagcaacaatgtttaccaaaacagagaaacatcaagatttagccgagcatttcaatcaagccagaaaagggattacacaagctgatttttcaaaacagaaaatctgactctctaccttactgattggatatgaaattgggaagaacagtacaagaagaacacgaacaaaaggagccattatcgctccaaccttaagcccgtatcgagtacaaactgcttgtggcattatctgcagatactcaacagcagagaaactataatcacaaactgtaaaaatggaaaacaaaagtatatcaaaactataggtaacagatataaaacctctccaaacaccagtataagagtcactgaaagaagaatagctaaccaaggaggcacaattttatccaaaaatattggtaaagcctacaataaaaagagatcatcaacaccattatatatacaagtctctgcttcaaatacatagaaaccaaaaaatcaagtatcacctccatagccatagagtttccgatcaaaagtgtacatagcaacagatgctgattcttcactactggaaatatcttacctaacaatcaaatacacatgttcttcaattgctatgtacaattaaaaatcataaaatcagctaaagaacagaatcttcaaaattcaacagaatcgtcatcaagttgaagcactcaccggcgttgattcgatcttgaggacggccagatttgatgagaacttcgaggtcgactaaaccgagagacatgagaccaagagttaaaccagccatcaagccagcgaacgctacaagagctatgattatcacgacgtagagcgagaacgtggttccgcagcacggaatatccgatgacatagttttagagttaccggaatctgagaatttgtttccggcggaaattgttggggagaattcggcgagagagatgagtttagagtgactctttgatgttttagtgcgtatctaattcagacgatcatcttttatcaaacgcattaatttcgactttccttattgggtatttatttaatattgtttttgagatctaaccggaataaatgtccggtcgaattttaccaatctggttgtggtggaccaaattttttattttggtacccctacttccattctcatcgagtgagctagtaagattcaaatactacatagttattttggtatcctaacttccattcatatattcaattacgtcattccaagtgcatatatataaatttgttccgtgctagtaaaaattaggtcgaataaaagtttcttattaatttttgttaaacaaattagagatcgatatgatgggaataaaaatttgccacaccaaaacacgttcatgttaagagtatcaaagttggtgtaaaaaaagtatgacaaaaattgtatagattgaaataggtcttaaccgaaactgaaactgagtgctacataaaggacaaaaaaattacacataactcaaaccaaataaacatgcacaaatgttcaacaagggagagaaaaaaatgaagccatttactgatttaaaaggcttcattcgtttacacttttcttcaactttttcatatacataattataaagatttatatttttggacttcatatacatagttataaagatttatatttttttgaatgaatatttatgtttaacttctatttatgatttaacattatattgattttcacatggatgtttctgtttaacgttctgattttataatatattttttgatttttatatttataattattttttttgaatatttttttttggtaagcgatcgggccgcggagcctcccgttctattcaaagtaacttaagaaaacaaacctaatggactgggatttgccttggacatgttaccccaaggttatcctctttccaaaataaatcaacaacattcggaacaaaatgaaacccaagtggtaaagaaaaaacatagttcgctaatccatcagcaaaacgattagcttccctatacacgtgaaaaattcggactctccaatctttcgatatgaagccatggcacaaacgtaccaggaaagacagtggatgatgatcacttatccctgtcttcaaaaaaccaactactatctccgagtctacttccaactctatatgtgatgatttcctctcccaagctaagtagagaccgtaatatgctccccacagttccgccattggtgccgagcttctcccaatattcaaagagaaaccgccacaccatcgcccctcattatcctgtagcactcctccagcggttgccagccccggattcccacgtgacgcaccatccgtgttaatcttcaagcatccagctggcggtttaacccaccctattattttctttgaatattgtatatagggtgagctttagttctatttaaaggtttagtatattgaatagagggcattgatgagaatctgaacaatcatggtttaaggtttctcttttatttgttagagtggtttaaggtttctcaaacagagatacaagtacattctccattattaaggcaagcataataataatctttagggcattgatgagaatcaggacaatcacgatcagtcttgcatcttatcaccttggtcagctcagtctcaacttgttggcgcgaacaatggcatattccaagaatacagttcgcacctggatcttgacatcgcaacacacaatcttcatctgtcttgcataaatttctggcttgaactccaaagatattcacgaacaacgtacctattaattgcaaacacataccatattttattaggtcttatagatcgattaatcaaaatgtaagagatatgtagtatatagagtgactgagtgagaagctaacatgagagatagaaaacgaaaatgatggagattgttcttctcaatgccgtcatgtttttgatgtgaggatgatcagtttatcgtttagagtttataaacacgttttttggtatctttacatggtgatttaggtgcgtaaatattgtatcttggagcatgaaaatggcaatttatttaacgcatagtacacgactttgacaaacaagatttttgttgctataattagtgatgttactaaggaaacaaattaggaggaatttgtacaatattcctaaattgttttactatttaacgtaatttttgatataattccgtcatattcctaattttgtaccaaaaatagaactaatattgatctatataaggtctacgtgattaatctttttcatttggaatcatataacaaacatattctcaccaatcttgtgtccaaaaaaaaaaaaatatattctcatgaccaaactagataaggataaagaaggaataaatttttacttttactgcacataattttaaaaaacccaaaatttgagcatgaaaattagtattttgagaatctattcactaaatcatcagggtgcttggaaagaaacactcaagagagagagaacactcaattaggattgataaaaaaaaaccttgttgttggaaaaaacttttaaccttggggagaaagctatcctcctccaaatcctagaagacgtcgccgctggtcttccctctacactgttgttctcgtttcttgtatcagctgccaaatttcatataaagttctctccaaaacaaaatacagactatcctagtagggaccgacaaatttcatgtggctatgcatctggtgatctattcctatggtatgtggatcaaagagaagggtaaatactatggagtgcctgtcacaatatctacgtaaccctataatgggacggtatgcaaactaaccttatctgcaaagttacagataggcgttcagcttttttgggtttgatccggtttgacaagcaattcatggtattgttcatagcttatccatttggtcatcaaattcttacatttgaaacaggagaaatgaggtggagaaagataacatgttctacatatgggattgcgagagtgaagggatatgcatcaatggggttttgtattatttaggtgacacgtctgatgtttacttagatgacaagtatgagaagatctgaagagtgaagatgcctgattttgtgatagtttgctttcaaatcaggtatgagaaattcaagtttatttacccaaaaagcttttgccagttgataaattatattttagtaaataaagttttcttctaaagtttcatttctcttcatttcttaatcaattatatgctacatacatatttttaaattttcaaaattttaacatagttttaaagtttgtttgaagaaaagtttgtgttcaactcctttttgttatttaacattattgatatccggaggatgtttttgtctaatattattattttctaatatatttttgattttatttataaatattttctttgaatattttgtatagtttgagctttctgttttaaggtttagaatattagaatagattgaggtcattgatgagaatcagaacaatcacggtttaaggtttcttaaacagagatacaagtacattctccattattaaggcatgcataataatcatatttagggcattgatgaggatcaggacaatcaagatcagtcttgcaccgtatcgccttggtcggctcaatgtcgacttttaggtgcggacaatggcactcgccatgaatacactgtgcatcttcgtctgaacaacgcaccacacactcttttgttgtcaagcatgatgcatcggcttgaactctaaagatatttacaaacattgtacctattaattgcaaacacataccatattttatttggacttttaggtcgaataatcaaaatgtaagaggtatatatatagtagtagtagtagtatatatagagaaagcttacatgagatatagagaatgaagatgataaagattgttgttttcaatgtcgccatgtttttgatatgaggatgagtttatggtttagaattcataaacacgtttttgatatccttacatggtggtttagatgcttaaataatgtgtattcgaccatgaaaacgacaatttagttataacgcataggacgactttgacaaataagatttcgctttagttgatgatatctactaaagaagaattattagtttgggatttaaatagtgttttaatgactttaaatattatttagaatttgtgttattcaatcaaaatatgattaaactttattaaagtttcttgttattagtttttgatttgtaaaaagacttttcaattttttttattaatttggagttattggattcatactttaataaaatcactgatttttttatgttattcaactaaaacaaaagaatctttgaatgttaatcaattaaattattgtattattggtttatgctttctacacttttattcacaaaataaagtcataaaaagtagtatcataaaaatagagagattggttaggaaattttacaagattataaaaaacctaatcaacaagattataaaaaactctcaatcaatagtttataatccttcatttatctagtttcatgattttattaaagttatcaaaattctttttaaaatagaatccaataacactactttctatgattttattaaagtcatcaagaaataaattagaatccaataacacccctgaaagaaatatgagaaagatttggttaagtaaacatataaatataacatatgtatgatcttccaacgtatgcatgatcttaatatgtatgcatgattttattttattttttgtcatcatgtatgcatgatataatacataaaaataatttttttgtattttatttaattagatatataatttccttataattgtcttctttaccttttaaaattgtatatatatataaatttaatttccttataaatactttttctaaataaataaaggaaaatttattttacacgtgtcaaaaatctaagatcgtgaaaaaattgacacgtgtcatgatctcgtgagttactaactttcaaaattgtacttcatataatagaattttacatcaagacaaaaaaaaatcaattaaaaaaaaaaattattaaacagtatttaggaaaacaaatcttaaacaaattaattttatttggttaaaaaaagatgtttggtgtctttattgtcttaggaagaccaaaaaaaaaagattgggtgtcttaaatctaaatttattactccttttgttcctaaataatagtagatgttttaaaaaaactaattgcatcaaaaagatagagtttttacttcttaggtattatatgcagtatttcttatttagttttatgaattgtaaacttcaagaaacaataattatatatcatcggttttaaaattagcaacaagcacaaaagttgagccatggggatcctcgaagcacaccacgacgtcatcaaccgggatccacgacctcgagactccaccttcgttaatcttgagcaacgaccacatcgatgacaaaaattacaccaccgcagacggagaagtgctcccccaccaactcctgaatcatagacaagatgaagtctcaaaacctgtgaatgaaaagcagcagcgaagaagaaagaaagtagaaaaccctagatctacttgttgtcgcaaggaatatccaagcaacggttgtctttagttttaatatattagctcaaatattctaacattaatatactagattaaaaccaaactgaaaaataaacgtttgggttataaatactaaataaaatacatttgtttacatcattctagcctatattatatttcaatctaagattttttttaatttactcttcagtttcaaagttcaaaatttgacttatgcacaacattagctattgtgtcataaaaattataaataccattctacacttttcggtgtacattatcatttatactatatactacaatagtacaatgtatagcaccaaaacaacaaaataaatcaatattaaataaaattttattacaacatatttcttaaaatataaaacactggcacgggtcaggcctagtgtttacatattggttcatcttaagataatgaatttgtcaagtggaccaataaggagagtgaacctttatgtttacatatttggttaattatttcaagctagatcagtttagtttttcggttaaaatttttattatgactttgaaatggaaataggggtgaagaaaaaatatgtaaaattaacacatgctcaaaatccaaaacttgttcatgcaaaatatgcaatgattcgtaacaactcctttcaccagttttcgtgataaataatcctttacagaaccagaagtatatacatacatacaaggacgagtaaatacaatccatcgttacactgtggtttctgccttatggaagattatcaaacgtataaaagtgttgcgcctaccatttgacatcgagtgttaaagcttcttgaggaacaagtaatgatggaaactttgtgaatgacatgttagacatcaaactgctccatgcttctgtatccacttcaatgaaaggcactacttttctcagcctcactgctttcaacttatctccttcgattttcgccgttacttcaaaccaaacccgttcgatcttcggttttgttctccatgctacttttttacttatcacactctcattcttcccaatacttctctcgatctctaactgaaaccgtaccattcctgatgcctttagtttagctgttacagaactcactgtttgtcgtgttccattccctaaagagttcagaactttctccaacttgtggatctttaagccaagaagatcatttgggaaccgatgctgcctgtacgtgtgagctttataataacatttttctgcatataaatggattgcctcatctgataagtacgaagtcttgatttgcgtagttgcatttgaagtcctaaacgcaaccaatgaagctgaccctatgatttgtatgggaggcaatggcacacacacagaaccccaaaacgaccataaagaacttccttctttaatatttacaggatcgacagtagcagcgtatcttcgatgggatgagtggaatagagagactgcttgagcttcccttatttctactgagatgccctcactcacaagaactcgttttaaaccgctatgtgaaatgttcatctgaaaacaaatcataagctcgaaatcatcagtgacaaaacaagctactcccacacataaaccaagtcttccttaaaacgtattcaggcctttcattactttttgcacttaacgtttcttcgttcgtggtcatctactcgagaccacgaacgaagaaacgtaaaaaaaatcactaaaacaagacctaagtttcgaattcctccgataatcctaacactgagtagatcattaccatcaatcatagcactaagagagtcgtttaaagaagaacatttttaccggtaacgaaagcgagagacgatcattgccatcgacaagtagctcaaatggacctttcaatacaagcggcggatcaagaaccttactcgaattaacttcccgaactagttcctgcaactcaacatcactacccccgccgcttcttctccaatctgttatttcatccgggaagatgaatacgaatctgctcttccctaatcggatccggatctcaaatctccgactcgtaccaatacgaatcttcttaacttccaatttcgaaaatctaacttcctctagattccacttctgcttcaccgatatctccttcagcacatcctaaagtagcgaatgccaattggtcagacgatcaaacaccagagaagaagattgatttgatttgatttacctgtagaatcggtgttgcggtgatgttggattcgtctggctgcgaaggatcgagagcgacggctagagtaaggacttggatgaatagagagagtacgacggaggaaggagagcgacagatcttcattcgtccgataaggtttacgccgccgtaaccgtcgattgtctcgttgttctttttagggaaatgacgataacacccattgaagttttccgatattaattatgttagtgatgtggcaagattcacatgacatgagcctgcctgggctctctataccatttttttttttactcaaactattagtttattgatcttgaaatgataccaaagtgaaatacaaaacccaaataagggaaattaaagccagcggacgacataaaagtctccagagtcaaagccgacagaaaacaaaatttcctcggaaattggctctaaaaaagtgaaactaaacatagtaataaaacaaaacataatacttcaaaccacaaacgcaagaggtcgaaaccaaaaactaagaaaaaagcaccaagcctataactttaaaaaaaaacaaaagacccaaaaagacaagtaacccaatcttcaaaagctcaagcgatagagatttaccaaggatgctcgcggccaacccgaagataacatctacctcctcctatcaaaatgagagctaatctctccaaaccaagaacaaaagcttcataacccggcaagcgagacaaaagagttaaaggaacctcgagcacacttccgaatacgatgtccgacgactgctgcgtccactagcgtctaaatagaaatcttcaaaaggcaatcccaacaggaaagcaaggacaaggagaaaggcccaatctctcgaaaaacatcaaactcaagagcaagaaagatgaaaccgagacagctaacaaccataacgaacaacattagggagaagaatgaactgaaaacttagaggtctatcgatcgaagcaaccaaaacataacatcatcttagcaaggaaacaaacccaatgtgaaacaatggctgaaacgaggagaccaggaacggaaataagagcaagggcaggactgaacctgactaactcccaaacaccactcaaccaaaacggcttggagaaaataagcacaaagcgactaatgaaagggcacggatccaacaaaacaatggcataattctcagagcagcaccgtagatcctacagatccggaaccaattcgctaaaaccaaaaaatccacaaacaaagtcgctacaaccgtatccgcaaaacccaagaacaaactcgcaataaactagaagagacaccaaacgcaggccaaaaattatgcaaatacacctgaacaaactaacctcagacatcaatggcgagccatcagcaagaccagaaccgccgaaaacggaggcaccaacctcagatctaagaatcccatcacgcgagaagaaatccaaaaaaaaaaccaccataacgaaaaacaccggtgggattactacactcctatgaccaaaagagaaattaaatatatctaatgaattttatccgtggtataccgtctcgtattactatcgacccaaacccgtccgaccatctaaccccgttcaatgaaattaaatattattttgttatttttgttctaataatattttaatttaaaagatatataattcaaatcaatttaaaagatatataattcaacatatatcgtagagaagaaatctcggaaaatgtatgttgggagtaattagttgatgaaaaaaatctcggattataaatatgtgaataaacccgtgtagaactttttggagaggtttttgaaaacgtttgttgagcgcaatataaaatatttagatttttaaatctgaataattaataccaattagatatcttgagagatttttggcaactatgattgaatataatatcttgtatttaattatcaacagaaaatatttaatgttaatggcatgccattgtaaataagtgtcaagtacatgatttatttgctaaaatgacggcaaaaaaatgtatatgtagatttttcaaagcttaggaaattttacctaatctgtgtgttggttacaaaagcaaagaaatctatataaagagatttagagtttaatcctttttgatattttttaacacaaagaccttttttatgtaaataatagcgaacaatgaaaactctattatgcaattatatgtatttacacacttttgtatttttattatcacgcaatcatgatttcagattccatccctaaagaactcatcctcgagataatgttgagattgcctgcaaagtcaatcgcgaggtttcattgcgtgtcgaagcaatgggcatcaatgcttagtcgtccatatttcacagaattatttctcaccagttcctcaactcagccgcgtctcttattcgccatcaaaagaaatggtttatggtgtttcttctctttgcctaagcatcagagtccgtatgataattcatcgtcgtctcttgtagtagcggccgactttcatatgaagttccttccaaacaaaatacagatgtattcttctagtgagaaccgaaaactatcttgctgttatgcctctggtttgacttatttctatgatatgtactctgaagtgcgtgtgatatgtaaccctataacgggccggtatgcatccttaccttatctgaaaaggtacagaaaggaattaagctttttcgggtttgatccaattgacaagcaattcaaggtattgtgcatggcttatccatttggtcctgataatcagtaaattcttacatatgaaaccggagaaatgaggtggagagagataacatgttccttaacacatgatattgtgagtgaaaggatatcaatatgcatcaatggggttttgtattacttaggtgacacgtgtgatgtttacaacgatgacacgtctgagaagatgcatgattttgtgatagtttgctttgatgttaggtctaagaaatttcaagtttatttacctagagagcttttgtcatttgattaactataagggttaggtttgatttattatgatgatgtcactgatgatgccatgaagttgcgtgtgtggattctagtggatgtagaggaacaggaatggttaaaatatgcttacagtttgagggatgataaattctttactcatgacgttttcgttgttagagtgactgctacaggtaaaattgttttgtccatgcaaagttttacatctggaaaaccgttttatgtttctacttcaatccagagatgaacactatccaacgtgttgaaatccaaggttttggagaatgtcagcatgaatatgactactatcgtagtagagtagtttacgtcttcgcagaccatgttgaggatcttgatgttaacgatccaaagctactcgagtcaagtatctatgctccatatgtgaagacagaagattaagtatcagaatcagaagaagaagaagaagaagaagaagaagaagaagaagaagaagaagaagaagaagaagaagaagaagaagaagaagaagaagaagaatcaaaagaacgagaaaaggagaagaagatagagacggtcatcggaggttggataaagcaatattgggcatgctttttgcgcaagtcttgggaattaaacccgcatcgttagcttggaagagggttttagtggaagtagaatgatatttttatattttaatgtctctaattcaaatttctgaactttggtttaattcgactccttcatgatggatggagaaattcccaaataaaacaagatggttaaaaattctgatttttcactactagacatatttttacctaagaacaagaatggaagtgagaaaaagatgttaaagaaacgaaagatcacagcaacagcaacaacaaaccatcacacttgtttcagcagaagaaagaatgttaaaaatcttcatcggtgtaatcgtttgattaaattaagctgacaaacacaagtattgatcatcaattcatagattttggtatcagagtaaccgaaatcgacagttacagagttcaaattacaaatcgtaaaataaacgacgcaaaactcagaccaaacaacatccatctacacaggcaggagtcatgtttatcaatgtatagaggaaaaaataagtcgttgtttaccttacacaaagctcaaatttggagtattctttagtcgatcttcttgctcccgaacactttcattttctctggtaaaatgccattgatgaacataaaaattgatgataccaacaaaaccttggaaacagcagttattatgacggaagatgatccggtggttgcaacaaagttatgatagagagtaatcagaatgactatggcaatgagagtctgctttttccattgaattgtttcagtaactgcaaatgtcatcaataagactttctcagtatctgagccaagattactagtgtaatttctattatcataagtagggtagtttaaccttagtaacaagatttcttttgggttttcatgaatcttagtacctaatctaatctaatatgaatgtttcggtacggtgtctccgcatcgaaaaacccctgatcctaattcctaagaatacaatcacaatggtatgacttttgacaccttcactgaacttgtcatatgattttatctcaaagcagaaaatatctagagacatcgctataagtaccttctgttttgggttgattttgagctttcaagtgtgagaatgaatctattgtcctctttataccttcctagcattccaaaaaaaaccaatgaaagtgcaaggataagctatacagaggcagaaaatatatcgatctttgttttgaacgaaagaaaagattgtataaacctgaagtgggacaacaggagaatagcctaaacgatcctttgcttttgaagaatcaaatgttctgttgcaagagagtagcctaaccctagaaggtgttagcactggtactttcatcccatacggtccgagtaatttatatgctagttccacaagatatgctattggcatcatgagacttgcaggtatctttatacttggcctgaaaaacatataccaatttacaaacttctattagttcatcatgaataaacataaatcaaatgtactctagttaggaaccttcttttgttaaagaaaatatacctctcatagccaagtccttcaagaagctgtgacataaactcccaaaatttaattggctccatgttggtaatgaagtaagcctgcacagccatttcgtgtcagattaagctgtacatcatatacattccctaactaaagtacgaggagaataatttctatcagaaaatgccataattctagaaattgtgggcgtttttgtttcgaaaaatagcacaaaatcacaacttccatgtagtatgtcaccttataacccaaattaagtccaagaaaagcaatgaggacaatttaaatatccacatacaaccagactggagctatactcgtatatatatcttcaggaaatgtcatataactttctgacctcaattccctaaggagcacacataaggttgcgtctatcttattcattcagctgccccaatgcttttattcattacagttaagaccgttttaacagacaggactaaaacttagaaaggtacttatagaataaaataagaacagcagcaaaaaactgtaccactatgatattaaacaagtacaacatggtatcaaatgaaaacaaatacctggccagcagcttttgcacatacttctcctcctgatgctagagctcgctcagcacagacatgggcgtgcacaacattttcaacataagtgaaatcatagaagttactcccatcacctataatgaactggacaataaagaatccaaaacgaatcataagagtacactaaatgattgaatgtgctagacaaagcaaaaaagacttgagacaatgcatctttagcttatttattcattttattgagatctattttcttaggaagcacggcattttgttagataaatatacacatatctgcaaaatatcatatctttcaatatgtatatacactgtaatggaagtagcaagactgattaacatcactaaaaaaggagagaccagagcataataggtcacaaggaaaatagatagcatttagaaggccaaagagataaaacaaagaaaatagaggcaaccttggatttcccagccctggcagcagtaacaagcgatggaaccattaatttatcaccaggaccaaatatgctgctaggacgtatgcaacaagtgagtagtccacttcttccattcgctttcaaaatcaaagcttccccttcagctttagtagctgaatatgaatcattatgctgaaaagatagacattctcagtgacagaagctcaaaaacctctccaaattttcacatagtcctgtgaaaatatcaagttcttaacaacataacaaagaccttaggtggatacggcagtgattcatcagcattcaaagtaccatggaccccgtcaaacacaacactcggagaacttgtatagattagcctctttactccaacctcaatacaagcatcaattacatttgttgtccctaccacaaacaagttggaaacaaaacaatcaaaactaaattctcatttctaaaacagagagaaaatttacaaaattgaagtttcttcaaaccttgaacattaactgagtactgaagctggtgattgttaatcgatgaatctggagctgccatatgaaacaccacttctgctccttgaaaacctgtttcactatatcttcagatacaaaaacgaattcgacgaatcactgaactaaattgaattcgaagcaaaaatacctttgacaacttgagttttgttccgaagatcagcggagacgtattgaactctaccggatctaattgcttcaccgagaattccagtttcctcgtgaggattgagcactatcgcaggagctaaatcggcgatacgaacgtggaacatttggtaacgtacgagcatttctacaagatgtcttgcagcgaatcctctaccaccagttacaacgcaccatcgctcagtctctgtaacttccatcaccattgtcttctccgatgaactattcaaaatccaaaagtagaagcaatgttcataatgtatcttaacactgaattcgagccaaaaccgaaactataatactattaaagagataacgtgagaagagacgagcttaaattgaagcagttacattatccgacgaggcggaaattgaaggcgttggggtcactggtagaagtcaacggcgagagcgacggcgttcgatgatagacagagaggagagaacgttcggagaacaaaaaaaaaggaactggtagatttcagatgaaatcgaggtggtgtttattttattttttgaaatctgaattaattgcataatttattcgtttaattttctgccaacaaaaagcaaactttattaaaatttataaatgcaattttagctgaaagaatacttatatttataaatatgtatgttacttacaaagtttttatgtcggtctgattggtaaccaaaaattgtacaagttttttagctgttagttggagttgttcgctttatcggaatagtgcaaagctgaagaagttgtataagaaagttgttagaaagagctgtataagaaagctgtaaaaaaaactgagaataaaactttttgtaacactttaataaagtttttgtgattaataactgtcaaagttatacaaaattgtatttctattatagtggttaccattcaaactcgtcgaatgtgcaataatttattggttattgctttgatactttgttttgatctatagtaatttctcatgaaagtatctagagtttttagcattaaaatagagaaatttgtagatgaaattaagtagtttctaaaacattggctaattaagttttgaaaactattgtctactttgctaaatttcgttttacttacttctatttcacgtaagttcggataagatagtcggactaatcctcatttagatatatacaagaaactatggatcgtttactttaagtatcgcactaatatcttctctaagtgtgggtgcttgctagcttgctgcttgggcgtgcgagtgtgaagtctagtattttgcaactttatgacttaactaacatttgaacttgccaacttggtttagtttaagtggctatctaattttatttcaattaacacatgcagtggaaatgtttgatgtcacagaagaaaataaaataactaatgactagcatccaaaatttatagtgatccatgtgataagatcaaccaaatgtttgtagcccatgatttttttattggtcgacaccaatattttttttttagttggattgacaggtttaatcagaattgacctaacccaacaaccaaatcaaagaagtagtggtaacatatattcttgtggcaagcattatctacgagattgaaaatgtgagtaatagtggatcatgacatgtttagtatgtctccagtaaacatgtattgcagaattggatcaacggcaagggacacgagtggtgatattaggatcaagacatgaaaacctatcaatattgataaaaaaaacaagaaaatgaaagatataaaatcactgaaaacatacatacatttcaaatgaaatcaaaaatatcatcaacaataaaactgtgttattattattaaaaaaaaaaaaaaaaaaattgtgttccgatcgttttgccgtttaagtcgctcttattactctataaatagtacacttcttttgtcatatagaagacaaatcaatcaagcaaaattttgtcttaaaacaaaaatctttaatcaatagtaataattttctaaattcttaataggtgcaaattctgcaagcaaaaatggagaaagtcaaattctttgcaattatctttacggtgtcaatggttatgacaatggtttcggcggaagagttaccggtgaaagtgacgggcaatgagatgactcttgcggcggaggctgccgcttcgagtttcaaaagcagcgccggagaggctgctcaaggagccaagtcatgggctgattgggctactagcaaaatcaggtaatttttattcttgtttgtttattctctaacatcaaaattttttgtggaaaaacaataattaaataacttctacttgcacccaagaacaaaaacaatctttatttttcaaatttgttgttagatttcaatccacctgacttagttttagtcttttagattctatttatgttttgactctcgtatgtgaatttatattttatttcagcaacataatttggaatttttagaattctgtatgattattgacttgtaaaggaatttattagtttttaaactagggttccaaaatgttaactatagttcgtttattgaaaaacaatgtcggctatctggtgattattacaatttctttcaatcagggttaataggttttaagtgaatttttggtttttgacattttgtttctttcaaatctattttctcaccacttaagagttttaaaaatagtttttcaccataatcactttttcaacccaaaaaaaaaaaaaaaaattgttatcaatattcggaagaatcaattatggatttgctattttttttatggtatttatagattttgccttttttgaatagtttgtggattttgctctttttcaagatatagaaatgtgatttaacatgtattttattcgttatgttcggatttaatcgattgcattgtacatatttttacaaaaacaaatcttaaatacatacgtttttaagtgttaaaatggcatatcaagaagattttagtaagaatagcaatttcaaaagatttggatgaaaaatggcaaaatcaacaatgatcctttcattcattattaacggattatgaatataaattttcatgttttataaaatgatgttcaagcttggttgatctgatggactattctcaattcatcatggttccataatctatatatacatttttgctgccatttttgtgaaataaatcctggagttgaaacttatttacaatggctgtcactagcttattcaatgcgaaaattaactaccaaatcaaagcaaatcttattcaaaagaatatatatgctcttattccatggcctaattatttttgccaaaatggttaaaatatttaaaaattaaataattatttgaaagaaaactttaaattgatttaaattataaatcttttaataaaaatattattaaaaaaaatcatttcaccgaacatgattagagagtaggactagatggtaggacgtgtttataatattataatatagaaactttataacaattaaataactatttgaaagaaaacttttaaattgatttgaattaaatattttttaaattaaagtattattaaaacaaaaataacaaaataatgtctaattttactgaacggggttagtggtaggacgggtttggtcgatagtattacgagacggtataccacaagtgaaatccattagatatgtttaatttcattgtgcaggattagatggtacgacggattttgatcgataataatacgaaacgatatattacggatgaaatcctagatataacaattaaaatctatatatacattatcttaaacactaaacaaaacaaacaatattaataaaacaaatatctacatatacattttatataacaaattttattaaaaacctagccccgcggtataccgcgggtcaaaatctagtacaatacatggcatggactaatttattcatcatcaactaattttgaactcaaaaactcataattcttaaacttttcgaaatctcgaaaaatatacccatagttaccatttatcgtattcatttgacaatcactaaccacttttaatgctttgttttaaaggcatcttggcagcttggagaaaacacccggatcagattgaaaatcatcgaaagtttttttagtaaacatttatctcaagaatatgcataaatgtttatgaagaaaaaaatatgtaaacagttctgttgcattcacttgtaccttattgaaactcttatttgtattaagacttttttccagtaatgctaacatgtaatttaaagacactactaaccctaatttaagttgagaaaaaaaaaaaaaattacaacttaaatcttattgtagcttcaagttttctaataatcaatgttttaattgcaatttggtacatatcatttctaatttaaactagactaagcacatcatcattaatactaatggatcttctgcctgacccttgactcagaagacatgtttattgcaaaacaaagagaccaataatcctttctctcgatgaacaatgtgtccaaagttcttcttctacatacctcaaagaacacagagacaaatgacaagatcgaacaacggattcatctatcggtctatggataacaagatcccattgctttcgattactttcttccacgggttagcctctgcaaatggtagttaatgttaccccaagacttgttcttatgatccgactgcaaagcaagcaagaaaacaaaacaaagttcatcgttttcgcaaaaggcagtgacgaataaaagtataaaacgcagtagcaaaatgcaaagatattaacctggccttgcatacaaacactcaggagttgcttctgtttctcacatttatcatctttgatattgttaagagccatacagttcaagaacgataccatttccttcatacacggtttcgccaaattcccgagctttttcgggtttatgtacaaatttccagcctttctccccattatagctctctcaactaactaaagaaccagaaaccataaaaaaaaaaaacagtagtaaatcaaatctgcagcatcatatcaagtttcccacaaagctacccttaccctgaatacactcatatatcacattttcgtcgacagattcaatcctaggcctttaaacaacaagagaaagtaagaacattgagattaacccacgaaacactaacaattatacatttctatgacgttgagaagtttgtagaaaccatatgagaagataaaacaaatgatgaacacacttaaagacccaagatcggaatcaacatcaaagccaaaatcaaagaagaattaaacatacaaatggtctcagatccgaacatagaacgaaatcgaatctaattgggcaaatcaaaaatcgcagaatcgaagcaaaacgaacaaacacaaaatctaatcagagagaaatggggaacgaagcacttacaaagatttctgagagacgacgagacgagagaaatggtgaatcgcagattgagaaacgagagagagaagcttcgaaattacaaaacccttagacccaacaaaaaaaataataatattaaaccctattattattaaagcccattgggctttgagcccagtaaagaatccgatcattgaaaatacttttctagtattctttggttttggttagaatcattcatcaatcatcacacttaaaaggtgacaggatgaattatctacaagatcattagaactttttttagtccctaaaaggtgattagtaagataattatggtttttagtagactatcgaatcgacaatactatttgatattctaaattaaagtttcataaatatgttctgactctaaaaatgtttttaagcgctaaatgtttttatgctaagtgctaacttcttatagtcgtaatcggcttatgctcataatcacttagactagggaatctgttaaaataattagtcctttattaactgtatttacatagttattgatagtatgtattattgaagctttgcttcttctagggttctaaactagtaatagtctcctttgatgaattcattcaaacgtttgagctctccattttgatggtccacaatggctttaaccacatcaaccatagagatcagtcccactatctttccgtcaatcaccggtacatgccttatgtgattctctacatcatttaaaaaaaacacaattttcttttgtcaatttcaaaacataatttacaatttggattagatatatatatatatatatatgtaagtatatatagtaaattacctgacataagctgcattgctttgattatgtttgtcccagatgaaacagtaaccaacttgctctggccaaaatcatttccaattcttttacttaaaattacgaaaatttacaaaatgaaaaattaacttgagagttttatcttttgtttattctgacctcgtctgtcataacttctccaacttttgtaagctttgatgatcttcctgccccaatgatctttttcatatagtctgtttcattttgtgatgataattagtcacaaaatgaagaacccttcttaataaattgtgtgttttaactgttaactacaacattcaaggtattgggtgatcatattcataactccttttttttggtatttttccgtagaaagaacattattaaagaaagctt

SEQ ID NO: 24 - DNA, 97154 bp, Arabidopsis thaliana
aagcttagctaacgactattataatcaaggacgctattaacccattaactatagagtgattttgatgatcgacctgtagtctccatggatgaggattgcaaaatgccaccgttcacaataattttgaagatctgaataatcagatttcatggcaatgtagtctggatctaggtacggttgatctaatattgttgcttgggttccaaggaacaaccaagacaatatggccgtgactcgtctcattgaacctgatataatctcctcgataagtccatgtttgcacattgcacatctactcctcttgttacttacatgtttatcaaacgacacatgcatgttaatgctgatgttttcttattaaattaatcaagaatgtaatattgcattcactaaacaataactttaaaaaaaaaaaaaaaaacttttctattattcagcaacaatgtggaaaatggaaaaccgaaaacatattaaaacctatgaactaactttttattgtaagtctttggtttcctgatagttcaaaacatgatattttattatacataaaacttgatttcatcaaatacaacaaattatttattatttgaaatacaacaaattatttatgaacataacaacaatgcgttaaggaaggacgatgatcgatgagtgacttaacgagttctggtgctctgttgcttgttgcggccaaaattattcatgaaccactcatgcttgtatgaagccatatccagtccaaatacaactccaggtgcaaagcctaaacctgctgctacccaactcagtgattcttcttcttcattagtctccagcggttcaggttgcggtggtgttgacgctttccaaggaccactcttcatcacgtccaggtctctcaaatatttttttgggattcaataataacttcaccggagagatacctcagtcaatatgtggactcaactctctatacgccctagatctattagacaacaatctccacggctcaattcctcagtgtttagagactctgatgatgagttctcttttgtatcgtcccatgactttagcctctcacaaatttagttggcatctggatcatatgatactgcggatatcaacactttagaagcgggttggcaggtttggggtagacattaatattgtaaactccagatctcaacatttgttttttggactcttatttataatgatttttgtattcttatattttaagagaaattccattgtttcttaatatcaactgttgttgtggctagcttagatctttccagtaatataatgtcttctcaatttcgtcgacttgctattattttgtgctatgaaagttaaatcaattatttttcgtattaaatcataggaaaatgaagagtttgaactcactaatgatgtccttatcatgagtcagttcttcattcaacttggagtttcaattatcccagtttctactatttacgtaagtaataaactcttggttttatttatttctcattttttttgttacatatacaaatgcaattatgcaaaattagtttaattgttttgactttctttttgtttgaaaagagcctcaacggagatgtgattgattgtattatccgagcggatcaaccgaccttcgatcactaactcctgcaaaactatataattcaagcatttgttaactagaataagttatgtaggaatatctccttggaatagtacgaatggggaaagacgtacagaaaaattggcaagtgtgccacgagaccggagaagagtgtccggcgaggacgattctgtatgagaatggatctgtttctcacaaaagcatcgtccaaaggttccaaacaaacactaggtctccaacaaagccattgtcggacacaagattatcgttgttatgttatatgtacttttgtttttgtttactcagccaatattatgaaaaacactttaagacaatattgcaaataaaaatacataattacacttcaacatctttataatagacaaaaaaataacatttgggccgacaagtttaatagcccatggtctatggttttctactatgactttacaatattatatttagatccaaaaatgaaataacatacaactttgaaatcttacataaatatgggcttgacaaaaatttaacttttggctgaagacaatacttttatttttttcaccctatccatttgattgttagaagtatttgtttaaaatcttaactttgactatgtgaattttgtttgtcagtttttaaagaaattttacttatgttatgctcatttcttgcttttttttgcttaatttttgcttacttttgatcaatttgtttctcttgattatttaaattatttcaataaacatgatatattaatagatgcgtagtcactatattaatagcctatcaggtttggattttcgtacaatctaatggactctcagctgggtatcagatgaacactgcttggaaattctccaaataggttacagtcttcaagatttagccatcttagagactacatgtttgaaaattcatgggagatttatgaataaatgtttacgaaactcatatccaattctctaaggtttctcaagtttcgagcaagtagatgaagaaaagaattataaattgatagaggcatgtaaaaatagcccaaagaagaaagatggagagacaacaacttggttagctgaagaagcttggttggaattttgttctgaaagtgaagaccaaaagaggtcaagtctttcttgttagaaacttaagtctccaaaacagaaacagagtaaaacagagagaaaatcaacttcgtattgatcgtgatcaatacgtaacttgaatgaaaaagaacttctgttttattcaatagaaaagacaaaatgaacaacttgtgttccagtaatacaacttatatttaaatagacttcaatcgggtttgaaagttaagagatgcaactcttctttcttgtgacccttaagacataactgtctaaacttaatagacacgactctttaaccaaacacacactttgacttaacatacataattacttatataattattagacatactaaactcaattatcgatcaacatttctaaccccacaagtttatcaaactgagctgggattggcgaaccggaaaaattgttgtaaccaaggttcagatcacgcaggtgacgaagtctaaaaagactactattggatttgagcttgccatggaggaagtcgtcactaaggtctagcccaatcactttgcctgacttagcatcacacgccatcccaagaataacaatcactttaaatcaacccaagtagttttctggatcaaacactctttcttgaactcaagaagagcatccctttggtcagaatcacacaagtgttgtgtagatgaaacaaaagtgtttagaaaaacttgaaacgaggagtaggaaacaaatggaacgaaggatgaacctcattttctgattagataagaaagcttcaatatttttgaagaaaaaaaggaagttatcgagtagtgatggtaaattagtgttgtagatatatataaaaaaaacaaacgcctgaagctccattgacttgatgatttgaagtcttttagattgcgactactaaactcgtccttgacgccaaatgggcaatcatgtttaaaattttagaaacgaagaacaaaactcgttctcagtgagcaaagtaaatttgagtttagtgagggcaagtagaaaaatctatgtcccgtgtatattaagaccattttcatcggttagaaactcaattatataaaataatattagttttattaattttttattatttatttttgaaccaatcagaatgaaacaattttaaaaatgagtatccataagtttctctcctatcttttcctttttctaatttttcattttattttttagaatttctttctcctatataaattctcaatggagatgctctaaactagtcattcaacttcacatgagactcacctatggcattttcccataaaatgcttacctatgggatacgggctttgccctgatgaatcccctaatgatttttatcaaaatcattaagttaaggtagatacacatcttgtcatatgatcaaatggtttcgccaaaaatcaataatcagacaacaaaatgtgcgaactcgatattttacacgactctctttaccaattctgccccgaattacacttaaaacgactcaacagcttaacgttggcttgccacgccttacttgactgtaaaactctcactcttaccgaacttggccgtaacctgccaaccaaagcgagaacaaaacataacatcaaacgaatcgaccgattgttaggtaatcgtcacctccacaaagagcgactcgctgtataccgttggcatgctagctttatctgttcgggcaatacgatgcccattgtacttgttgactggtctgatatccgtgagcaaaaacggcttatggtattgcgagcttcagtcgcactacacggtcgttctgttactctttatgagaaagcgttcccgctttcagagcaatgttcaaagaaagctcatgaccaatttctagccgaccttgcgagcattctaccgagtaacaccacaccgctcattgtcagtgatgctggctttaaagtgccatggtataaatccgttgagaagctgggttggtactggttaagtcgagtaagaggaaaagtacaatatgcagacctaggagcggaaaactggaaacctatcagcaacttacatgatatgtcatctagtcactcaaagactttaggctataagaggctgactaaaagcaatccaatctcatgccaaattctattgtataaatctcgctctaaaggccgaaaaaatcagcgctcgacacggactcattgtcaccacccgtcacctaaaatctactcagcgtcggcaaaggagccatggattctagcaactaacttacctgttgaaattcgaacacccaaacaacttgttaatatctattcgaagcgaatgcagattgaagaaaccttccgagacttgaaaagtcctgcctacggactaggcctacgccatagccgaacgagcagctcagagcgttttgatatcatgctgctaatcgccctgatgcttcaactaacatgttggcttgcgggcgttcatgctcagaaacaaggttgggacaagcacttccaggctaacacagtcagaaatcgaaacgtactctcaacagttcgcttaggcatggaagttttgcggcattctggctacacaataacaagggaagacttactcgtggctgcaaccctactagctcaaaatttattcacacatggttacgctttggggaaattatgaggggatctctcagggctttgccttccatgcctaatttggcccaaacaaagattaattaagtcaaacaagttgctaacatggaaaaacagcccatcagaacaatgacccatcatggcaacggctcggcccaacaaaaattctgcttggcccagtgatatatcagctcggcccatcttggttcggcttaactcgacatattcgaagggataaaaaggagaaatcgcaagagagacaaaggaaattttaggtcacctataatagtagaagacactattgagaaaagggattcagacttaaagttattattcgtagaatttaagagagaattgttgtctagctctttatcttttactttctggttttccgttctgtacgttcggttctctgttctgtattttcaggtttctcattctgtacgttcggttctccgttttgtccttttggttctccattatatatttcctgattttccgttatgtactttcggttctccgttctgcatttttggtttttcgttctgtaattttattgttctccttcatcgttaataaaaaatctactccgttctcctcaaactccttagttacttattgttaaaacctcggtacaaacattaccaagttgtcctctgtccaattccaacctagaagaaacgtcaacattgcatttttaaagtttgaatatgagccaaaaacaaaaacaaaaaaggagcaaaactgacttggcgaggtagaaaatttttgttcactacctcttcttctatgatgtatcaacgaatctgctctataccttctcttatttgacaggctatatttgagttttgcttctattccaataatgcttagccatgattttcaacaataaaattaccataaaagtttgtatataaaaaaaaatcaagaatctcggtcaaaacgatattgttgtagtgaactgagccatttgtttgggaatcgtttgagatggtagtcagcggcaaaacgacgttgttcgatgttcttgatttttgagtcgctttcaatcttctcgtgtgtgggtgagtttatatagcagaattatatccaacaatgtatattaggaaaattatcctctgaaaggcattcctttttttttagggtacgttttactgttttaggcagttacttctaggcaagagttatgccatttaacgaaaagtattgcttgggatccaaacaagcaccatatttagggatccaccaagatatcaatgtccaatgtggtcatgattaactcatgaatgacatcaaacatgatatgatctaactcatgaatgacatcaagctttgtaaagttgatacttcttttccacaagatatttttctctactagcgttcaagacttcgagctttgaaactaaatgtaacaagatgagagattaactagttttcaatttggaaccattcgttttttgacatgattctgacagaagtaacgtttgatattgtccaaatcaggtggttcgtaaatgatgctttgtttctgtttgaacatgcaaattgtaacctatggacccaaagtgtcaaaaagattaatttcaaagttcattataaacacatgttacaaaaacagatgtatgcattgacatgcaaaaggccattaagtataattatatatctaattagagtacaagttttttcacataattgccacatcccttgaatgaccttaaaatattgcatcttttatttttataaggaaaaaaatctattaggatttcaggctcaaaaggggtagtaaaatgtaacagaaaattcatcctcatcctagtaattgggaatttgaggtttcaaacaactttgtttctcagctgttgaagttgctccataaatctgtgaggctcacctctgcatctgactcgaaccagtaatctgcttttaactggcaatacacaaccaaaaattcaacttaatcgcaacatacgaaatgcgagactgatcccaaaacccatatcagtggatctaaatacttacatcagtatctgaagttactattttcaaggaaggagtgtctactccaactggagctttttgatcagactcattacccaacttgtcgcttgtttccgcactgtctcctttgtatttgctgcgatcatgtttgttcccagttattaacactgactgacaaatatatagataagaccagacacagagagtggaatgtgtaactaagtaccttaaaagatagacatcaatcggccccattctactcctaatcaccatccggtactgttgcggaaaactcatctatcgtgaacaaaaacagatgctttactttgtgacacattatattacaactgtacagcaaatatgaaagcattaaaaacgctcacctcatcaggatctggaacttcgatgtaactagctgtaggagctttaattgctagtaatgtctggttctgtataaggactaccagtttagtatgttaaataactgaggaaaacataagatgattttcaagaactagttggggaggacctgaaaccgtgggagactcgttatatcttcctccgtcataaacatgtacctgtttatttccatcattgatcttagcaacactctcgtgtatatacaaaaagatgaaactcaaataaactgacgaataccttctacagtagtcatcttcctccaaggatctgagagcttcttgtcgttccctggagatacataacatgatgatcttcaaaccatgtgggaaaggaacaatggataagtctccaaacataatataagaacacaagcaaccaaccttataagatcatccaacctgctttcctcagattgcatactctctacttctgactgaaaatacgtagatatgtaaccggtcagtaatggggaatttgaaaataactgtgtgaaataaactataagacagaaaaataatgaaatcatgaatttgacagattatttgcatagcagtaagttctacgacaaagaaaacacgtgaaaatgcttgtcacaatgaaccttaagcctagaaatttgatctcccaggtccttttgtccaagattgtcagcacccctgcatcaatagcgcatacacaaagtcagacgaactcaagctatatacgctgcaatgtatccaagaaagaaaaaatttgtgtacttacttccagcggatatgattctttgtagttttctctatcaatccaattccttcaaggacatttgtaatatcatatatccttcttttttgtacctgttaagagggatcgcaggaacacgtaagcacataagaggagatcctaacaagctgatgaagataactagggagatatcaaacagttaaggcaagggttataaaggtgagtgatctttttagtccacgttcttaattagatcttctacgagttgagacatacatttttaacttaaatattaagatacatttagcatacctccaaaacaactgcacaatagttaaggtcaagtgttccatcctcagcttcctggatcaacttcacgaatttttttgtcaacaaccctatcaaacaaaagagacaccgatacaattacagttgttatctccatacaaacatgaaccttagtaaacagaactattagttacctaaagaactgtcataacggcagttaatactagctccatttaagccaccattttgcacttctgcacaaaaaaactcattcacaacaatgctgaatacaaacagattcttattttcaatacatatcacattctaagagctagccaaagagattgatcagaaaaagcagataccgccattcgccattcgtttcccagcctttaacagtttagtaccaccctttgacttgttgtatacacgtttaacattttgaggagacgactcttgtttcactattactttagctatatctatgctttctcctccagacatgttggcaatagatccaagctgaattcgatgattctttctactcttctgctgcaaattaagaaaagatcaactcaatagcattacaatcaccaaaacgaatctaaattcgcaaattgagattagagaattgaaagctagagatccaattttggattaagtttcccttaatgaaaccaaacttcattcaatttttgttttcgcgaaatttgggaatcagaattaaacctagctatcgcaaaatcaagttcggaaatggaatcaaaatcaaagaaggaatctacgaggacttgagtaaacgaagagactcacaactttctgagtgatttgagagtaagaatcgtcccagtgaggtgaaattagaggagacagttgtgaattcggaagcgattgagagactgagaaaggtcgattcgttgaagaaggagttagagaagagtaacgaggatcagaggaagagatagattgaagtaattcgaagcgaaaaggagatcggtgatggtaagagagagtcggatcttcgcctgagtttgatgtcgcggccatgtaacggcggtgtatctccggtggtagagaagatgggatttagagtgattttttgaagcgattttggagaatcgtgatttaggtttttgtgggggaagatgaagaaggagaagagggaagatggagaaaaagatggagagagaagagaggaaacagcgggaagaagaggaagggtaaaagtgtctttttgttgtattaaaaagattaatataagaaagaaatattggaattatgttaaaagagcggtgggcgaaagaagttggagagagtttcgaattctgcctaagccccgcctaacttcttccgcttattattttactcttttgactatttgttgggcttggtcttgggcttggtcttgggcttgaattgggcttaataatgttacgacgtttacatatcttctagagcttcatactttgtagctttatgttaatgatcgacattcatggttcacgaatctataaatacggagtctcggcattgctagattgagtttacaggggagtcctaatctccgaggtccatctgcaccaataaactctatgaacggcccaaatttggtccagttatcataccaaaaagtagtttagagttcatggtctttgccaaaaggtagaaattagaatgaatttctaaacccatgattcattttgtttctctggtatcatttttctagctttttttctttaatattttcataaaaacaattgaagaatgaagagtgcttctgcatagttgagtacttgagtaagtgatatctaattaatatcaaattatgtgaaaattataccatcttttatgaagtcgtactatatatgtatatatgtttttttgtctatcttaatatatgtttatgggtctgattggtaaccaaaagttgttaactctactacaggtattaagctgtacaataaactaagagtaaaactttgtaacgcttagtaccgttttgtaaagtggttaccaatcaaaacctatattaggttataaggaagcgatgggtgcattgacgacaaacacacaaacttggtgtatagcgctacacaagggactgttttttttttcattgtattattaccaattgcatcatgtaacaaaaataggaattcaaaatactgaattaattaatcatgattttgaataaacaaaacatattaaaggaatgtaaatataattgagttatttcaaagagttttcgtatcgcataagtttgataccttaacttgttttcgtaaaactggacaaatatgacgagaaaaaatcccttcatgatatcatgatggcttaaatcaacgtaatttccattagtttagatctgagagactgaaacattggtgtaccaaacaatgtaaaacacacattttcgtccctatggcatgtgacaactttttagccaaaaaaaagaaagagtattttatttagaaaaatatttgtgaagacatattatccacatttttaaaatttattgtagccatggatcagaaaaattatattatattttagtttaactgtgacaaacaaacaaaacaagattatccatataaatgtaagttcgtctagatattcatacagaaaaagtttgtctagttgcatttttgttgtcctaaatttcaagtgcactaacgcgaaatctacttcacttgtcatggtgcagtaagaaaaaaacagtaaataaaaaatgaaaaaaatatggaaacactaaaaaagaatttacaatagtcgatagcatttttatttgtttactttggttccttttttctacttttatacaaaagaaaaggtgaggaggaatttatagcctctaaaagtgatcttacaagttatctaacgttgtttttttggtaagaagttatttttattataactcctaccatttaggtaattaacttccttaggcttaagagttttctacaactattagattttaacccgtagtacaccatgaagatttttttttttaaaattagtatatataaaagtttgaaaattatatctatctataaaatatttttattttatattttataattcttattaagtaacgttcttccaaacccgtctcgccaaacctgtcctataaaaaaaaaagacgtacaccgctaatttaaataaataattaaaataaatattttacaggattgcaattgtattttagtttgttaaacaaatttttgttttaaatagttgtcaaaatctagttcaaattttggagaaataagatttagtgaattgataagaaatgtatttaggtgtgttttgctcattttaagagattgcaattgtattttggtttgtcaaatattttttgttttaaatagttgccgaaatctagtttaaattttggagaaatctgcgtgatatatggattggaatacatttggaatatttttcgtttgttaatcaatttattgccagaaaaaacaataattaaaagccagtggcaacaattgtaaataagttctaactacaggatttattttacaaaatagctgcaaaaaaatgtagatataataatatttactactatatatttttccgtatcctacattaatattagtgaagctttgaaatcattatagaagttcatcaattagacctcttttgaattgaattcagttttgattattgggatcattgatttataactactcttgactcaatatagtgcgttggaaaaattatgtatttgtaattgttcgcatagtcgttgttagacaaatatcctacataacttttctttttccgctccgtggaacgaagtggacacatgtataaatgcatgtacattagtggccggcatgtgtgcgtatttgttgtataatacattacaaaaataaacataagtatatacggaaaagggatctacgttgagagagtagaggacaaagcgaataaaggtaagacatgtgagagaagaggccatgttttgcggcaatatcacgagggccactatgtgtaactttatgatctcgatgtttatgtgctgatgtcttggcttctcctacttgaactttagcttctaccgcaccttctactccgagtatcttatacttttttctttatcaccaaagactttttaggcattaccaaaaaaaaaaaacattaggtatattttggaccatttaaaaaaacatttcaagttttatatatcgaactattaacaacacaggagaacctatattttcaaccattacatttttattatgataaagattttgaacttttaatttccatgtcacatttcccttttgaatattatggatcagtcatacatatataagtatgcaattactactagtctaatttggtctaattagataataagtattgagcatatcatatttatatagtgaaatactggataatattaagatttactcatttcttacaagctagatttatataatttcaattagatggggagtgagaacttatgtacactaatataacatttcagtcatatacagtacatgttcaccatgtctttatatggcataatatactcttgaatatcaagctagctggtaaagtacgtttacccttttgattttaatagaaagtaactttaaagtcgttcgcaaatgatgaataagataaggataatatgtgatgaaaataccgagttgcatgcatgtatttgcaataaactaaagtactgttccgtatatgtttagccagtttcactttagtataattccatgattttttgggtcaattttgatttttagcatacaaatatatttataatgctataaaacttgaaatgtttagtggagagcttgagtaatcgtctatatagtttgtagatactggtgcagtttttctgtatttattgaagtcaattagttgatatattcttatagataaattctgtgaaaatttgataaaacattgctggtacattgaagacattatccacaaagactaattattaggtaatcaaggagagtgatctcccacaattgtttttcattgtccaaaaaaaaaaaaaaaaattctattattacttttctaaatctaaagttgtgagataattttggatttatttttttctaaggtaagtttggaaaacaaatcttactgatatgctaattcaatttagacttctttagggtatttggagtactttaggggatactgtctttgcattagtcctaagaacatggagaaacaagaagacaaacataaaggtggccaactccactacataactaatatgcatacgtttttaaaataatcaaagaatcatataaatgtttgcagttgatatcacctactccaataataatcaattaatttttatatattacgacgagtgtatacgccattatacaccaaaatctaaatctggatctgtgtcaacattttgtatggttggatgcaagtaaaaaaccatcaaatactatatgcttatgactattaaataaatattgcatcaaagtgtacgttaaaaataaaccaaactctatatatatgtatggattagttataagaagagtttgatcccactcgatcactttttcttctcggatcctttcccaccaaaaacacaagcaaaacaacaaagactctctatctatcttctctttcttctttatcgtttattctatatattaacgacattgtaatctaatttgcactgtcttcaacattctctttttctatggctcctctccctttcataccggaacaaacccgttcgcaaacgcgtttatcttcagacacaaagaagaagaacagaaacaagaaaacgtcccaaccaccgcctcaaacgcaaaagataaagcagaagacggtaccatcaacatcatcatcgtcgtcatggagccagataaagaaccttttgagttgcaaacaaatcgaagggccacgagtgcacgaaccatcaaagattacgtcatcatcttgtggctcctctctttgtaagtttagtgatgttatttacggtaatgcccgtgtgattcaccgctccgatcactcccctgagagtagcaatcttggacaagatacccggttgttgacccgaaaacccattagtacccgtggatcttcttcatcggttagatccaacggttgtggcgcttacacgtcatattcaacttccaaagctatgcacttcagaaacctctcaggttgctatgagtgtcacatgattgttgatccaagcaggttcttgatatttttatcttactttaaatatgaataattattatgtgaaatacttgcatctcatattacaaagaaaaataagagagattaatagttaataatgcttcgtttatataattaggtatccaatagcaccaagaatatgtgcatgtccacagtgtggggaggtcttccctaagcttgaatcattggagcatcatcaagcagttcgtcacgctggtatgcatcacttaattgtatatatctttttgtatgaaagtagtaaaacttgtatatatattacatttgataacatagatcaaaatccataaaaatatgtgggcactagtaggtattatgccgttatacatcagacataaaaaaaaattcttctttctaaggcaatttttaaaatctatttccccttttggatcagacataaaaaaaaaagttgataaagcagacatataaagttcaatttaactcaaacctgttttggtttaattaacacaaatcttttatcaaaaataaaattttgatttgtatcctcttttggatttttctttttgattacttttgaaataattaaataatgtaagcaattgtccgtcttttagttttctttatctcgtaattggggccataaatctggcatgtcctgtcgttgtttttggatttatgtttttttttccttcagccatttttggatatgtatttagttatgtacagcagcagcatacgtatattattattacagattcattgtacaaaaattataatatcttagctcgaaatcacatattaggtgacaaacaacatcattaatctatcactctataatggttctgatttttcttttctctaggggttttaaaatattaatttcaaccaaaaaaagaaataacggtttagtggcttttccaaatatattttggaatttgcagatatagtagtgaactagcttggaaagaaaaacagcctaatcatacttaaccaaaatgatattcagtttttatttatatggatatagagcaaatgaaatataattgaagaaaaacaaaaccaaaaccaaaccaaatgaaaatatatatgataagcttttagtctttttttccctttgttaaaaggcttttatactcttattagatggattaatcatacggaaatttatatcgaccatgtaatattatttcaaataaaaacgttttgtaatgattttgtagaataatttatgattcttggattccttctagttgtggtgaatttaaggatatccatctctgatctctatatcgacaaaaaaaaaaaacctatgtgaagatgtttttgtaatgtagttaattttgattacagtgtcggagttggggccagaggattcagggagaaacatagtggacatcatcttcaaatctagctggttacgtaaagacagtcccatctacaagatcgaacggatattaaaagtccacaacactcaacgaacgatccaacggtttgaagattgtcgcgacgcagtcaagtcccatgcacatgcctctaccagaaaagaggctcggtccgccgccgacggcaacgagcttctccgcttccactgcaccacagtttcttgctccctcggctcacgcggctcgacctccatttgctccgccatccctggctgccgcgtttgcaccattatccgccatggcttccacgccaaaacggtacgtgtaggcaatggtgaaggaaaagaggagattaagggcgtgaggaccactgcaagcagtggaagagcacacgatgcgttgaggtgttttgaccagcggagggcgatgcttgtttgccgtgtgatcgcgggaagagtgaggcgcgtgcagagtgatgtgccggaagatgaaagtggttctggctcgtatgattcggttgcgggggccgctggggtctacacaaaccttgacgacttggttgtgtataatccaaaagctatacttccttgctttgtagttatctacaaagtctccgagccttaaaaagttgcactttacacgatttggatttgtaagtttgttagtggaatgtgtgaagtagtggattgtaatatttaggaaaaaaagtttagcatattaattgtgtagattcatggcctagtcaagagtgaaagattcgttgtggtgtggcctagtcaagagtgaaagattcgtgtttttttttttttttcatctatgatttcgatttgacctatattacaaaatacgacactttctaacgttgactttttaatatcatgctttcgattgattaaacacatatgatccactaggatggctctaaatttgccatagaaagagcaaattaagttgcataaagaagggaaatgtgtatgatcttgctggcaaccttgattttcagggaatgacagttgaagagttgcaaaacttgatgtcctttagatgctctgcaacagatcaggatatgttgactagagaggtaacatccgaagaaaatcaaaaagtgttgtttgcgatgccaagtaacaagtttccgggtcctgacggttacacaagtgagttctttaaagcgacttggtcaatcactggtcaagacttcatcgctgcaatcaaatcttttttcatcaaaggtttccttcctaaagggctcaatgcaacaatcctagcgctcataccgaaaaaagatgaagctaccttgatgcgagattaccgtcccatttcatgttgtaacgtgatttacaaggtaatctctaaaattatagctaatcgtcttaaagtcatgctgccaacctttatcctccaaaatcaatctgcatttgttagagaaaggctcttgatagaaaatgttcttttggctacggagttagtcaaggactaccacaaagattcaatctctcctcgttgtgcgatgaaaatcgatatatcgaaagcatttgattctgtacaatggcaattcctgttgaacacgttagaagctcttaatttcccggaaaatttttgtcattggataaaactctgtatctcgacagccactttctctgtccaagttaacggcgagctggcgggtttctttggtagtaagagaggcctgagacaaggttgtgctctctctccatacctgtttgttatatgcatgaatgttctgtctcatatgattgatgtagctgcagttcaccgaaacattggctatcaccctaaatgcaagaaactcagcctaactcacttatgttttgcggatgacttaatggtgttcattgatgggcagcagagatcagttgaaggagttatcaatattttcaaggagtttgcgggtaaatcagggctgcacataagtttggagaaatcgaccctttatcttgctggagtttcggagctaaatagaaataacattctctccgctttcccgttcgctagtggtcagttaccggttcgttatttgggacttcctcttctaacgaaacagatgactactgcggactattcgcctcttcttgacaaagtgagatcaaagataagctcttggacagctcgttccctctcctatgcgggacgtctagctcttatcaattccgtgattgtaagtttgtcaaatttttggatgtctgcatataggctgccagcaggatgtataaaagagattgagaagctatgttctgctttcttgtggtctggaccggagcttaaccccaagaaagcaaaaataacatggacttcgctatgtaaactgaaacaagaaggaggattgggtatcaaatctctcttggaagcaaataaagttagttgtttgaagctgatttggagactcgtttctcggcagtcttctttgtgggttaattgggtttggacttatattattcggaagggctcattctggtccgcaaatgatcgttctagtctggggtcttggatgtggaagaagttgcttaagtacagagatgtggctaaatctatgtgtaaggttgagataaaaagtggcagctctacttcgttctggtatgataattggtcacagctagggcaactggttgatgttacaaatgctcgtagaacaatagacatggggataccgttagcagctactgtcgcgactgttttggcttctcacaggaccaaacaccatcgtactgcaatctacaacaagatagaggcagagattcagagtattcttcaacgagagagatcaggggcaccagacatttttctgtggcgatcctcaggtgataatttcagacaaagtttcataacaaaagtcacttggcacaacatccgggttattcacacgcataggcaatggtataagggtgtttggttctcatacaacacacccaaatactctttcctgttgtggcttgcgatccatgatagattatccacgggtgatcggatcaaaaagtggaattccggacaacaagtcaattgcgttctctgcggcaacgtcgaagaatcaagaaatcacttattcttctcttgccattacaccactgcaatttgggataatctaacaaggcgtctcctatctcatgagtactcaactgactgggaccgcctattagctctactctgcagctccacaatgtcaaaggactctctctttctgtttcgctacgtcttccaagcatctctctatcacgtctggcgagaaagaaatgcacgacgtcacggagaagcacattccaccaccactagactcatcaaactcatcgacaaaaccgtgcgaaatagaatcagctctataaacgacgttggtgaccatagctacgacaactgccttaggttatggctctccacgcgtctcccctcatgatctacttccctcagcttcatttttgttttttttttttttttcagaccttttctacacctctatctattttcactctaaaatttctgagaaacagatgcatcttttgtaataacgtttttttgtttgaatataaattttacattctttcaaaaagaaaaaaaccttgatagatccaaagtttgggtatccatcaccaatctcatgtttcaacttggcattcttggcttggctatccaccatcactttctattttacaaaagatgatttctaaattttatttaactatttttgattctttgtcaaagccaatctctttcattgattgcttaacaaataaaagtcataaattatccttcactgaatcttcaataaacaccatttgtcctcttgaatacttgattttatgatgacgctttatagtcatcgccatattccaaaaaaattcccatgacattattccgattacttgtttgtcggaatccgacaactttttttaccatatattccatcggcaaattttttggaacgtcgtatataatttttcgacaaattttctaacaaaaataacattgacaaaagaaatttgaaaatcgaaactctgtcaaaaattttcgtcgatatatcgacaaattttgtaaagagtttccgataacattccttttgtaattttttacaatttccatataaatatgattttccgacgacgcttgatttctaataatggatttgtttttgtcgaaaagccgtttgaaaatgccgttttcatttgaatacttgtaccactatgagtctatgactaaaaccgattgcatcaaacgaaggcattacattccacttatggtgctatacgcccttaaaattttccacacaaattttgttttttcttcaaatagcaacaacattgttcaacaaacaaatgcttaatttttgttgtattttttattggtcatcataattttcgtattatctgacaaaataaatcgtattatctgacaaaaaaaaaaagtcgtatctaaagagaaactaaacaaaaattaagttcagatacttaaaaaattagaaattgctccttcttgtttgtaaaaaaaaaacaaaacaaaaatactacttcttcccctgaacccaacaagagagaaataatcaaacaagtaaagtaagcaagtagcagagagttgactttgagattttctttcttacaaatcagaaccaaacttagacaatgtcattcatgtttgcttcccctattatcaccccaaccattggctcttttaccttctcttctcgacgctccaattacatcgtgatgtcggccgtccgaactaactcggcttcgacgtgtcctatactaaccaagtttcagaaagactgcgaaatcttcttctggaatcacggtggtatagatttttatttttactcgaatatctcaaaattaaaatgtaaatatttttaacatgatttagttatttaattatttttttaatttgttaaaccaatcatttgatgaaaacgtagatatagtttctacagagtttttaaaggagaaacgtatctacactctcttctcattttttttatttttctagtctagtggggagtctcttatgtgagagaccccaatggagctgctcttaggtttgtcaatgttctaatgcttaaaactgttttcattcggaatcagatcataaacactgagtggggaggattctctaaggttcttccgcagaccatttttgaccaagagatggatgcggaaagcccgaatcgtggtgaacatgtaatagaatttatcctttctttagatgcatttatgtttgtctttttttttttttttttttttttttgttaccgtctattgccacaagtctcactatactttactgttttgtgtgtgtatgaagttatatgagaagatggtctcagggatgtaccttggtgaaattgtgaggagggttttgctccaaatgtgtgaaactagtgacttgttcggtcaattcgttcctggcggcaatctctccaaaccctttgcactcaagtacttctctctcacattctttatccgattccatttgcactcaagtacttctctctcacattctttatccgattccatttgcactcaagtacttgttcggtcaatgtgcagtttggtttatggttttgtttcggctcaatatttttggttttggttatatttgtagaaaatagaaagtgaaaccaaatgataaccacttgtacacgtgtacttcagtttcttcaatttgttgcaatttcgtttattaaacgaaaacaattggatttttttcaactttagtgtattttgatttctttggctcagtttgatttatcggttttggttacgtttcgatgttggttcagtacgattttaaaccaggaaaatcaatttggtcacaaacacattttgatacaaacattttggttcagctttggtttatatgcttatatccctaagattaaatatcctaaaatcaatactatctcaaagtggccgtgtgttttgctttttaggacctttgaaacttgaaattaaaaaaattcctaactgataattttaattatatttgtgtaaattttgtataggaccgagcatctaaacaaaatgcaagaggacactacagatgatcttcagactgttggattagtcctatacaacattttggaggtaagttgttatatacaaataatgacatttagagagtggataaactgtataaaactaatcaagatattggaaacaggtagaggcaaatctgcaggaaaggaggagagtggtggaagtgtgtgacacagtagtgaaacgcggagggcgtctagcaggagctggtgttaatgcacgaattaaacaagtacgaaaatgggatctctagggaaggaagaagaatctttctattaatgacgagcccgcgacttaggcgaattggacggattacaaaggatgatttcttcaacaagcataaatagagtaagaacgagccgattgtagatgaaagacgagtttgaggccggaagacgatcttgatagctgaaccttgtaaaaggctgcctacgtacccttagaaagggatcaagccacacgtagttcatatcgcgataaacgagctaggccgttactggaggaaggtcgtatgtcgagttaggcagttttagggatgatccggcggataagtgacgagttgaatggcttctcgagacgtgcgagtaggttagttactttgggcgggcaagttggcgagacacttcggacggacgagtaaacgagctactcaagatggatgggcaaacgaggtacttcggacgggtgagctgacgagctgcttgagacgggcgaacggatgagctacttgagacggaccggctgacgagacgggtgaactatgagctacttgagacggaccggctggcgagatatttcggacgggtgagctgacgagctgcttgagacgggcgaacggatgagctacttgacggaccggctggcgagatacttcggacgggtgagccgacgagctgcttgagaccggcaaactgataagctacttgagacggaccggctggcgagatacttcggacgggtgagctgacaagctgcttgcgacgggcgaactgatgagctacttgaggcggaccggctggcgagatacttcggacgggtgagctgacgagctgcttgagacgggcgaactgatgagctactctttgtctctaagtgtcctcctggcgagatacttcggacgggtgagctgacgagctgcttgagacgggcgaactgatgagctactctttgtctctaagtgtcctcctcgcgagatacttcggacgggtgagctgacgagctgcttgagacgggcgaactgatgagctactctttgtctctaagtgtcctcctggaatctcctttgacaagacatgctattccgtatttatagccttctgcgtgtagggcattcctccagggttttgacgagcctaccctcttgacttaacattctgcttaggcctttgacttggatttgggccttgggaaaagcaagcccaaatctaacccctaacagctggtatagttgcaattgtggagaagattgaagaagagaccaaaagaatggattcaggtaaaagaaccgttgtggctatggacggttcactctacgagaactacccacagtatcaacagtatatggaagaagcactagtcgagcttcttggcgataatcgaagttacattgtgatcatacatgccaaagacgtatctgggcttggtgctgctcttttggctgctactaactctatttatagtacttgaacgttgaacctctacttcatgagtatgacttttgtccatttgtttgtgtacattatatatatataattaagattgttcagaggagcaagtcgagcaacaaactagaagagatgagtaagtcttggcagaacaatttccaaaatgaacaatcttgatgacaagataaataattttggataaaagtctttccctatttgctaaatgaaacactctaaatgactttagaagttttgatttaagactaatcaatgttataatcatacatatcggtcttggaaaaatatctatagagctagatcataacccgttattgtgcagcacggtagaactttaaattttaaatatttattgaaagttgaattattgtttgtttatagtacattttaatcattctatacataatacattgacatataagataatatcattaaaaatgtattttatttttctaatttaattaaactaatgaaattaattaaattagtattgacttgtttattcttgttgagatgaattaatttactctttcaagtttgatttccaataactttctaatataattacttacaaggggcaatgttacattatattttgtacttcccaaatactagtataaaatatatttattcgacccattatctactttgatatgattcgaaaattgctgatatttgtaagttcataaagcaaagcaattatttaaatttaaagataattttcataaatagcacttaaatgagtttttgttccaaatataccatcactagttttctttctaaaaaatactattaactttttccccaaaaatactacaaaactaaacctactttaaactttcacaatatactaaatccatacccaaaatttcaaattataaacacttgaatattattattagtgtttgtgtgtatccgaaaatcttttatcggatatacacataaacaaactcattttttcgcttccaatcactaaatcctgtgttggtaggatatttctagatttaattctaaccataatcatgaaattgaaataaaatcaagccttttagatagatagatagatatatatatatatatatatatatatatgtgacttttatgaagtttgcaaaaaccaaaaggacaacatttttcaaattagaatacaatttttttaaaacaattgtagaatcaaatcgcatcctaagttcctaactattgttaacaaaaccacttactaaatctttgtgagaaattacagaaattatacctatttaaactttctataattaatgtaatttttacttttaaaggttaagtgattaacccaaacattttaaaagttaagtatttatttattatatgtgtatctataaagtatctataagattttcaggtttttgcaaggaattaatagatctaaagtggaaagagaaactattgtttttttctcaccttttatgcttcttcttctaacaactaaacccaaattgatcattagtccacaacccatagtgttagtttctttatttttcactttatggtgttatacgtttaattaagttatcaaaatctgttattcttgcatatcatctttcttatttaaagagaaaatagaaaattagaaattgctccctcttgttaaaaaaaaaaagaaagaaaaagaaactgtatcttctagtggacaaaaaaaaacttgttcttctcgtaaaacccaacaagagaataatcaaataagtaaagtaagcaagtagcagagcaactagaaagttttataaattttagttgaaagttgactttgagatcttcgttcttacaaaacagaaccaaacttcgacaatgtcactcatgttttcttcccctgtcgtcaccccagcactcggatctttcaccttctcatctcgaccacgctccaattacatcgtgatgtccgccgtccgatctaactctgcttcgacgtgtcctatactgaccaagtttcagaaagactgcgccactcctacaccgtacctacgcaacgtagccaacgccattgctgatgacatgcgagatggtctagctgttgaaggaggaggagatctcgagatgatcttgacttttgttgacgctttgccttctgggtaattttttactttctcttctctaattacacattatgttttatgatctataaatgattaagtttaagtgtttaacattataaccaacaaaaaaaaagatgattaagttttactatatatggaatgaggaagaaaaataaatgtgatagtcttaagattctaattccattttaatggatataggaatgaggaagggttgttctatgcattggatttaggaggtacaaattttcgggtgcgtagcgtgcaattaggaggaaagaaagagcgagtcttagctaccgaatctgaacaaatatctatttctcaaaagcttatgattggtacaagtgaggtaaatgaatcaaatctttaatatatcaatgagtgttgattggtttaattggttgactcggttgaatgttttaggagcttttcgggttcattgcttcaaagcttgcaaattttgttgcaaaggagaagccaggtcggtttcttttagaagaagggaggaaaagggagttagggtttaccttttcattccctgtgaagcaaacctctattgattcaggcacattaagcaagtggactaaaggctttaaagtgtctggaatggtgagtttatgcgttatcatttctttgttcccaagttattatgtggtttcatattctagtaagtagtaacctttaaaattttgtttgtaggaaggaaaaaatgtggttgcttgtttaaatgaagctatggaagcacatggactcgatatgcgagtttctgctcttgtatgtttctttttttgttctcgaaaagtagtagatggaatctcatgtcttgtgcatattgtaagtttgttgatgtttgtgtgtttaaggtaaatgatggagtgggaacattagctggagcaaggtattgggatgaggatgtgatggtcggtgtgattcttggcactgggaccaatgcttgttatgtagaacagaaacatgcaattcctaaactccgaagcaaatcttcttctggaacaacggtattattgatatttatatatgtagataggtatgtcaatttttcatgcttaaaactgtttacatttggaatcagatcataaacactgagtggggagggttctctaagattcttccgcaaaccatttttgacctagagatggatgagacaagcctgaatcctggtgaacatgtagtaaaattttatcctttctttagtaacattatgttttttgcctggtgtcacatgttttacaattgtttactgtttgtgtgtggatgaagttatatgagaagatgatctcagggatgtaccttggtgaaattgtaaggagggttttgctccatatgtgtgaaactagtgacttgtttggacacttcgctcctgccaaactctccactcctttggcactcaggtatctttatccaagtccatattttggttgttgttttatgagtagtagatttagttaggatgtgtagtttggtttatggtttggtttcggctcagtattaaaactcgatttcgttcagtttgatggaattacggtttgaaaatttctcttggtaatgaaaatatcaaacattgatcattggtgtatttcagtttgtttggttcaggttaaaaaattacacaagatcattttgttagttaagtttcaattttggttcagttacaatttcggtttgttcgattttaaaccaggaaataccaatatgctcaaacatttcggttcagctttggttcggtgcggtctatatatgctcacccctagattcaataccttaataacttgattagctaggaaagtgttgtaaattctgattgacagttttattcattatttttttttttgtaaattttgtaaaggaccgagcatctatgcaaaatgcaagaggacaatacagatgatcttcgggatgttggatcaatcctatacgactttttagatgtaagttgttaatgtataaggctaatcacatccatagatttgataactgtaccaacctgatcgagctattgaaaataggtagaggcgaatatgaatgcaaggaggagagtggtggaagtgtgtgacacagtagtgaaacgcggagggcgtctagcaggagctggtatagtggcaattctggagaagattgaaaaagataccaaaagaatgggttcaggtaaaagaaccgttgtggctatggacggtgcactgtatgagaagtacccacaatatcgacagtatatgcaagacgcactagtcgagcttcttggccataagcttgcaagtcacgttgcgatcaaacataccaaagacgtgtctgggctcggtgctgctcttttggcggccactaactccatttactagtacttggacctctacttcatgagtataggaggacttttggtccatttgtttgtgtacatttatataagatatcatatcaatatcaataagattgtaaagaggagcaacgaactagcagaagattatgtcttggaccacttcgtacaacactagaaaatccttttacttccaaagtgaaaattttgatacgatttataattttggatataaatctatccctatttggtttgtgaaacactctaaatgaagtagaagttatgaattatgtctaatcaatgagttagatttgtaactttgtttaaacaaaccgataagttatgtttagtaacaaacggctgactagtaccattgctttgtataaatcaataaattaaatatagataatagttttaaagattcttttctagagtaatatatattattttttttgaaaacttttaatatcattttaactaacaaataaattttaaccaccaaacgtttagtttttagagttggcaatcgtccattttttctctcttttaatcactttttccaaccgctcatatgattggtaatctccaaagctgtttgttttgttttgtttgcaaacaaatctattggatcttactaatcaaacccaatgtcataattaaatatagggcaaggcaaaatatttgtagtactcttatttgatttgctatatcatctttgatcccattaaaaatatgcagatatttgtaagtaaatttaatatatgttagagggaaagttaattacaaatattaaaatttgcaatatggatatccaaaatggataatacaatttattagcattcaaaaaggttttgcagtactggatagtcctaatatttcacgtataaaggaagatcaaccgtttcacaaatggattgacaaattacatgcgttttcattgtttctagattttcatgcatttgatgttctcccgaatactttgatttcgatatttagggatgataagtctgaactatcgtgtcacgacatgttcgattaaggtttttcttctgattttcaccaaaaaaaaaagaaagccttataacaaaaaaaaattaataaaacttttatcatattttttgaactttcataaaatatccaattaaaatttaaaaattaacagatttgtaactagttttgagaggatacgaatatgaaacacataatatttcattgagttggaaaaaaaaagttgtagttaaatcaaatttttaaaacaaaaattctatttcacaaatcttttctagctccaagcttatttttctatttcctcctaaatcaatttttttcttaaaaactccatctttttgactggatagtttggctgctttacgaacctgttttcaacaaaggtcgtgaaaattcaaagtgagatctgaaagaagaaaattcctctgatcgctcacgatttctcctgaattctccattagattttgcagagaaaatggtacactgctttatttctcttccactttgttttcctttgttcatgtctgacgctcaattctgatccacctctctcccaatttgtccagatccgattcatattattgcagaacagacaaggtaagactcgtctagccaaatactatgtccctctcgaagaatccgagaaacacaaagtcgaatacgaggtactactcatttcaaattctatcatcttcctttttttatcctttttaggtttctgattcttaattcttttcacaggttcatagattagtggtgaatcgcgacgccaaattcaccaacttcgttgaggtttgctgttttcattttgtaaaatttatcattcttgaatcagattttgtataatttgattgattttaaaaagcattggcttgttgaaattgtcttaggtttgaacctgatttaggttttgtataacaagattagggctgttggagatagattattcgagatgtagtagaagtgtgattgagaaacaataatatggaatgcgttttatgtgagtgggtgtcattgtgaatgttaatgtatgaatgatgaaactgttttgcaactattttcagtttagaacacacaaggtgatatacaggcgttatgctggattgtttttctctgtgtgcgtggatataaccgacaatgagttggcttacttggagagtatccatttgtttgtggagatattggaccatttcttcagcaatgtttgtgagctagatttggtgtttaatttccacaaggtacttaacctctttacttactcttatcctttgtaaatagcttctggaactgcttcgttggattcataactttaagttgtgatgctgtacaacaactggttttgaataaacactgggattttgctttgtcttttgagtattgaatgcttacaagttttgaactagttaagtgaattctcccagatgttttaaaatggttttctgagaattctcatatattaagcttacaagggtatatcaaactaagcttttgtttgcgaaaatcaaaagctagtttcgttttcttctcagtatacttgtcccaattctaagctgaccatcgtgacccattagataaatatctgtatgcagccttgaaaagcattccctatttgtgtttatatatgcagatgctacagtgtttctagatttgatctgtgtttgtactctaataattgctaactagttccctatgacttaaactgaaaggtgtacttgatactcgatgagttcattcttgctggggagctccaagaaacaagcaaaagggtgtgaaatttttgtttcaagcttctctctttcacttaaatgtatcacacatgctcttgctcaagtgctaaacttttaaatgttggggacttgttttaattcgcaggcaatcatcgaaaggatgtcagaactcgagaagctacagtgatgacggttaagaatcacattctacttggttaactgcgtacctgccagatgtttcttggcatgttcagagatttgctatactttgttgagttgttagacaatggtgtagcgtttacattgtgaatgaagaatttagagtgattctgctaaagatctctcatccaacattttgtttacctgtgagattttcatttcaactagtgatgtactatttgtttcgtagaactatgataccacacatgctttgagaggatatataactaatattgatagtaactgttgaattatcaacataatgtgatgaatcgatttctcgtgacaactttaaaatcctttatgatcatgtcgactaaaccattttctgctatctctgccagtgactggtctgtgctgatacccaaatccttctttgtcctccactgataagattcatcaggtcacagaatctcttacatctcagcgacaaaacagaagaacatgagacgttttctcaccaaccctactctttcttaaactctaacatgttagacttactaagcgtcaaacatgagactttgcgagttcctgaatcaatcatgaacattaacactaaccagtaatacgtaatgtaaccaaatcagtcctgcatctaatgcccaaaatacctttgttctgttctctagtgtcatcacagtttccctgaagttccaagagcttccttcaataactcaatgagcattcaaagcaatgcaatcaccaaccttaagtaataattcaacaacaccattactaaattccacctagcagatgcaaacatttgaacataacttaacccaagtcctcatattcttctttagataaacagaactgttccacaaacagaaaatttgaacaaaggttcaaaatctaagcaacatcaatggaaaaaagacaagacagcaagtgataagcaaaaggaaaaactcaaatctttgtcttcttgggtggtttcacaggacatattacaggagaagcatcatcatcatcaccttcttcatcatcagacaagatttggtcagggacatcatcatctggaacattatgctttgtgataaaatccttaagtatcttcatactttcttctttcatcgaaaccaattggtccaatacagtatcacccttgattgaatcaattgtgtagctctctgtcccaagcttgaactctactttaactagattcttcccagggactgaaacgtgactctcaatctccatatctaccctgaaattaaaactaaagaagaagaaggaaacgaaaattacagcgatgtaaggaaagaagaaccctaatgaattttaatttagcttcggtacctgaagttttatttgggtggaagaagaagcaaaaggccgatgaagcttagccgataattaattatgagcgactacagtttatctttaccaaatatttaggaatcttgcaaaatctgccatatttcactcaagaatttacaatccatgccatattcttataggctttacaaaatctgccatattttaccacacgtgaaatttcgtgaacgaaattacccttaaggtgggttagcgctctgacgaaaatagcgacaacttcgtccggcgaaaagaggtagctactgttccgtaataaatgtttccgttaccgattgaatattatgtggatttattttttaaaaatggtaatataggggttagtcactttaattgttattaatgttgcagaggaaagatgttgtgttgaacagactaaaaactagggattttaggaggtgttgttgaagacacggccatttattgcggaggaggtaaaatttattgtctgggatttctttccttcgattcgttttaggttggtagttttatttgtttgtttggttgtgataaatgcaattatttatgttgtgtttgaaagacataaaaggatggacgaaggagttatggtattggtcggtggctgggaatgcaaagacaatggggagtggcgtttcaagatgtcgggaaataagtacgcaaagtgtgttgacgtaagcgaaggagatatgttgactgaagttgtatcgaaagttggaacaacgtttggactagacaggaggaccaaatttcagctgagtttttggttcgaaggaggagacactgtttacacgcagcagaagatgccacctgtctctgttgacagcgaaagctcgttgaagaaattcaaaaagataaagcaagaaaaaggaggtttgaacatgtatctatctatagacgatgtcgacgtggctgagattacgtcccctgaaataaggggacacaaagacaatagtgttgtagaggtagaagtggcatgatacatgggcgggcgaatgggtgatggtaatagcacgcatgcaattccattgacttatgaggaagacggcttcttagataaaataaatgtgtgtgaaggaactttgaagaggaaggctggtttactagagttgggctgcgcaaagcggggatgagaaaaagaagtggatgtagaattggcaacagagagaagatgatgggcatcagacttagaggacgaattgttaagggaggtatcagattcagatgattatgattttgataatatgagggatatgattgatacagattacccgccggattgggatccttggaaggattggaggaacaacacattgacaagttttgaccgtcagccggggacacaaatgtgtggaacaactttgggggatgagtcatctaggcccaataatatgggagacgatatattcagctctgtcgggggacaaagccgggttgaccttgtcgaagtagaagttgttgagatggaatgggcgatgagagtgcagaaatgtcgattcagcgagggcaaagtagaatgagagctcaattaacggatacgcaagcgacaacattggaagaatcgtttgacaaggactgtcaaagttgtttgaacaacgtgcgtggacaaagcctgccaggggtaggtatagtggacgttgaggttacaacaatcgcagacgctgatgtagaaggtgagaatgatgaggaaaatacgagaatgtctatacaactggggcagaggacagggccaactatgaggacaaattcaataacagagacgctggatacgtgtgatttggtccctgaatctggaggataagtaggactagtggacgttgtagtgactgcgttggaagcaagtgcagctgaagaggaaggacaatgtgatgtagaggttcgtaatacatacagtgcgagaaatgataatacagcaagggcactggcagaggacatgtcgagaagagtatcagacggagagactatatttagtaaattagcgggggacgagatgttgatgtgtagggatgccaatccgttcaaggacaacgtagccgcgattgcttccgacaaagctaatatgaatcttaggaagggtggcgatgcaatatatatcgggcgggtattcagcaataaaggcgagttgcagaaagcattaactgtgtactctatgaaaatgctattcaatttccgaataaacaagtccgacaagatacgggtaattgcggtgtgccatgataaaaagtgtgattggagggtatatacaacgtttcacgagaactctgaaaatatggaaattaggacggcgactctaaaacatacttgtgatgtcgaggcgcggtctaagtatggtatgaaagcaacacgatcgatgttaggtgagttgcttaaggcaaaatatacgcatggtaagaagggaccaagggcctgtgaactaccagaaatagtattggctgaactaaatgtcaccataacatacatgaaggctaaagaaatagcaatgaagaaagctcgttgcagtgaggaagaaggttataagtttctgcagacatatctccacctgttgaggacaactaatccaggtacgctgtccacagtccatacagattatacggaggacggaaatattcgtttcaagtatctttttttttgcgtttggagcttcgattgccgggtaccagtatttgcagaaagttatagtgatagatggtacacacactaaaggaaaatacaaaagctgcttagttactgcaagtggacaagatggaaattaccaaatattcccattagcgtttggtattgtagacaatgagaacatagcagtttggcagtggtttttcgaacagttgtcacagtttgtccctgatgaagaagatctagttttcgtctctgacaggcatgcgaccatttatgctgggcttaggacagtgtaccctcttgtgaagcatgcgtgttgcacagtacatttgttcaggaatgttgtccataatttccagtgtgagggacttgcgaaaatggtctccatggcggcgagatcttacactgtgggagatttgcgatattggtttgaagaaatacataagagaaacattcaatgtgccaagtatttagtagagatagggctatctcactggacactggcgtactttccgggtatgcgatacaatgtgatgagcagcaatatctcggagtctctaaatgctgcaatgcaaaaagccatagatttctcggtagtgaccatggtggaatcaaacaattatcaaatcagttattcgatgtgataaattaattaaacatacaagaggacgaaaaatcctaaaatctgtaatgtgagacatttcgattaatttctctcaaactcaatcaaccgtcttaattgctaaagatttccgagttttcttggtaaatgaatcgcacaggagaggacgaactatcgaaaaaccctaaaatctgtattgggggacatttcgattaatctctctcaaactcaatcaactgtcttaattgctaaaggtttccgagttttctaggtaaatgaatcgcacaggagaggacgaactatcgaaaatcgtaaagggagacaaactcgaattatcgattagggtaagtaacaggggatttgggatttgcaattttccaaaaaggcttcattgaacaaaacatgaagacaggattgaagatagcaacatgcagaaactcgaaatggccttaccgaagatatattccgatgaagttaacggcgaagagaaagggaaagtatgagagagatagacgaaagagagagagttaactgttgttgttttaccgcacggtttacagtgaaagagagataaaagggattgtcaaaagacgcagttgttgagcgcgaaaactgttcaataaactgtggggacaaaattgacatttcccaaccaaatgtggcatgagttgtaagacccgggaaaatatggcagattgcataacgattttgaaaaatatggcagatgatgtaattttttcaaatatttaccctaacaaccaaaaaaaaaattattgcgatccttctcgtataaatataagataaatatttggttgttagcttgaatatatatatatatttttttttttaattcaatacgtttaataaaaaaaattacattataattttgaaatatatattaatggtaggcgtatttaacatttttacatgtttggtcattgtttcttttagttcggttatttttaattactttcaaatatatatatttcagtatatcagaatgttatcataacatatccgttgagtgcttgtaataattctggagggtcacaggttcgattccttcttggcgcaacatttttaatttatttttattttgaaacgacgttgtttcgcttttaacgaaaattgctaacaaaaatttaacccctttatttttttgttagcggaaatttaacgacatgtccaaaatagcaaagtcaacgaaacttaaccattttatcaaaagtcaaacaaaacttaatgattttagtagcattttggaagttcatgtttttttatcccaaatttgaaagttcatgatttttgacattttttccataaattttagattttcttatacaattttagttaagttattatttaatggtgaaatgcaaacttaatttatttttgaatattattgatttaaagttgtggaaaattatcaatcatacaaaataatatatatgtacaatcaactttaaatatatctacttaatatgtgtgaaaattacaattggattaataacaaactgctataatatgtagtaccgtaatatatgacttatatatatatattttatatattccctgagaaatgaatattttgtggtttaaaaaaagttattacaaagacatttacagaactactagaacacaattattatatatgcatatatatgtaccatacacttaaaaaaaattactagaacaaagattgacgatgcttttagaagagtagtcttatccggtaataaaacataaaatctgttattgtccaacttcatatttgatttctcttggttacgattgtcatgccatcaacttctggcttaacttctttttgcaaaccatatctttaaaactgatgtgtccataaatatctctgaaatgtataagacctttggcaaaatcagaattacaaattttcatcgtttacctttggaagaaaagaagaaaagtcaaatctttgtcttcttgggtggtttcacaggagaagcatcatcattagacaagatttggtcagggacatcatcatcttgaacattatgctttgtgataaaatccttaagtattttcatactttcttatttcatcgaaaccaattggtccaatacagtatcaccattgattgaatcaatagtgtagctctctgtcccaagcttgaactctactttaactagattcttcccagggactgaaacgtgactctcaatctccatatctaccctgaaattaaaactaaagaagaagaatgaaatcaaaattacagcgatgtaagcgaagaagaaacctaatgaagtttattctagcttcggtacctttgggtggaggaagaagaagcaaaaggccgatgaagccgacaattaattatgagcgattacaagttttgctttaccaaatatttaccctaataaccaaaaaaagaattattgcaaaaaaatgtataaattttaggttttcttatgcatttttaatttagttattatatattaatgatgaaatgtaatttatttattttgaatactattgattgaaagttgtggaaaattatcaatcacaaaaaataatatatttacaatcaacttttaatatatttacaatcaatttggattaataataatttgattgaatatgtagtaccactagattataacccgcggtacaccgcggagataatttttttttaaattagtatatataaaagtctgtaaattatatttatctataaaatatttatattttatagtttacaattgttattaagtaacatccttccaaacccgttctgccaaacccgtcccgttaaaaaaatctgtagtacatcgctaattttaaaaaaaaaattacgggattgcaattatattttagtttgtcaaacaaatttttgttttaaatagttgtcgaaatctaattcaaatattggagaaataagatttagtgaactgataagaaacgtatttaggtgcgttttgctcattttaagggattgcaattgtattttggtttgtcaaatattttttgttttaaataatttccgaaatctagttcaaattttggagaaatctgcgtgatatattgaattagaatatatttggaatattttttgtttgttaatcaatttattgccaaaagaaaatcaataattaaaagttagtggcaaccattgtaaataagttataactccaggatttattttacaaaatggctgcaaaaatgtatatatagataatatatattcccgacaaaccttttgtgatttaaaaacgttattacaaagatatttacagaactactagaacacaattatcatatacgcagctgtatgtgccatacacttaaaaaaccactagaacggagattgacgatgcttttagaagagtagtcttattcgctaatcgaccataaaatctgttattgtccaacttcgtatttgatttctcctcgttacgattgtcatgttatcaacttttggcttaactttttttttgcaaactgtacctttaaaattgatgtgtccataaataactctgaaatgtataagacctttgacaaaatcaaaatcacaaattttcatcttttgccttcggaaggaaagatgaaaactaggaaaagcaaaaggccagcgaggcctaagaggcagtaccgaccagaaaactaagataatgaaggttgttgcctgaaaaaccgctttgaagaaatcgtctttggcgatatattaatgttttgataatctattaatactaaaaatcttaataaatatattttgcacttctaaacggttgcatttaatcccaagactgctgatctctggcgagggctgctgatagctggcgaagaaatgagatcctattaccaattgacgaaggcgacgaagttgtttttgtcgaaggagaatcgagtaattaggttagtgcaaagtgaaatagagctgcaagcaagcgaatgcaacatgtctttaatattattcaaaagtcaaagcaaagaacagaacaacaaatcaagagacagcttaaactagatcttgtagacttgtagttgaaaagaagcaaacagaagcagttttaatcactctctcttaaattaacataacactctctacgaaatgcgagaaagtaaatactttacaaaaatctctaaacttatacttggtgtttccttcaagctcaacacatctaatcttgttgcttttgcgatccagaaagtaaacaacaaactctttaaaaatagttgggtgcaaagataacctctcccatatcagaagttcccaagatttgtaaaccttgaggcaatctaccaataacacctctacgaatagatattcgttgttctttcgaccattgttgtttcttggcgtcctctaaaacccacaaaccgaaatcgccacaaaagtatttagagaacacagctacttttccacggtagtttatcaaactaggtttaaccgacgatttaaagtcctcgggaaatacagaagcaatttccaaactttcagtcctcaaatcaaatctcaccaagtttaatggttcatgcatggtaaaacctctggaagcactgtaatataaaacaccgtctatgcacacagaggtggttccaggatagtgaggagtggggcattggatcattctccatgagcagttttgagctcccaatgtgaggacttgatgtccacaaaactgcagtgaagatttgttcaaacataatactttatattgtgcatggataggatcatatcctaaaaagcttccaatgatcgtttcactggatcccaaagtgggtaagtttatggacttacctatgctgggattacatatgatttgttcttccccatataaaaagctaatcaacccatggacgtagctaggattttggtatcgcattttcttcaagtgacacaccgtacttgattcaaaatcaggtggttcctccccaactagagcttcaaatttgttaatgttttggtccggtaaaaccagtgagtttggctcatatagtggagttgaaacatgagttgatttggagaaaaagtaccaattttcttgataaccttttatttggtttttgaaagcaaaaaggagacggtgttgcttattctctcggaatgatcgaaacgagaaggatctgatgaaatcttgattgcggatgattttggcccataacttcgatacacaaacaaacctggctaaaaatttcgctggcaagtttaagaagatctcgaacaacacgtcaacaggaattggatccagagattgcaaactcttctccgtatctgccatttcaactctgctttatcttctcaaaccctaataatatctttcccttgaactccaagatatcaaaaacacgaaatattattgaaacaaaaacaaatcagctatttataaaagaaatgtttcactttcaccatgtcgacacttgtcaatttttattttatataaagaaacattaattacatatttaattaaaagaccaaagaaatcactccatattaatttttgcaagaatattgaaattttaaatgaaaaagtaaattactccaaatttcactctcaccctattatacaacttgccattttttcatttacaaaactaatataaaggtataattaataaaaaaagatattatctttttctgtttcaaaatataatttgtaagaagatatctagatatttatttaaaaataaattcaaccaatcatgcataatataaatggtcacgagttattaaatacatcaaaatttgcagatacttgcaaaacttcttttagtagaaaatttctaaaacatcttatattttgaatcaaaagaattaccaaatacatcacctccactttatatcaaattgacttttgtaatagtaaatgtgtttaagaaatccaatgcaacaagtctttgatattattcaaaagagtcaaaacaaagaacagaacaacaaatcaaagagataaagctgaaactagatgttttagtaaagaaaaccagaacaaaactaaccaaagcagtttgaaacactctctctaaataaacatattaatactctctacataatgcaagaaagtaactactacattataatctctaaacttaaacttggtgtttccttctatagtagaacacttctaatccggttgcttttttgatccagaaagtaaacaacaaactcttcaaaatggttgggtgcaaagacaatctctcccatatcagaagtgcccaggacttctaaaccgccatggaattgtccagtaacacctgtatgaaaagatacgagtacattcgaccattgttgtttcttggtgtcctccaaaacccacaaattgaaatcatggtggtcattgtgataatttttactgacaacagctacttttccatggtagtttatcaaagtaattccattcgacgatttaaggccctcgggaaatttggatgcaacttccaaactttcagccctcacatcaaatctcaccaagactgttgtaaaactagtgaaagcactgtaatataaaatgccatctatgcacaaagatttttcgccacaatagtgaggagtgctgcattggatcattctccatgagctattttgagctcccaatgtgaggacttgatgttcacaaaaccgtgtaacattggtcaagcacaacactttgtattgggcattgattggatcatatcctaaaaagctttgggagattattccacttgttttgatagttggtaaagttatggacttacctatgctgggattaaaaatgacttgttctccgctacataaaaagctcatcaacccatggacgtagctagaattttcgtgtcgtagttccttgcgagataaaaaatcaggttgttcctccacaactagaggtttaggtttaagttcctccattagagatttataatgtttcggaagataacgtaaacacctagcacgccaaaagagcccgaaccggtgcggttttacgggtgggcctggagcaggatcccacggtaatagtggagttgaaacaagagttgatttggagaaaaagtacaacattttgttataaagccttagacagtcgactaaagcgaagaggaggcgaggctgcttctgtggggaagagtaagacgtgaaggatctgatgaatacctcacctcggatcattgtggcccatacctttgatacacaaagaaacctagctacagatttcgcaggtaacttcacgaggatctcgaacaacacgtcgatcggaatatgatctagagattgcagattcttctctgtctccgccatgccaactctgctcggttttttcaaaccctaataaattcttgtaatccaaggatatcagaaacacataaatgatattaaaataaaatggaaaacaaagagaggaaatttagcgaaaatatatatatttgtaaaataaaccttttagtaatatcaaatcttgcctataatcattttatacaaaaaaaggaaggaaatctcaattataaaaaaaaaaaaaagagaggaaagtgatcattttatttatatatgttcaaatattaataataagtaaaaaaaagtatagaggcatacatactgtagtttacatttatgactgaagaaattaggttttgaccaaagatggagcaacaagagaagaagaagagaaaagtttacagaagaagaagattacaatcaaaaccaacttcgtcctttcctctcgatctagcctcagagatactcttaaggctacctgtaaaatctgttgtgaggtttcgttgtgtgtcaaagctatggtcatcaatcatcaccgatccatatttcatcaagacgtacgaaactcagtcttcaacacggcagagtcttttattctgcttcaaacaaagtgacaagttgtttgttttttcgattccaaaacatcattacgattcaaactcttcttctcaggccgctattgatcgttttcaggtgaaactcccacaagaatttagttacccctcccctacggaatctgtccacggcttgatctgctttcatgtgttagcaacggttattgtttggaaccctagcatgagacagttcttaaccttacccaaaccaagaaaaagctggaaggaactaacagtctttttaggatacgatccaatagaaggtaaacacaaagtagtgtgtctgcctcgtaatagaacttgcgacgagtgtcaggttttaacgttgggatcagctcaaaaatcatggagaacggtaaaaactaagcataagcaccgttctacaaatgatacttggggaagatgcattaagggggttgtatattatatagcctatgtttatcatacgcgtgtttggtgtataatgagctttcatgtcaaatctgaaaaattcgatatgataaaactaccattggaaaatatttatagggatgttatgataaattatgaagggaggttagcttgtgttgataaactatataccttgaataacgatggtataagattgtggattttggaggatgcagagaaacacaagtggtcgagtaaacagtttcttgcacgttatgttcacaatgacctgagaacgaacaccatttccaagctaactggtgtcactcatgctggtgagtttgtttatatttcaacgcagtatcttaaatcgtttgttttgttttgtgatccgaagaaaaataggtttagaaaagtagagtttaatggaattgtagacgaagaatttaggctcagtaatggagttggtaggggacgtatatatgcgctctataatttcccgaatcattgcgagagtctcatgtctttgtagcataaaagattattatttgatttgttccttagaatgactcttaattgttatcaactttattatggctttttcttataattttatcattccttactttgatcttatcccgtgtcgttaccagacaaaaaggtcacccaaaaataaatgaaatgtggcattttatagatgaaataaaaatatcacaaattaaaaataagaagttattaaccaactcaattaaatatgtacctcactaattaagttatataaataaagtggacggttaaattcattttggtttactaacgtaaaatacattaactattgactatgaatagcaaagaaagaaagaaagacaaaaagaaaatataaaacttttttaatgtatatatattgtactatagtctggtgtctgattcctttttcttataacgtagactttagtgttaatcctcagagcccaaggtatcgtctgagccattccgctacttcattccaattagtttccctgtacatggcaaagacatatgttcaaacaaatggtaatgaaagcaaagtaaagagaagtaattcatgtttagacccttgatatttttttaacatgatttggaatccagtcatgagaagggaatgagcacatttgtgtacaaattcgtatggaaccacatcagtagctgtgacacataaaattccaaaattagcatgatctcgtgattgttatctaaattgtagaaaagttatatagatgatacacatacaatgtgtaagtaagattggtgttgattgaggttgaggacgatttggagcccaggggttagatgctacattgttttgtaagcttctacaagattgtattaggtttctcatgtttaaaatgtgagtctaaacattagtacaaagtgagtgacagtaggacttgaagactctacctccagccaggaagccatcctttaagccctataacaactcgtggctttatttgaagccgttgattagtgtcatagcaactcttactcgcaaggtagagagcttgcgctgcacccatgcccatacctcctactcctatcatgattattcagaccaaatataaacttgatatatatatatataaggtctaaaatatgtatattaatttaaagtatagaaaattataagttactatttggggaagcatgatcagaaaaaaggttagcaatagataaagctgcatgatgtaatgacacctcatcatcttgcatgttttcagaaatttctgcaatatcgaaccctgattcatcaaagaagagtgtagatacaatattattaataatatattagaaacattaaatgaaatttgaaatcaactgatcttacatgcattggtttccattccacctaagatagtaacggggcgtctaggagcagttggacaaatccacttaatctacacaaagtcatatatatactttattagaaacttgacgaaatttctattaggatataagaatcgtgaaaacttgatccatacatttcgaagacccaactgtctcgcaaatcgaaccgaactgcagacataatagacctatatatatagtgaggaaaacttcgaatacaaagaagaacaagattcaaagtatatacatttttagtgaaatgagtttaatatgtcataagaaaagatgaactcaatagaaagatacaatagatgatatttattattgtttgtggtgccaaccatttatataaaaataaaaggtcaacaaaaaaaatagtacttgtagaaaatgccaaaatttattagtttattttttttaagtttaataatataacttaattgaatttattccaaaacatgtttatggtgtatatctctttgatctttgaatatataccaataaatttaattaaataaagaatgtgtgagtattattattactttgcgcttgtctcgccgatatcatgcagccagactatagtggccttatgagttcctatgggtccaaaagattgaacgtcttcaaatttaataccccctacatttctacgagctgtaaaaagtttaacatacgcagattcattaatcagttccacgtaataaatataggagagaatatagtccaacaactttgaaaagtatgcaagaaacatgaacaatcacaagaaagaaaaaaatatactagaagccatgctttgatatgaataagttcttgtttccgaagagtcttttatttgttcttctgaaaacgtttatgttgcagtattcgaaaacgtaaggaattgtaagaggggaaattgtgtatttatacaccgaatgatgtttatggagataatgatatttgtattaaaagttggatgcatgacaaaaatcctactcttaaaagttggatgtatgacgaagatctttatcaataaaagtttacagttaataaaatttattttgtattctatatttattccaaggttaaatttcaataaatgaagatcagaaagaaaaaaaaaagatggatggaactcaattaatggatgtttttagctgtaaatgaagatcatatatataaaatataaaatagcacctctatgtagagcggcccctcatcaactatgtatatatatatatatatattgaacggttcaataacttttaccttaaaattacaattagttttgtttaaatgttagtttaagaaaaagttaaggatctaatatgataagtttctatactcttaaggtatccaatatttggagcatggttcagtcaagactaggacagccatatctaatttttgctgattggtctggcctcattgcgtggttatctcctccgccagatcacaaagcttagttctcaaatgcctcattgtacaaagaactatcttcttttttttttttttttgaataaaatgtcaaattatatttaaaaagaaaaataactttttacatcagcttaatcttatgtgagttgaattatttgttttgataagaaattacaatctgagagcttaacagaaagagcagagagagtctagagccttgtcgagaaccagacttgtaatccgttctcgtagcggcggtctcctgtcgagattatgatggagagttgattgcgaatctgtttgtccatccaactaatgagattggctgacgttctaggctcctcaccatggcgtcgatcatttctctccttccaaaccgtgtgtactgtgagttggaagatataacgtgacaaaaagctccgaattcgatcagtttgagtctctgagatgtaattcactattgcctgccaatctgttgagaatcgatgttgtaaaacattctttgcaattgcagtccaaatcgatgaggcataactacacgagaagaacaagtggtctcgtgtttcaatagatgtggagcagaatgtacacttcacatcagagccattattccaaaactgcattcgatctcccgttgataaccaacatggtttcatcttctccatatggcaaagagagaaacaacaggcttcacaacatggtttcatcttctcactttgtaatcttcaaagagattgatcatagtaaccgggactccattcttgctaggattatctagagaaaatttcgaaatctgctttcccgttggtttacctatgagtagttgctcctcaagttaggacttatgctccttcaccgattttctcaacgttttttttttttttttttttttttaagacttttttgaaacatttttaactcagtcgagatcagtaaaacttttttagctcagtaaaaaaaactattttcttttaggtatttaaattttacattcatatatatatatatacagtgaattgcgaaaaaacaaattggactaattcagattactaaaaacgtttcattatgcaagtcatccaaaaataaatgaaatatggcattttatagatggaataaaatatcacaaattaaaagaaacttattaaccaactcaattaaactatgtatctcactaaattataacataaaatggacggataaaatttcatttggtttactaacgtaaaatacattaactattgattatgaatagcaaagaaagaaagaaaaaacatataaaacgtttaaatatataatgtatatatattgtactatagttctggtctccaattcctttttcttttaatttagagtttagtgttaatcctcagagccgaaggtaacgtttgagccattgctttacctcgtcccaattatgatccctgtacatggcaaaaccatatttagaggcatctgttcgaataaatggtaattaaaccaaagtaaagagaaagaattcatgtttagacccttcgtattttcttagcgtgctctgaaatccagccatgagaatggaatgagcacatttgtgtgtaaattcgtacggcaccacataattagctgtaacacctataagattccaaaattgttttcagttttcatgatctcgcgatggttatctaaattgtagaaaagttaaatagatgatacacatacaatgtgcaagtaagattggtagtgatataggacgatctctacccccgggatttgatgctatgttgttttgtaagcttctacaagattgatttaggtttttcatgtttaaaatatacgtaacttcagttacaaaaattagtaataagtgagtgacattattgaaaaacattagtaataaaatgtactcgaagacgctacctccagacaggaagccaaccattgagccctataacaactcgtggctttatttgaagccgttgattagtgtcataacaacccttactcgcaaggtagagagcttgcgctgcaccaaagccgatacctcctattcctatcatcactattcagaccagagatttataaatttgatatatatatatataaggtctaaagtatgtatattaatttagagtgtaaaaaagtataagttaccgtttgtgggttcttcagataaaaggttagcaatagataaagcagcatgatttaatgacgccacatcatcttgcatgttttcagaaagttctgcgatatcgaaccctgattcaccaaagaagattgtagatatagtattgttaataatagaatattagcaacattaaatgatgtttttgataaaattttaagttaagtgatcttacatgcattggtttccattccacctaggatagtaagggggcgtctaggagcagttgggcaaatccacttaacctacacagaatcatatatatacttattcttagaaacttaaatcaaatttcttttaggatataagaattgtgacaaaacgttcttgttcatccatccatacatttttaagacccatctgtcttgcaaatcgagttgaactgcagacataattgatatagaggtatcagagccggaccaatgaaattcggggagctatttaaattacgaaaacaaagtatttttgttttaaaaactatagagtaaatagaaaccagtttaaacaaaactctaaattatttatttgaatacagtgagaaaaacttcgaatacaaagacaaacaagattcaaagtatatacatttttagtgaaatgagtttaatatgtcataagaaaagataaattcaatagaaagatacaatagatgttatttattattgtttgtggtgcctaccatttatatacatataaaggtcaaaaaaataaaaacaattagtagttgtacagataatgccaaaaaaataaaaaattttaagcttaataatataatttaattgaatttatccaaaacatgtttatggtatatatctttttgatcttttgagtatataccaaaaaaaaattaataaagaatgtgagattattattattactttgcgcttgtctcgccgatatcatgcagccagactatagtggccttatgagttcctatgggtccaaaagatagaacgtcttcaaatttaataacatttctactagctgtaaaaatttcaacatacgcagattcattaatcagtgacgcaataaatatatgagagaaaatagtccaacaactttgaaaagaatggaagaagcatgaacaatatatcacagcaaagataaaaacatactagaagccatgctttgatatgaataacttcttgtttccgaagagttttttcttttgttcttttgaatgtttttatgtataattcgaaaacgtatggattgtaagggggtacattgtgtatttatacaatgaatgaatgttatggagaaaatatttgtattaaaagttcgatgcatgacaaaaatcttacttttaaaagttgcatgcatgacgaagatctctatcaataaaagtttacagtaagtaaaattaatttcctcttttgaaagttggatgcatgacgaagatctagtgtttgtcgacactgatagcatgatccgatactagatttgtctcttcagcttaatttcttatttttttcggttttcctccaaaatgcttaattatctccaattaaatctcaataaaatatttgaattttttttaaaaatactttagaaataattaaaaaaactctaaacctaatacctaattcataactaaacaggtgaaaatcaagatataacaggaaaataaacggtatgaggaaagcttccaacaatagcttcatcgagagtataacatttgattcatgttttctataaaagtttttggctttacgttctttaagcaactttttgattcacaagttatagaaacatttattttttctttaaatctaatttagctagcattatattccaaaaaaagaaaaaaaatcttaatgatgaagttacaaaccgatgtatgtatccgctccattgcttttccgaatcacgtgtagccatttgatttttgttttcttttgaatcatcatttatgctaatttatgaattttgcttaataatttctcattccttactttgattatatcccgtgtcactacgatggttctttgtaataaaaataacaaattatggttcttgtctcttcttcttttttgtgtaaacatgaactgcacagggaatcatctcacctcaaccaattagccaaatcgaagtccttaaaacgaggagtttaattctatctttagatttttaaaaataaaataatatgtgatcgtgaatatgtttacaataaatgtataagagtatattgcgtattattttttatttcgtaagattattcaacatttttcggaggtggagagtttagttacataaatggacgattttgaaagtgtttttgcacaaagcccttttaaatatgaaacaaaaaaatttcaaattatttatctaatcctcaagtctgatagccatttcctacgtactttgatctataaagagttaaccgttttaacgtaactgagttaaaaacgtaacatcgagtgtgactaagcaaaacaatttagttttagtcgtatcctcagttagaagcgtgacatagagtttggctaagcaaaacgatataattttagtcgtttcgttgcatgtctaagctttggttatcaatcagcaccgatccatatttcatcaacttgttggaaactaggtctccagtctccacggccgaatcttttggttttcttccaagaatatgacaagttgtttgtgtcctcgattcagaattccaacgagcctatttattgttatcatatggaattcccacaaggacttcgtaacctccccctacggaatctgtcgagggcttgatctgctttaaacaatcagcaacgccgacagtttggaacgctagcacgatagagctcttaacttatgaagggagattagcttgtgttgaaaaacgtaccatgaaggatggtatccggaagcatagtatcacattgtggattttggctgacgcagagaaacacaagtggtcgagtaaagatgttcttgtactttctagtcactatgatggaagtttgagaacatgtttcaaactaaaaggttgcactcataatggggagtttatttacgtatcgtccacgtttcgaaagatggattatattttattttgtgatccggtgaaaaacagctttagaagattcaaacttaataaaagaaatcgcagatgacaaatctaggctcagtaacaaagttccaaggctccatgccttcctcgatcacaatgagagtcaaatgtctttgtcataatttaatttcttggtttttttttccttaagaataatcttctttttttttggtcaaagtaaaatgatcataaatgatagaatgatcacttgtgcaagattatgattattattttcttctaagttctccttccttactttgattttattacgtgtaatcttcctcccttgccaattccctactgcattttacaaattcatcataaccgttcaatagtagtacctctcttccttcttaatgactttgacttgcaacttgtacagtataataataatgcgcttcaatatgttttggttcttttctttggcatacttttctcttcttctctatctgttgctcattacattagagaactacgtttgttgaggaggacaatggtggaaagtgcaaagccacaaaagcgagactatatatggttacttttacatatacatggactctaagagacgcatgaagttttttttttcttttgcttagggatcactaagatcgccctgatctcttaaacttcttttttttgccaaacaataatttccattcaaaagaggaaagtccatacaaattagaattaagatagtacaagaaaataaagatagaggcttcatgagttttgcaaagaagtgttcacttttaaaaaaagttcacaaggtttgaaaaatctgttgaagccttgacggattcgaccatgttgacgggcttcgcgaaatcctcgaccaacgtgtggtcatagacggctattgcaaacaatgcatatgaacctttgaaaaggtgctccacgggagaagctaaagggtagataagcgtattatcttagtgcagttcacttctagggcccaaaaaataaataaaaagccatttgaccaaaacgatctcaccaccatagtagcctccaagatgcgccattttattgaaccctccatcacataaaaacaaatcttggaccatccttgtgtctccatgacccaaatttccatactctggtcgcaacacacaatcctaacttcccttgggtagtttataggatacgaacagtgatccatcagtgtttttatcagatctaacatcaaaacttatcagtttatatcgagaagtagtgtcatatatagtctctacttggtaatagatagccctgtggatgtaaaccgcacctttcaatggaaagtgaggtccaacacctaggatattcctccactgcttcgtcgtgggatcgcaatgtgaaaaaacttgacatgaattctccatacaatactttgtattgattcttgagagcaagtgcccatatccggagtttgtagcaagtgcggctcctatcggcgggaccatcctctagacttgcggaatcgggtgcatcgccgttttttcaggtaccacagtccctttctggcaagttggtgagcttcggtaaggcgattcttctcttctcgggtccctctttccttaattttctcccgctctgatggttgcgtatttggatctgacgggtcgctcttctagaggcaagcctcgtagtcttttttggctctttggattgttcattgcggttagaggcgtagtggtttgtgtttttggtggtgtgcttctttcctcctttagagggctgaagaaggtggcaaattcttcagccatggctatggctcctccatctaaatttgtctttgtcccaatcgctagtctttggttgcgttaaggttgagttttgttgttaagttgtagtcgagttgggatttttatgtgttaatgagcttctagttgtattgctaaggttgtcgagtgtagaatagaggcgtcgaataggtctaagtggcatcattatctctttgagctagtgtagaagtccgcggctgcctatgcgtttttgcgttagtcctcggagaagctgtaagcttctttctcgaggttttgtggacaaatctcggatccattagttcatggcaactatgatgaggattccattacttcgtgttgtggcagcacgcaaatttttgagccttgcgagctcggaaacggtgtttctcctcgtacgatcgaagcgatataatgcattttgagttgtaatgttgtatttaatttatgtagattgtttaattgcgtttcttgtaatcaatgtaattctgtcaaaaaatttaaccttttaccaaccaaagaaaaaaagtgcccatatgcatggatttattcttcggtaagtaaaaggattgcctcgtggtagatttatatataacacccccatgacgagagtctgaccaacaaaaaatcaagccacggatgtaatgccttaatccttcagggatattaatataataatattgattctatttcgaaggtaagtagttgtttgaagtgtggccgtagtccgtagatgaaataagctaagcatcacgtggagactgagccaaagaacgactcacaatcgattctatgatgtctctatgtctactaataattgatgaccatagcttcgaaatgcataggaccttcgaaagagatttcaccggcagtctttttagtatttcaaccgtaccatcgagaggtaattggcttcacagtgaagaagtcgtagtgtcgacgatagtgaggtctgtttgtgtcctctcttcatcgcctctgttttctgaagccctagagatcacttgtaaacttctatatcacgtaagtagaaaattaggttgtctttcttggccctacaaattagaaaagcccaagtttttgtaggcgataggaaagtcaacactaatcattactttcctctgttccaagaatatgggaacatgacccatacccatttctccactttcttcgaacttagtagttccgagctttctccttggatgatttgaatataatttggattatccgtttaaatttagcttctgcaaaaacgaatctaagaagaattatcatttattttgcataactgattgtcttgtgtaggcttttggttaagcgttcccactatgacaaatgaagaacatatgatcgtgttataataatcagtgttcaagaaagaaagcgctagccgctagggactagtcgtcgtgtatgtgatttaaggcgatttgtgtgtaaatatataatttaacataatagaaaaggataacagttttcaaagaatgtatattggtggtttacacaacgttttacatgtatgggattagttatacaaactcacacgacgttgtgatttatttagtttgttgtgtatgtttttttcctgctcgtttgttatgttgtatttgaggttgttgcgtttagtgtgatgttttcgttttcctcgtttcttgtgttgtgatttggttatgaatttttatttttattaaacgtggtatgagtttttgtgctttacgttgatttgtgctcgaatgtgagcaacacaaacgagttatatttaatttaccgtatgtagctcagagacatatgcataaggtagaagacacgagaagaagagaaaaagagtttgtttatttacctggtccatcatttgttcttggtgactgaattttctcctgaagttttgtttctgttgttgctcaaaacatatgcatgaagcaagaaagacgagaaaaaaagatttaaagagtttacatgtttacctgacctttcattttctcattggcagataaatctctacttgaagttatgtttctctgcataaaaatcctctttcttgaaaacaaaacaatgctgttagcagtaaactataagctgagtaattaggacactaattgtttaactgaagacattgaacaatagataaaactacaaaatttatgtgaagaaagaaagttacgacgaattctccagagtctactctaatgcgagattgactgttggctcacattttttccttttagttttctaatgcagtattatgaaccatcatatgattcctcataaatgtactaaagaaagactatacacactgcaaaataatgccaagtggtgtaagagaagacaaagagattgaattaccttaaaaggaagtgacgagggaatatcaagtggtcgtcttgtgttcaaaaagcttcagcttctctaacagctaacatcttatctctaacatctttagtattttacctaaaaaaataaagatcaaaataagttctaatttctgtcttaaaataagttcaaatctttcccaaacattatataaaaatcagtgcatcggttgtttacttggttttcatccaaacggagagcttcataaacaccacaaacgttctgcatcaagaaacaaactcatgtcatttctttgatggtaatgcactagtactgaagaaaataatataccacgagaaatatggaataaagtaaatacacaataaattatacatattatagattgtgaataataccagtaaacatctaacagagaacaagagagtatatttacctgacccttcatttttcgaggcaactgaattgcttccttgaatctagttttttcagcttaagaatcctaatttgaccaaatacagaatcatatttcgtgatctaactcattatgttaccagtaaactatgagtaaagacaaaagaccaaggtacttactggaaatcttacttaactagttaacctgatccaagcctatatatttgactgcttgtccatagctgaaaactaaaaaaaatgttcatcttcatagtgatattgaaaaggtttacaaagtatgatggaaactagttataattgtgttaatttctcctttgcgaagtatgaatttatattttgtttaaagcaaaagtaaggttctcgtttcttttcttggattttgaatcatcaccgaatttccattcacatgaacagaacgtaaaaattgacaaagcaaaacatatctacattgattaatgattacctctttgtttttgtatgcaaagcacagttttccctcgtattggcttgaattcctctttcaaataacataaaaatttaccaacttgttaagaaaacataatgaacttcaatatgaccaacaatagttgtaagatactaaaatagaaagggaaggagagttcacctgatattgacttggcaacataatggcatagtagtattgtgttgaattttactattgtgttatgttgtgttgtgttcgagggtgttttgagtttatctgccttacgtgttttttttttgtatcgtgtttcagtttcacgtgtttctgtttgaattttgttgtctttcggtgtgttttgagtttaggtgattgcatgtatttgtattcgtgaagttgtgtggttctagatagtttgaggaaccaaaacaagccaagacacctaggctcatcaaatgaaaataacctgtagggaagaatacatgagaattgagcatatacacatgagaatagaggaaactttactttacttgacctctcatatgctcttgctgcaaaatcgtctctcaattgctcttgggacctttgttctttgcagaataaggatccactctctagaattcaaatcattttgttagcaaaaattatgtgcagagcaaaacaggatcctaacacaacatacaaacaatatatttaaaaaactacaaaatcaatgccaagataaaatatggtatgattcttacagaggctgacaggtttgcatctcttgttcttttaatcttcaccgaacatgctgtataacgtaaaacccgaatagaaaacataacccttcaacttagaaaatatcaagaggtgtcaactgttgtaagaggtgatgaaaaaatttaatcacttagcactaaagaatatatatgttgtctcatctgcacgagaatttccaataagaagaatctgatacctgatttcgttagtattgtaccatggaaatcaagatctagtagagaaatgtgatatgccttattagttcgtgcaagttaaaaaccactcaaacacgtcagacatttccaaaaaacactgtatcagtgtgtgtaatttatatatatacctggcccttcttctttcgaggagacttgatggctttcttaaatttggttcttttccgcttaagaatcgtctatctttgtagaaaaccattatgttagcagtatatacacaagaccatgatttgtttacaaaaactctaaaaagggatgaagatagtttatctacctgatcctttgtttttccgaggcaattgaaacactttcctaagtttagttataatcagcttaagagttctccatcttgatacaaaacccttctaatagcagttaataagaatataagactacaaataaaccacagaaataatgctaatcaagaaacttactggaatttattaagtatgatccaagctggaattcggctgctttgctcttgttgtttctgttactcttgacaaggaaacaatatccacaaaacatgtttattacgtatgataaacattctttgtgaaataagtattaataagaacattgtatgaagaaaaagtaaatgagacgaaataaagaaacttcaccttgaaacttgtgaatctcttggattttgaagtatcaatgagtatcccttgacatgaaatcacttgatgaaacatatctaagtaaatatatttatttttgtatgacaatgtttgagcttgtgtggcttggaattcacttttagagtagcataacaagtacttagattcaatgtgaccaaaaaatgattaatagttgtaaaagactaaaaaaaaagagaaagaaacttcccctgaaattgacttagcaacagaatcacaaagtttttaactataaagaaaaaaagatattgattgtttttttttgttctttcatgtctctagttttgtgttgtgctgtattttatttcttatgttatgttgattatgagatttgtttcgtttgagtacgtttacagttttgttgcgtgtgatgtgattttttttttgtagagtttgagttttgtgtgtttatgtttgagttttgttgtctttgggtgtgttttgtgttttgagtttgagtgttttccgtgtttttgaaagtgtgtgtttccagatattgtgagtaaccaaaataaagccaagatagctatgcatgacacaattgacatgagagtaaagagaaagatatctgacctcccacatgttttaccttcgaaatttttgttctttggacctcaaagatatctccatgaagcagttaacaaaacccctcattttctcttggctattgaaccacaatttcacctgaaagtacatcatacaaattggacaataaaatgaaaccacaaaatcattgccaagaaagaaaaaaaaacatggtaagagtcttacagatccaaaatctgactggttgctgatattttctacttttaatcttgacggataatgagttaacgaagaatacaactgaaaaacataactatcaaagttagaaaaacaatctcactttaagaacacattaaggacactgcatcatcttaggaacacatataatttaaagagtgttttaaaacttacatcaatgttcctgtctccaaattaattgagatatgaattgccacgtgattgctgaatcatatgaccacaagattgataagagctcgaaacataaacatgcaattattgaaacacgggatatcgagataaaccatgtatgtgatgccatagaatcttcttgtatgaatataacaattcaccagtttttccaaatcaatctctagagaaacacatataaagatagtgatagactaataaccaaacccattagtccagattatacgaatatgatggcttccttaaattccaagacagagccaaaacgataccataaaaaacattagtttgagtaaacaagccaaggtatctcatcaaatgcaaataacctgtagggacgaatgtatgagagaatacacaagagaagagaggaaactaattattttacctgaccactcatatgcccttggctagaaaatcgactctgaaaatgttgctatgtgcagctgatagatacatgacctctcatttgctcttggcaagaaatttgttctttgtagaataaatttccactatctagtattcaaagcattttgttagcaaagcaaacagaacgctaacacggcatacaaacaataaaaaaaaattacaaaatcatcgctaaaaaattatggtaagaatcttacagagcctgactaagttctttgtttttttgttattcaatctttgacggatcgaagaacctgaccaaaaaacacaaccattcaagttagaaagataatatagaacaagagagtgtcaagttttgtaagaggggataaagaaaattagtcaccttagcacggagaaactatctggttgtcccatgtgagaaagactctccaacagctagaatctgatccctgacttcgtttgtattgtacttgaaaatcgagatctaaaacagaaatatgatatgttttattagttcctacaagttataatcacttaaacacatcaaacattttcagaaagaacatttatctacctgacccttcttctttcacggaggctgaatagctttcttaagttttgttcgttggtacaaaaccattgtattagcagtttacttcatacacaagaccatagaaaaactacaaaaattttgaaaagagacaaagatagtttgtctacctgaccctccatttaccgaggcgactgaatcactttcccaagttatttttcacctcaagagtcctcctccatcttgagacaaaaccattcttatagcagttactaaatacatacgactattaaataagactataaaacagtgctaataaagaaactgctggaaatcttactcactaatccaagtggggatcccactgcttggctcctactgtttctgtttatcttgacaaggacacaatgtccacagctgaaatattgaacatattaataacaggttaaaacttggttaaatcttgaacatatgatatacaaaaaccagcttttacaacaggttttgtcctatgtgaacttgtatgaacttggttacatattcaaaatcaaaactcaaaagtagatgagaagaaagcgagaaacttcaccttaaaactctagtgttttttccttcgatttagaatcatcacagagtatcccttcacaagaaatgacagtattaaacatatgtaagtaaatgtattgattacctctttacttttgtatgcatgatattgttttcgcttgtactggcttaaatttcactttgagagcagcataaaaagtaattagattcaatgtgacaaaataattgatagttgtaaaggacaaagaaatgagaagaggacgatacttcacctgaaaatgaattggcaacagaatctcaaacttcttacaagtacaaaaagatattgatcgtgaagttttgttgttttgtccctttttggtatctacttttgtggtgtgctgtattttgtttcttttgttatgttgtgtttgagtgtgtttagatttttgttacgtgagatgtgcttgtttgagttttgtgtgtgtatgtttgagtttgttttgtgtttgggtgtgttttgattttgagtgcattgtgatggagtaattttttgtgtctgtgaaattgtgtgttttcagatagtgtgagtaacccaaacaaagccaagacaacttggctaatcaaatttaaacaccctgttgagatgatcctgagaacttatgcatgacacaatagatatgagaataaatgaagcgatatctaacctctcatatgcacttggttacatattcactttcgaaattttgttctcttgacctcaaaattattagcaagaggcaggaaacacgacccctcatttgcctcttggctaataaaccaaaatttcacctgaaagtacaacacaaacaataaaataaaaccacgaatcaatgccaaaatcaaataaaacagagccaaaatatgactgcatgctactcttttttacttcaaatctttacggatcatactttataatgaagaacccaactgaaaacataactcttcaagagagaaaaagaatctcactctagaggaatataaactgcaaaacgcttgaaacgcattaagatgtcgaaaagagaatccaaccatcatcttggcagcaaatttgatttaacagtatttcaaaacatgctaaaaacaaacatgacaagatcatagaagatgtaaacaaaagtttaagagcaagaacttaagtaaaagaaaatacaaatatataacaatggattttcttgcaataaaatcaagtgtagccttacatttttttgtcctgtagacttattaaaatggcttcttgttgctaatggcagtactgtaccttggaaatcgagatctatatgatatgcttttttagttgatatcacttgaacacgttagaaattagtagaaaaacattgtatcaaagtgtgtttatctacctgacccttctttttacggagagattgaatagctttcttaaatttggttcttttccacttaagaatcgcctatcctagtaaagaaccattatgttagcagtacactatatacacattagcagtacaagaccattagaaaactacaaaaactctgaaaactaccattattttatccggtagtttatctacaaaaataaatgccaggccttacagagccaaaatctaactgcttactaatataactatcaaagttagaaaaacaatctcactcatgagaacacattaagataatagaaagagactctaatgcatcatctaggcaacaaattatactttaaaacagagtttcaaaacttacatttgttcccgtctccaaattgagatatgcattgccacttgattgctgaaccatatgaccacaagactaattagatctcggaaatggggacataaacatgcaaataagaaacacaaattcacagattgttctggcatgaatataacaatcaacaatttctttcctttttcaaataaatcttcacaaattcacagataaagacagtgatggactcataatgacgcaacaaccaaagaaaagatccattagtccagattatgcgaatatgatttcttccttaaaatcccaaaacggtacaatcaaaatcatggacgtgagggaaattctctaaatcgttgggtttttttgaccatctagactcatcaattcaacaagtaagagagaaattttgatgtagactctgttcaactgttatccgatcaccaaatttaaaacctatcgaacaagttaaacattaccctaatagaaagatcccagaactatcaaacctctaaattccaacagaaatcaacgaaagcaaattccaaatccaaaccctagattcccaaattaaccaagaagagagagagatcgaaacatttcgtaccttcttcgatttcgtaggactatcacacgatcaggactcaaatcaatagacaagtaataatccttgcatcaatcgtcagatcatcaccgacccaaaatcaaaaccctttgatcccgatttgaattgacccaacgaatcagagacgcaattcaattgatcggagttaagaatcagaagaagatagaaaatgaaaaatcgcttctccatgcgattatgtaaaccccaacgcgattttctgaaagaggatttgaaaaaatgaattttgaaatttcaacattcgctaaccgttacttgtggaaggggaagagttaacgttgcgaaatagagtagtgaggccagagctatttatcccgttcttttgaaacaatcagcatgttaatttacggttatgaccctgagttttcaaaatttgtttcccgcttttgagttagaatcacatacatgctagagtagtttaaacgttgtgtaaaccaccaaccaaaactaatcctttggggtttagattaacaaaaacggaaaattaaaaaaactaaattatttaaggaaattttttattattttttaattggaaatatgatatatctaatgttttagatttagaattatcaaactattaaaatggaatttttattaatgaaaattttatcattatttaattggaaatgtatattttttagattgattttatcatatatatttaaaatatattttcttattatgtttttaagtttttacaaatataattgactcaatttaactatgttatgaaaataaaaattaataatttttaatatttttccgaaaattacataagttttaaacttgtcaatatattttagaacataaagatgttattttgagtcattttgttattagtaaacacatcgaaatggagatgcaaatttacaaaaattaaacccaaaaaacttatatttacggtgagcatctaaatgaacaaccaaatatagaaacaaacacagattgaattcatcatctaaatatagcatttgaatgcaatctagatgcacaaacaaacatcaccttaatacgattcgttgcataaaccattgattcagagaaaatctctctctacatgatgaggaatgcattttacatgtatctaacaatttcgttcgttgtttagtttaatctatgtatctcaaaagaagtggtcaagacaagagatatggtcattaattagacaattctgaaatgacatgggagaaaatatattcgtttgatatgccagtaacagttgattattatttcgttctatgaggatgtctacccatctgttactctgatcatggttatgaagaataagaaaccattactgcgcgcttttggatacaaatgccaaggatcacaattttattatattcgacccttaaatgaaatcctataatttatgtattaaactggttcttactcatatgcgttttcttataatcaaagcttgatgtcaactaaataaaaacagtataattcgtttataagtattttcttttgtaaatttggtctccataacatcattttggcctcaaccttaatcgtaatgtatatgtcaatctcataaggatttgctttgtcgtgctgaagtaaatccgcaagtgtctcttctctaacacaaaataaagtcacatagtcatcatccccagcactaaactactattattctacaccacttgtctttacatttaacgacatttacaatgttcgtgctgcttctttagaactactaaaccacacttgttctgttttgcattagtgagagttttgttacatgtttctgtaaccctagtggaataactgtttttaattttgtttgaaccattggaccgcatgcataaaagttatttcggtgaatggagggtaaaacacgttactcaaaaagtattacgatacgtcgataagtgtttcggccatttctagctcctcaaaccttggtgactattttttctatttccataacaaaaatcaattgacataatattttttgaagatttacttcctttcaagtttttgagattaaaaaatccatgagatatgattaaggtctgatatgtccatgtatatattttatataatataacaagatttttttcacaactttgcatacaatgacattagacatcatgtactttcggcacatgtctacacctcttaattacttctcaattattctcttcaatcaataaaaataaaaccaaacctgtaacgtcactgttggtcactgtacaaatgcaacatcaccatcttttagactcttttacccttttactttctttatcttcttccttctttcttctgtttttccgacgacacaaaaccatgacaataataatagcaatataaatataaaatcgaaacaaaaatattaaaatcagaagttggccacaaaacgatgataataataatagcaatataaatataaaatcgaaacaaaaatattaaaatcagaagttggccggaaaaacaaatcagagagttgtgtgatatatttgtgacggcgctggtttacgagacatagagactatgaagatgactggagctccggccgcttccgtagcttatttccataaccaacgagcggcagtgtggatcgtcggagataaccaacacactcagtcctaaccgtttgtcatctgatttcctgtcagacggctatcacttcgtcgagagttagggaagacgatgatgacgacgagaccgcagtttgatttggagttaagcgagagtgatttattagatctgaagcatcaaaggctccacctacaattttctagtacaaaacatcgcaattgatgtcatcaatcgaattttcaaagtgttgaaatcgattcaatcaaaattttctcgtaatcaaacgtcatttagaaaaatggtgagatactttgctaaatgaaatattagtccgttacaattttatttaccattgttttaaattatgataaatgaatagttaacacataatttataatctattacgatattgtagtagttaacatgttaattaaataattatctacacgaatattatattatatgtaactcgttatatttatttatgatataataattgaggtaacacgataaatactaatttatctcatatttataaagttaccgcgatacattatgatttaacctggttgttaacatagtaatccagtagataatcatctaacttatatatatttttacccaattgtttgataaataaagtaaatgataattcaaaattttaaattgatatttcacattaatttatatgatatgataactggtttaacacgataaatatgcatttaacacataatatataaaattttatcgcaatgaattagttaacacgttaattaaatagttatccagacaaatcacaaaatgttttatgcaatccggtgataaatagtatcatatctcatattttaccggagatcatgcagcttgaaaggacaattttctctgtatcttatcaaagaaatttgatcttaaaaataaatttctgaaagtgctctattatttagccatttatgagggtttacgtgactacaaggctataaattattgagttttaattgtaggttttggcaaaatggggaatggcaaatggatcttgtaacaacgtatagtgcggacgaacgacttagttagaagcaaatggatgtatagtgttcagttagttgattaaaaattaaaattaatatttttcattctcattagtttttactgtttttatatctttttatgttataaatatttattatttttgtttttttttttcttcttcacattatattttgtatttattacaaagtcaattcaaattaaaatataatgatgccaaaggaaattgcttctttgatatcttatacatataattgtttttgtgaaatcataatttaaattctctgtatttgaatatcaataaatgacaaatcattaaaaacaaaattactaaaaagacattgcaaaatagtttgctaaaactattagaatataagatatgttttaaagtaattatttataaatttacttaatattaagtttgttttattataaatataacaaagaatgtgtctctcatagatattcaatataatgatattaaatatattgaaaacaaatcattgtatatttctttttgatttaaaacttttgaattttttaatatataatgatacaatcaaatcagataaaaataaatgttggatttaagtataaaagaaatgacaaatgtcaaaaggaaaagtgctacatgtcaacttctcaaagtataagtttgaaggagaacccttatttatcattttttttttttttttgaacaaacccttatttatcatataagatcttcaaataaataataaaagtagaaaataaaacctaatgcataggatgtacgtatatatatatatatatatgtatatattgagaaaaggttgaaagcaacacagcctgaacaaattagggttttgactacaaaagatggagcaacaaaaacagaagaagagaaaagtagtctcgaaaagtaaaagaacacaatcaaaatcagcttcgtcccttcctctggatctaacctcggagatactcttaaggctacctgagaaatctattgcgaggtttcgttgtgtgtcgaagctttggttatcaatcaccaccgatccatatttcatcaacttgttcgaaactcggtccccacggccgagtcttttagtttgcttcatagaaaatgacaagttgtttgtgtcctcaattccgcaacatcttcattcacttcagaattctaaaaggtcttactcttcttctcagctctttatcgttatcatatggaattaccagaaggatgtagtatttattcctctacggaatctgtccagggcttgatctgctttaagacatcaaaaatgccgatagtttggaaccctagcaagagacagttgataactttacccatacccagattaagctggaataatataatagtttttctaggatacgatccagttgaaggtaaacacaaagtaatgtgcttgccttttagaagaagttctgatgtatgtcaagtgttaacattaggaccagctcaagaattctcatggataacggtaaaaacgtaccataagcattgttctgactatcagagttctggtcgatgcatcaagggggttgtatattatatagctcaagtttatcatacacatgcttgggttttaatgtgttttgatgtcagatctgaaaaattcgacatgataaaattacatgcggatatttatagggaaattctcataacttatgaggggaggatagcttgtgttgaaaaacgtaccacgaaggatgattacatagcattgtgcattttggaggacgcaaaaaaagacaagtggtcgagtaaagatattcttgcaccttttggtcactttgatgaaagattaagaacctttttccaactaaaaggttgcactcatgatggtgaatttattttcgtatcttccacgtttcgaaagatggattatattttattttttgatccggtgaaaaaaacctttagaagattcgaacttaaagaaattgcagacgaccaagctagggtcaataatggagatccatatggacctatatttgcgttctgtgctttcttggatcacgttgagagtcaaatgtctttgcaataattttaatttttttcttttttgttcttcctttagaatgatcatttttgcaagtttaattatgatttttttttcttataagttctcatcccttactttgattctatcacgtgtcatcttcctcccttgccaattccctacagcatttcacaaattcaacatcaatcatttagtagtagtaactcgatccttatctttctaaagacttttatttatctttttgggccctataagtgaattgcaccaagattacgcatatacctgttggaacttttttgacaaaacctttccggtgacttttccgccaaatttcgaccaaacggctgaacggaattatcgggacattagtgcattggaaagcgggtaaagagtactacaaaatggtatactcatacgtcaaaaacggagttgtattgaataagaaataagggtgtaaagtgggacacttgggccaaacctgatcgaaccgaaccgaactaggatgagccgggctgcgggttgtcgggacgtcccatcgtcgactcaagggctgtcgggcttgcggaccgtcatgcttgtgagttattgggcttgctgagttgaatcttatggaaatattctcagaatagtctcaaaatattcttaggatagtctcaaaatatgtcatgcatatcctgagaatattctcacaaaatcctattttcctctactatataaagagacccagcctctcattatttctcaagctctcaaagacaaaacactctaaattctaaagtctctcctctctcttgcttcttagaagtaagttcttagtttaaaaacatcatactgcttaacatagataattatataggttaaacaaaagctcgataaacgcatcaatggcatcaacttccgattcgggctacatctctatggggctcactctaaagatcgcgaatcaagatctaaacctcgacgattttaaagaatccaccatcttctcatcttctgatcaagctttctctagatttactcatcattttcggaggatacgtcatcaatcgacttccctcttggaaagaacttttaaaattgggaagactgtgaaaaaggggatcgaaaccctaaatttttattaatttgggcattttgttataacctatagaaatatgtatgtttctgagaacatataaataactgcgagctaagtcggtaaaggaaagttgttatatctcacaggttgcgggttcaattcctcaacttgtaaaaaaaaaaagaaattgaaacgacgttgttttataagttaacagaatttataaccgaagacttaattctgttaatttcccgtaattttggctcgtttaagtcttaaataatatcttatgacaaaaaaaagacttaattctgttatttttttcgtcagttgacgtaacgttttacccgaaatggcaaaatcaacgaaagttatctatttaattctaaagtcaacaataactttggtatttaagtgacatttcgaaaattcatgtttttttgttctaaatttgaaagttcacatttttttgacatattttccaaaattatcacatatattgtatattatttatatataaaaaacatttcattacgaaaatccgattgaaaagataacaagatggaggacacaacttccttcaaactaaagcaaccaaaatttattccttaaacttttggaaagaaaaataaacggtaattgatttatatgatataaataattatatatttatatttattttgacgattgttctaaatagttccaagaaatcctgggccgaaagcccgaaactcatacattcctttgctctgtccagacgaatactcggtcctcatcatcttattctttgtattctttgagagtatcgatggagaagacaaatcctccatctctacatgtttcctctttaaacctgcttgataggcctcgagtttcgccttgaaagcaactaagtcctccaatttcagatctacattctctttcatattggacttttcaaggtttctttgctgtttcttcctcaaatcctaaaattgacaaaaaaaatattatataatataaaataaataatgattatttaattctgtgtataatagcaaacccatctttgtaatctatatgttgagaacgaagaagaaggaaaactaacggatgagattatattaatgatgggaaacatacctcctgaaactctttgatttgttccaattctttcatgagactcctgagtttggacgaagcactaggattttgaatacgctcaaccacatcgttgaagcatggataaccgtatgtgtatggtatattagtgggggagatgaccaagacagcaatctctacattacacaacttcgcgagttcatcagccttcttaaaaatgccatttcggcgtcttgaaaacgtcgctttcctttcgatgctatcttcaataaattttatctctatttttctacgacccatttcttagttttagagagatgtttttgttgttggtgttgtttttgttactactctactccattttatagatggattggttcaagtaggtttaacgcattaattataattttttatctttgttatcctttttttattaaaatatttgaatttaccttttaaatatatttatcttttaactactaccataaatatctttataactctgactacacaaatttatcataatagtcaagagttggtattccaaacaaattcttaagatatattttctgaagaaagtataaattttgtaatgcttatctttcattagaaaatatttaggaaaaatacaaattttgtaataattataaattagatttagtatctctacatatcattccatatatacaaattttattttaaaatgcaaactcacacgcgtcaaacatgcgcactagccacgacatatcaataaaatgaaaataaaaaactgatgaaacttggtaacaactttttctaaattaaaaggagttttttattttattatttcatgttttgttttcactcacacggatccgacaataatcacttctcctaaattcacccatcaaaagacataggtgtcaaaatcaattcttttaaacatttctacatgcatcaccatatttcatgaaactaaagtgttacaattcatccctctagcagatcgtatcgtcctggttgcgcatcaagaccgtcacaatcgactttgttaaccctcttaactccacattcgtctgggtttggctctgataccgtttgtaactccccgacctccatctttcttagtgaccccacgtcctctctcggctcacgggctcactcttacccgatagccgatccattacgtttacgaggctttaaaggcttgtttaccgatcctacatatcaccacattatattttctcgtgttttatcctcgctcatatacagttgcgacaatcacttcttggaaggtcattccctgtaatttttctaacttaagcacgcttaattatgaagttcttttcagatgtttgactgaaaataagtgcaatttgatgatataggtggtcaaatcaaatttttaaaacttctctgcatgcaccaccatattttgtgaaaccagggtgttacaaaaggtcaaataaattgatgtggatatcgaattagaagattcctcatgtgatgcacaagatgtgttggatggacccacatccaactagaagattcctcacccgatacaccagaggtgttggatggatctgtgattcgaccatgcaatcgaaaaccctaaaacaagttcagtgcaaatctagagaccctatttaactccatggaattttagctggagcaccaactttccgtactgagctgtttttcagccgaagacccatgaaaaatatctacattaatcaactcgacaacgaaacgttagaggatatattcaaaaatactttaccggcaacatcagttagcaatctacgacaaatgacatggcgatccgagaccaatggactaaggcttcaaaaatcatcgaaaattcatgcattgtaaagggaatagtctaaccgaaatcatgcattatcaaactcgttttggagatgaacaacatgagcattatgacaaccttacatgtagccgataacatgtcttttattgagttaaagtgcgtttcaagattttctttaatcctttacaggttttagattgatatggaggaaaaaacattttgggatgcaaacacgcatttggagatgtgagatcatgtataagggtttggagtttcgcgtcatgtggaagattttccaccgttatatcttcctcatattgtgatacaagctaggtgatgatctttgcttttatttccaagtgatttgaagaaaatctaacagtgaaataagacgttatggccaatctacttaagacatgtcaatcagatgaaactggtgtggaaactgatccagacaatcagagaccgataggtctatatatacttgggaccgatcagtccaccttcatttttgagtcgaccctagtaggccaaaggaagatataataataaggtccctatgcagccaatgtattgacctttttcgtatctagatcaataaagtccaactttcttctcaagctgtttgcgaaaaatagatcaaaccaattttatacattttccacggccgcattaattaaaccggacaattcgggaatggcacgcaaaccaattaatcaaactcgattccggttatcttcaattctccttcttcttcatcttcgcgtccgtgaagaacaacaattgaaaaagctccatctcctccaatggctacgaaagctccagagaaaatcaccaaaccaaaagacagagatttcctaaatcatctcgaaacatatctctccaaaagagatggtgtagacaaactcctgaaaatctctcgttacgcaacaaaaatcatcctcgcatcatcactaatcccagaaaccagatccataatcccccgactcaaaagcttcgaatcaagcgtcggagtcagtcgcaaagccttccgtctcggaaaattcgtacaagacatcaacgcattaagatcctcacgatgggattcaaatcacgagctcgtcttactcataatcgcgtacggtggtgaaggattatactatttcgttgaacaattcatatggttaacgaaatcaggactgatcgatgcgaaacattcgaaatggcttcagaagattagtgcttgggctgaattggttggttatgtaggaagtgtttcgattaagattagggatttgaggaaattgaatgatgaagagagttgtgttgcttcgacgatcgagatctcggtttcgagaggattagcttgtgatggtgaagatgagaagatgaagatgattaaggagaagaagacattgaaggttttatctattttgcaggatcttgctgatggtttgatgacgattgctgatattcgtgatggtaagggagtgttatcggctcctaatgtgatatcttctgcaggtttgttttctgctattgttagtactcataagaactggatctcttgttgatgatcatgatgatgatgttcatcgttcgtttttcgattgaattatagtatttgcttatcgaataaaggtttcgttttgattcttcggtggtttgaactaagagagctagtttagatataaacagcgttgatgcaatacatgattttgaaaatgagaaaagattcaaatttggaagcaatacaaacagaaagaagatgaagaatggcttatgaaagcctgttaaaatcaaatgaaaagcgatggcgcgggaaatctgttttcgaactccattacaaagatagaagaaggataaatcgtggtttgtgttgctaacgaaacgaatgagagaccgcaatggtttttgttggaatgtctacctttctttcaaggagctgctgttagattttgagcgtttgagttgccaaggaggtaagcagcctctgagaggtgattgtaggaacaatgatgatgttgaaagctgtttttgtctcatggagatggatgataaacagctgaatgagcttctaagacttctcttttcgttttcttcctccgggatttgcccgtctggatcgtggcagaccgctgttatcttgagggactcgggaagtatgcagctgcacacagaacctgcagaaaaaaaagtaaattagtctttcaaataagacttcttcaacaattctcaaatgcaacaaacatttgttacctatttgtgcaagccgattcacccattttgggatctttttcccggtaagcttgtagcaaacgtcctggcagaaatggttgcagttcttaacaatcaagtgatacatattcccgtagtaactgcaagccatgtcttccataaactctctcacttgtgttgggtttaaattcgtggttccaatgaatatcgatttcttgaacttgaagcccgggcattgccttggttcaacctcaaaaacaccactcgttgcataatcatgggcaccaaaagcatactctactccatgaactgtaaacgccaaatgttcagagttagctatagcagtaactataagtacaccagagatgcaaatctttggatacttcaaccatatgaacaagaaaacacaagcgagcgcctaaagcttaccttctacaccagagtgaaatataccaaggcctgcccaatagatatatccgttaataggagtcaagtcataaacattgagatacactggtgcacggcctggaccatggttgtttgacttcaacttcgaaaagaagcaaaaccgtgcaactgatttgcttttcagatgaagaggaccaagagatttccaacgtttcttcgacacaactttcatcttttccccaaaccctgaccgaaattctagcagcgactctgaccaacctgccgatgaagaaccgagccacataagaaaagtagcaaacacattatgatctctaattagtacattaatcacacaaatgtcaaatcaaaaccttacctttcttctgcttaggctcttcttttccgttcaacatttggatgcctcagtagaggttatcctgtatgtaaacatcatcaatcaataaaagattctgaaaggtacaaaagcaaagacctctgtgccacattatgttttcattgaacttaagagactgaaatgaaaaattttcctattttattttatcttatgctagttggctgaaatacaacaacagctcatttaaaaagtcagcaccaatctccattggccggcttcaatcagttatatatacaaaagcataaaatataatagagcatgcatcttagaataaagcaagacaagattggtctcattttttccatcttaatgataaaagacaagactgagtcatctaaactgtgattttgtatcattgttaaaccaaatccttacttccccaaatatacagagatcaaaaggaaaaagtgtggtcatgttacagtgttataaaatcaagtcttgttcacaaagagttgctaccatgtcagatgcaatcatgaacgagttatgtattaaataaagagaaatagacaggagaagatgatacagatagattaagtaagagcttaggagacaagtcaatggttcaacaactcattccaactaattgagtctgaccaaaaaaagcaaatttgattccacattaagatgaatagtgaatattaaagagtaccaaacaaacagcattacattagtgtttctaagatctaataaacctacaaacctaactagttccccaaaatagtaaatcttgaaaactggagcttacattactgaaaatggaagaattgtgaaacttttattgcaaatcaaatgtgacccattaagcacagtcaatttataaacacatttaaggtatcacagagactaaaatccctaagagtaaggagacactgatttggtcttgttctagggtttatgttccagatctgccaaaattagcttaaggaaagcaataaagactaaagattaaacaaaccctttactcaaagatctcgttttttccaatttctccggcaattccgacaaacaaaaaacccccataaatttgagaaattcagagatgaatcttcaagataatgtaagaattgatacaccaaattcaattttcagaagagaagattaacttacgaaattgggatggattcatcattgcaagtagcattaactgtgaaccacctgagactgaaactttgcaagattattttgttgttgttgttgttgtaataagttgaaaatcataagaagaagaagatgagagagtgggagagagagagaaagaggggaaaaagaaggaatttgttcgctcttcttttctctctctcccctttgtctcttcttttttattttttttggttgcatgttttgtttttgtttgtattttatcgtctcttactctggtaacagtaccaaaaaggcttttgggatggttaaaattgtgtttcgctacaaaacgcttttaaatcagtttttgtattattctctattgatatggttatatgggtgtattctcttcgagtttggatagagtattttggattatgagattttgatacacagcattgatatactattcgcgtattttaaaattttgatgttggttcaattagttgattggagagatctaaaaccattattttttgggaatattttgatttctgacgtctttgaattctttttttttctaacagagcatactttatgtaaaagaatcaagataagaaattcctttagcgcaactttttactctaataaataataatttttgatttggaagaacgataattttaggacctcctcactctccatttatgaatctgatataactgtttgaagtagtatatatggtacaactgatatttttgaaataacaactaatattttcttttcaggagaatgagcaaccttccaataaacatatattttgattatgatggatattattcaaaaaccggagatgcatatcaatgaaattcaaaaatagttggtttgtatggtatatcgtttaggacatcatcaatagaggagataacttactcgcggttagtggataagatactcatgaagattaagataaatgaatctacgacaatcattcctctttttttatctttcctaaattaaaaaaaaaaagtgatttaagaatatttagagataagagttagaacatttaagattgaaagtgtgtgggttattatttaaaaattaaatatcaaaagtaaaactagacacaataagatagagcgtgtgtataactaaaatgttttgttattattcattaatgacgtgtataaaattaatatccagtttattatcatgaaatgaatagttaaattatattgcaaaatagaatgtgttaaatttgaatttttgttcaaaaattctttatattaaatgaaagaaaaaatgtagattactattacaattcaaatattattaaaaaaatctatttatttctcacaccagtataaattttgtatattattaaatatcactagattagtttagttggtttagtgctttatgtatagttttgttatcaactctggttaagagtcttggtattttaagtctttctttgtacatcttttacgattaaatttagtgggaaaacagtcgatttccctccaagaagtattgacatcacgtcagatagagcctatttttttttatctcggtctagatgtttaggaaatggaagtttaacacctataagcattttttccttttccaatttagtggaaaaggaaaaagttgagacatataagcataaatcgtggaaaggaagtaccgacttagggttttctccaagatggagcaaagagaagagaagaccgaaaatatccagagaaaaagaagcagaggaaaatcttcatcatcatccttacctctcgatctaacctcggagatattctcaaggctgcctgcgaagtctgtcgtgaggtttcgttgtgtttcaaagctttggtcatcaatcaccaccgctccatatttcaccaactcctttgaaactcggccgaatctcatgttctttttcaaagaaggtgacaagttctttgttttcacgattcctcaacacaatcagaatccgaacgagtcttattcttattcttcttctgagattattgatagttaccatacaacctatccaaaacgttgttgcgtcaccactttaaccgagtcggtccacggcttgatctgctttcgaaaagcagcaacccctataatttggaaccctactatgagaaagttcaaacctttacgcaagctggatgagaggtggaagaatataaaagtctctttagggtacgatccagttgatggtaaacacaaagtagtgtgcatgccgtatggtaatgctttttatgagtgtcgggtgttaacattgggatcagatcaagaatggagaactgttaaaaccaaccacaaaaatagcccttttacattccatggtggagtttgttatagacaatccagatgcatcaacggtgttatatattatcgagctgatactaattctggtcgggtgatattgagtttcgatgtaagatctgaacggttcgatgtgatagaattaccatgggatgagaattttgggcttgtgatgatgatgtcttataaaggaaggttagcttgtcttggtttcaatcatgagaagaatagtcgttcaatgtgggttttggagaatgtagagcagcgcgaatggtcgtgtcatacctatttacctatttctcattatgagccgggtttggagaactatttcaatctaacaggtatcactaatgatggtgaactgatttacgtaccaaacactgtgctcgaacgttttcatgttatatattttgatgcaataagagagacgtttagaagagtcatatacaaaggagttgcagataaaggttttcgactacgcaatggacttgaagacaaacctatacgtagactccactttttccccaatcacattgaaactctcatgtctttgtaatggactttgaaattccttttcttggttttcttcttatttttttagtgtacagttttattaggcaactttattattttactagataatgcccgcctatttaggcgggtgtaagatataaatttattcaaatatttatcgataatatttaaaatttgaatagtaaatagtgatccacacacttttctaatatttaatttagtaatttttgaattaaataaaatttcaaccatacacattcaattttactatacattttaactatctctttcatcataataaactgctttttaattctatacactccaacttattgatgatatttgaattttaaatagtaactcatatttttcagtatttaatttagtatttccttaaactaaatttcaatcttacaaattcgattttacaatacaatttaaatatcttttttatcataatacaatacaatttaattcgattgtatacaattcaaatacaatccaatttttcaatacaaatacaatttaattctatacccttcatcttattgttagttttcctttttaattaaaagaagttataagttaaattttttagatatagaaatataaattagtatatgtaaatatgtttatttcttttttttaaagaaacttttttttgacatatatcaacatgtcaatgatatacttgacacgtgtcatgatctcgtgagttagtaactttcaaaaccgtgtactttatataataagatatcacatgttgtttttttcttgttttttttttcaatataatcatatgttgttttcattatcaaagttcttttgtgatctatataatggattttgttactttacaaactcaacatctccaagaggttttggaatggttcgacgatcactcttacaatcaattctagatccaaatcgaatgggcctaaacccataatgggcctagaatcaaatatttcactcaaaacccaataacaagaaaccagagacctcctctgtttccgaatgatcaaatcagcaatttagaaacaaaaatggccgccaacttaaaaaccctaaaaatctcaaatttccccagtagatgaacacgttcttcaaactcggaagcttaatccaacgcactgcttctcaaatctcttcttctttcccaaaatctcgtttcttctccgatggagaaagtgctgtttatcaccatgcgcgtttgttcaagaaaccactatctaccaagcttaaattcaatcttgtgaactccgtgagtcttatgggtttcgttgatcgatctattcaagtcatgaacaccggacctgataggttcggtgttttcactattcttagagtcaaagaccctctcaatccaaaccggagctttaggtcaggtttgttcgattctcatagtctgttgcttattcgacgattagggttcttgattaactgagtcttaatgttgtttgatttcaatctgtgcataatcctgtattgttcgtaagccttgtgattgttaaagtcttagtcttttgttaatgtgttgtatatttaatgacaggatatcacttagaatgtgggacgcaatggcacggacttgtattgcgcatctgaagctaaatgatcatatacttgtctcaggccgtcttgagtcttacagcaagagctccagcgatgtatatagtggcttaaatctcgattatcaggttcaagttcaaacttaaactctatattagcaaaatgtcccagttctattaccatcagcttcttgtgtagtcaagagtcgtttatatatatgttttaaagcaacttcgtgtatctgtgtgtagctaagattgaccaggctggtaaattattgcaggttaaagtggcagaagtgaattatgtggcggctccaccaagtcacgtcttagattctcagatatccaaaaacccaaaaacgaaaacaggttattatctcttctacgtatcatcgtctctattggtagtgaatatgaatccacgttgattaaaagaaccttgtaccaagctgaattcacactgaaacaggttttatatcttctggttttgtgtacttagggtttataaaaagtttcattcattagttttgaatgttgtatacattttacaagataagatgataaatattgcctgctacttgtgtgctttggtgtttccttagaggatgatattgaagaatccaagaaagatgagatatacttgtggcaagtcttcttttcgaatccatacgattggtgggacaacaggagaaataagaagaacccaaagcaacccgactttaagcataaagatacaggtgaagctctctggctttgctcagatttaccggactggattactagacgacttgaattgttcgaccagaaaaaccgcttttacgatgaagaaaaaacacgtcgtgaccgtctttctgactatatttaggacgagatattcttgggaaattacaagtatgttgcattcacttcatgtttatcatctagagaatgagagttaaccatcttaaaaaccgtttatgtatagtaaaggttatgatttttgtgaacgttgtattactatatactatataattttcttagtaggtatatataattgtttgaagaatccttattgcagttattcacccagctcggtggtcattcattggtcagtgtttgcccaccagggttcgaatagcatgcacccaaaagttgatgattcatctttcttaaatttgtgtgtgtgtgtccatatacagtgaaacctctataaattaatactcgatgaaatgtatgagaccaattgaggtattctaaaatacctttttccaattattttattattgaaatttatttgttagcaaaaagaagtgttatgtacacaaaagaaaccaagaatgataagattatcttgttgcaagtcttcttacagtttattatagtttttgctactcatattgcaaaatccatcgcttggtaaataattctaagattatccggtttatgtggatacatatcagttttgatttaatttttttcaacataatcaagagagacccacaagagaactccaaattttcaccgttggagatgctctaagatgacagatgaaaaaaacaaaaaaaaaaagtataagagaactctgattagcagaaaagtccatatttatgcaagtatttttttaatttaaaactttataggatcaatatgtctatatttgttacaaataatataagttatccgttttatgtggatacatatcagatgaaacagcgatgactgcagctattcatccggtttggtggttggtcattcatggttcagtggttatccatcagggatcgaatagcaatgcatgcaaatcgaaacctctgtcttgttcacataaatatatatatgtctgcgtatatatatcacatacatatatgtgacaccaatcaaggtattccaaaataccttttttcatttattataatcattttaaagttatgaatatatttaggaaatggcaaatagaataatgttgagttgaaaaaaaaagctaatgtctacggatttaatggattcttttcatttatttatttttttgctgccaataagttagtagagtgtaagataaatctgaattggtcgagtaaaattcaattagtagacagaggtttacgtgtatgtaaccatgaatgacccaatacagtgaatcattaagatgcatcacatgtatgtatgtctatcagttcagtacatgtgatccaaatacagaagaaaagctgttatgtatcactattattcttacacacatcaaagagtcaagacaaaggatgttacataaagatgagtcctcaaaaccaatgactcatttattttaagtaaaaccaaaaacttccacattagctttagattaatgcaacggatcaacaacttggccaatgaacagaaccactcctgttatgttctctgtgaccaccaatagaaacggatggtctgcaacaaaatctatttcatcttcctccataagcaatcctcttagctttataactccagctgatgcagctgcagcttctgttccttcttcattcacttcgatacacgctttatggaaaatgttcgatacgcatagattcttccccatctcaggagattcaaccatctcagttaaaccttcttcaccgctgaaaggcgaagtcagtcccaatccttttaaaacatttgaagcatcgaacccgaaagagaatttaaactttggaatcttgaattcgcggactttaacttgtctgcgtgggatgtggttgtctaagaacccaggagtggaaactattttgtccagaagatcagacagtccgttgtttgcatcgggaagataaaagtacatggagaattgtcgcttatcctgtccttgtaagtaaggaagtcccaaaactttgaaaccatcgtaagcacttacgtattgtttcttcttgctggtcatgaatggtgcagtcactttgttaccgtcaagaaggtgaaactcgccttcttgtgttaacgactcatcgaatttctcgttccatgttcccttgaagtacaatgcatttgcaaatatcagtttggtcatactatcagctgatccttctggaagaacctcagtgatgagaccatttgtctccttttcagcccatgaattcacttcagcaatcacctccacagccttcaaaaacaaaaattatcaaacataaacccaatcagtacatcaaatcacaaaccttttaaaaacctcatttccacagccttcaaaacagaataatcgaccttaaccctatcagtacatcgaatcacaagccactcaaaattccacacaaaccaagatgcataagaaaccctagacacagccacagaatcaaaacgtagtaatcacatcacaagccactcaaatttcacacaaaaccaaaagatccataagaaacaatgaacctatacagatcctcagggtaacataatgaaaacaacaaatccacattttggcctttgattgtgtctactaaaatccacacaaagttagtatttacaacaccctaggaagcagaatcaaaatgtagtaatcatattgcaatcaataaaacgaattcgagagcaagatttctgtagaatcaaatcacaagccaccctaatacgatcatatacagatcctcaagtgtaaaattcagaaacaaaaattccacattttggcctaagagtgattctattacaatccacacaaagttcctctgtacctgaagaactaagtctagatcacagaaccaagtaatcaaatcagaaaactcaccttcgattgaaaatcagcttgattcgaagcagctttatacgaatcttccaagagctgtttaaaggaaggtttaaaggagagagacttatcgatccaggcgccattagccaccgagagcttaggaccaccgttagcactaccgtcagcgagaacagcggagacgatttcggaagagaatgaattaagttgatcagtggaagagaatttgagaaacgagaggatctgatctttggtagcgccggcggatccagcggcgattatactgagtacgacgttgattgaagccggtgagaagatgacgttggagttttgagagacggtggtgattacgtgttttgcgagattcatggagacttggttttgcagtgagattgattcacgcacgtccattttcgccggaggttgtggtggtgatgactggtaaacgaatttgctgggtttaggagaagacgattgatatatttattttagagaaatatcttaaaattatataataataattaaatacaaagattataaatgacatgtcggtcaaatttttttattttttttcttctagcacgtcggtcaatggtatttgactatctggtggcatatgaaaaaatttcgttatgactatttcgttatgaattttttttatagagctgaatgttttttttttaaaccgagtaaagaagaaagagagacaaaaaatagggttttgaaaaactcttatacatttagaggatttagattcttaaaattttacttaaaattactattttttttgtataaataaattagaaaattataattttttttaattataaaataaaataagggtaaataagacttaatttttttttgaaaaacctacatttgactaatttacaagaaaaataaatagatggacaattttgttttgtagatatcctttaaatttagttttcccaaatattttttgtttttaaatttcgcctttgaaaaagaactgatacagatgtttttttaaaaaaactaaaccttcattacatagtaaaactgatataaaatgtttatcattgatttttcaaaaatgttattttcaattttcttcataaatcgttataaaaatatagaaaaaatatgctgacttaatccacaaaacttgcagtcttaatataaaataaatttagattactcttttttattcacggtttttattagattgtcaaaacctatcaaatattaagtttgactggtgatattgttagaatggacaaattagttagcaatttagttcgctttattttttgtgtgaattataaactgccgtaaaccaactttacttatatgtaaaaaccgtttatatttagttacgataatttcaattatttttattgtactctcattataatttataaatatagtttgtgaattataaattaaaactaatctaatttgttcatctcaactgccgcaaacattcgcgattattgacattttagtgtaatataatatgtgtaagaaaatacgctcaccgcacacgtcgaagcgccaagcgaagaaggtggcacatcggcaagaggaaaaaagatgaattgacaaaatcttttgaaatgatgtgtaagcctataatgaacttgaatgtatatgaattaaaaaaaagtgtgaatatgtgctttgcttatcgatgacttgttgtgtttatctctcggtggaagcaatcgattattataaaccatgtcttcgaccagaccatctacacatctttttatgaattttaattctcaagtctgtgataacaaaaactaaatagagactaaactaaaataataatttagaaatggtcttttctaattaagaaataagatggttttcttctcaagatgctatatatatttttagcatttgatattatgacactaactaaataaaacctctataaattaataatgttgggactgcaaaattttattaatttagagaggtattaatttatcgataaattaataataaatatataaagagattttcctaatttggtaaatttttaaaaaatttctataagatttctttctttgtagaaaatatctttctaaaatcagttacaagtaaaacataataataatgtttagaaaataacaccaaaaattttgatacagtaaaatatgaaaactatagtcaaacaaagaacaaatatgaatttaagcaaaaaaatattataaagaatttttttctataatatatatatatatatatatatatatacaattatatatatatttatacaattattaatttatgatattgatgagaccatatatttacataggactttcaaaaaaattattattttattaatttatcgatttgtgtcacattttacactggtcctaactcgggaccgaaagaatttattaatttataaaagttattaatttatagagtattaatttatagaatttatactgtagtttttctgacacaaatcttttatgtttacataactcgactaatccttgtccttatattgaggggcaatcaagtttacggtttggttcaggtttctaattttattggttttatatacgggacactaaaatcgaaagaaaatacggtttacttttgcatttggtttgatttttgttttcgtttctgaatcatttctattttagttaaacgtttttaagtgagtacaataaagaataattttgttatattatacatttttttgtttgttttattatacttacataaaatgattaaattattttaaatataaagatgtaactaaaatatttttaaaaaatagtacgttttatttgtttagttcgattgtgtttagtaaattcaaaatgaaatcaaacagtttataagtctttagactaaggccagaccgcaagggcaaatcttaggcattggttccaaggacggtaacctactgagaatgaaggaagagaagcgtgtgcaacccttcaacaacacctcaaatccttaaatttgagggctttttgaactctaacaagccctcaaccctttatttttttagggtgtgaatagtacaacctcaaatacccttaaaatctttcttatatttcattttagtctttataatttatatattttacaaatagttatatttagttcaattatttcaaatataaccatataattcaaatacattgaaatttaaaattgaaattattaaaacataaaagatataatgtttcaaaacaaattttatacaacaatgatatcacactgaacaatttaatacacattataattaacatttcaataataattataaacatgaacacacgagttttattttatattttttctaatttatatataattttgtagtaacttgtgaagttttgtttttctaatattgtttgacataatatttttgaaatgtatgttttctattttttttatataaacttttatcattataaaacattattgttaatattgaggactagaatgtaaatataaacaaattttagaaatatatttgcgggtatgttgttggagcaagtgacccttaaaccctcattttgaaggtttctcatccttaaaatgatggtcatggttggagatgctcttagaacgttaatgttaatgcttcagagtaggcgttcaggtatccgttcagattcggatagaatattttggatttttgggttttcggatttagaggtatataagtcatttgggttccaatcgggttcaacaataatatttcggatttggattcggattacccaaagttcccaaatatcaaattttttataactaaactatttgaaagtacacaaaatatctagaaatcttgaatatttctatttaaaagtagattaaatatccaaaaatatctaaaatatccatgaaatcctaatatctgaaagtagctccaatcgtagacaaataggcgaaatgagctggagctaatcctggcggcaaatgaggaacaatcgccggtaaattatagtgagcgcagttagctgccaaatcatccattgacgaagatgatttaataatatcaaatgttgatcaatgagccgttaaagctcatataagtagttagggtgctactcattttttgaatctcttccatcacaaccttccccactttctcaataaagttgagttttttcccttgagttttctcaataagggcatattcttcccttgtgttttctcttgtgatgtcgagcagaagccagcgaatatcaagtaaaatagtggtaccagatttgtcgtgctcgagctgagcatctacagtggtagtactagagaatcaagaaccccaaactgttatggagttcgggtagtagagaatcaagtatatttattttatattatgaccctggtaaaaattatggactaaattataaaatattttagaaaatttgactaccattaatgttatatctcatttgtagttatacattatgattatttcttttgactaccattatgattacttttgaaaataacatagtccactattttaaaaagtccaactgcgattaagaagcttctacatgaaaatattattgttttttctcataatacttacacatcaaatacttaaataacatgactttactcgttaatgtaccttttttttgttatttgaaatgttaattttgtgatgtgacataaacatagtcttattaaaaaagcttaagtgtattttaaatatgttgtttgtacaattttgtttgggttaaaatcatttaattcaattgatcaagtctcaaacttatttttctttttgattatgttatatagttgtagtttcactcgataatagacttttcttcgagatatgctacacaaattatagagttgtatttccactgccatgtagtagttactataaattgaagtttcaattcaagttatatttttaaataaaaattttctttcaaatattttaatttttggttgaataatttgataaataagattacacatatatagttccaactcatgcaatatatctccttcttcatgtgtaagaaatcaaggaagttttggctcatatatctaaatctttatttttagtgatattttttgctaactttatttgtaaataacacttgaaaaacctaaccattaaaactagcgtttggctacacagatttaatatttactaaaaagatatttacaaaaaaaattgtccatctatttttttttggtaaaaatgtcaatttggactaaaatacccttacacttcattttaagttgttttcaaaacaaatattcactctaacatgtaaatatagaagaatggagatgttgtgaagtgtaatttttttttaattttattggaaaagagtgattttttttaatagataaagtttgtatgaatttgttagaacacgttttctagcgttatacgaaattcagaatgtgaattctacatttttgtaaagattttacgaattttgattttttttttcgttctaaataattcaaaagtctgaaaatccgatttctaaaatttttagaacacgtattcttggaattactctatgaactaaataatttggaataacaattctacgaattacttcatcgtttgctaatgttaaaaagcgtaatcttcgtttagaactgacattataccataatctagatttgagtttttgaacttttagaaaactctgaatatagatagtgaataatcctactatattatttgggaagtacattttaaatgtaaccttattttttgtaagtaattacataggtatgccattagaaataaaatttaaagagtaaattaattcatctctttaaaaattaaaaagtcaaatactaatttaattagttaaatttaattaaaaaacgaaatacattattaatttccaaaaaagtaaccaattaaaatcaacaaattagatttgatatctaaattatcatattaattttttattaattattatagttcacctcttatctttatatgattctatttttgcgaaaaattaatatcatcgttataaaaaataattagagttttttcgcatacgccataatttgaatttttaaaaacgaatataaactgttcaatacatgaaaaaatattgtaacggatcaaaaatagatttaagaaaattttctactgagtaatgggtcataatttgaatatttatattcaatttcatacatattattttaaaaatttataatcttatatactacaataattaataacatattagatttttttatgtgtatgatgtgattcaatttttaatacaagctggaaaatcctagaattgacggggttaaatcgatattaatacaagatggtatactaaaggtgaaactctaaaattaacaatcaaaatacaagtgtataattttaaacactaaacaatataaataatatcaacaaaacatatacgactcgcagtttactatgcatttaaaatcaaataaaataatatcatatatttataatcatctttacaataaaagtttttagtttaactaaaatataagcctatgagtaacccattcgtgttcgggtagaacccgtttgggtttgggattaatgggtatatgatttactacccaatagaataattctaaatattccgttctggtttgggtcggatccagttgggtttgggtcagtttagataaaaagttatagacccaaaaaatacccaaaaaaatagaaacaagaaatttgtatttagatagcgggtcttcaaacaaaaaaaacttttacatttgttaagttttaataaatttaattatatttgaatatattttactaaattttgacaaacataacaaataatttttgaatagtttagttgttttggatatttaggtccaaaattaattgacatatttagacttataattataatcttagataattagataatattacgattaaatataattaatattttggatattaaattaatgtttgggtttttgaatactctttttggataacgagtaatttccggaccaatcggatatacacggatttactaaaactctacccaataagaaaatttcctaaaattttaactcgccctaaccctgttttttggttcaattattgggttggttatcgggtccgttttttcgtcagccctatcaaagataatctaatataggctccaattagatccacaaatagtataaccaaaatactatacaaagactaattttaagttaggccaaaaattagatcctctaatacaaaagaaacatgtttcttaccaaaacaacttgtatataaattttacacatttacttaaaactacatatgttgtatttattataaaaataacatttttaaaaaaagtcaattcaatgcagcattatatgcaaatagtaaaaacattgaaaaatattatagcatcacttttatactatactatttcttatgtaattcaaacaaagtatacaatttaatttatacaaaatattaatgcccgtgctatacagcacgggttatgatctagttagataagaaaactaaatatttattatagattacgttttaaatgtaatttattttgtttttattacgatttacagaattgagagatcgtattctaaatattttagaaacactaaaagcaaagtcgtccaaaccctagcagctagtttttcctttttttccatgtttaacaatatttgtagtcattttacttttatttgtctccaaaatttactatattttttctttcttcttctattccacaatgtgtgcctttggttaatagatgcacatttacgtaattagtggtgtgatgcacatttacgtaattagtggtgtgtggagattgtaagaataatatgttctcaagaacttgtatctaatcgatctaacaccttctaagaacatttcatgctctatgcatgaaaacaaagtcactttgaagtaaatttcagaagatataatttggtaactctagaaaaaactcttgtgactttaaatttcatgatctaacaccttttggatctctcaaactaaaacaaagggaacagaaaggacttatatatcaaactctgcaaaattttcaacctcgtcaacgtaacttttttttttcttgtaccttttttgatttccttgcatttgaagaaacttagcataatggttactttggttttttacttctatccattttcatacttacgtatagggatttgacggttcgattctgttagacgatacgtcgagcatcacatgagaacaaaacgcggccctaaaccgcaattcagctagtgaatttaatgtgatcactgatcgataacatcaaatcagcggtttagaaagcatgttccgggttgtatcttgcggtgacatcttagccattgcagctagaaactctgtcgtaggcgtaagctccatgtttcttctctcaatcttgttttgaaacttaaaaaaaataaaccggtctaaaatatgaattcttctttatatatgttgaagcttggaggactgaattaatatgtgaaagtaggaagaagagatgcaagaacgggggagtcaaacgacgacgaatatgtagaaacattatatatggtaggtttagtcatttgagagagaatgagggtagatttgggtttaaaattttataacaacctatcttaccaatctactaaaaaggtatatatggacaaaagttgttgtagatatcctacatatccaattttccctatatatttttttccaaattttgagtgtgaaaggaataaaaattcaatttgtttggatgaaataatagttaattttacttgatttagtttttattttcttacaacaagtcaaatatattttatgtctatatttaatctatcttatctcctcgtaattaactacaaactacctcatgtatatataaacgttctcatctcatgttcctcctacctatgaataatctaaagtaacaaatattttcacttttcttttctttcttcttcacaaaaaaatatattcctttaacaattcaacccatggagaaatcgcaatcatcgtgtgatacacggaaaagaagtgttgtagttgatgttgacaacactaaagatcgcattagcgatctcccaaacagaattttgggtaaaatcatagtaaaacttcctttagacgaagctgtgagaattatggctctatcaaaacgatggaagagtatatgggatgataattgaggataaatgttgtatcaaaatcttttgttttgaaggttttattattctatccgaatttgtattcctcagtaactgtcttattgcaacttattaataagttatttaatttaattaaaaaagatgtactctttttatccttcaaaatatgacagatcgctaaattaagaactatttgttgttgttattagattcttttttaatagcttctctaaagaaatttttgaaaaaaatatagactaatagatctgtgtataaactgaagatttagggttggtgatatataaaaaaaagacttaagaactcctgaataactctaggatcttgtatgttaattgttgaagtgagaaatcaaaacctagataatcgatgaatacctttggtatatttgtgctcaaataataaaagaggtaagaacttcttcttttttgtcaatcgttattaaattattgttcaaacgagccatttcttagaagagataataactttattaattactttcttattgtcatgtaaatttaagataaaagttaacgggcttttggtgcgtaaaatcttttattttcaaactttatgatacatacatttgaaattgaaccgtgaacatgatattattgtagtgaatagaaaatttaggaaaacatgaaattttgtcttattaaacttaaaataaataattgcatacagaaaaatattttttaaggattgttttgataatttattgcaattcaagggtaagaactgttggagcatgaatccaatatattccaatggagttatgtataaaccacaatgagattaactatatgaaatcatagttagggaaattaaagattaaggtttataaatgtattttggacaaaaagagcaataaaatacaagtaattaatatttttgcctagataacgtcaatacaatttgaacttcaaatgaacttggatggtaagatatattataagaaaagtttggagtagaaaatgttgaattataattcataatatttaaataatattttttgcctatcattgtttcagtaaaatctactgtatattcaaaagattttttttggaaaaaatctttattgttattatatttagatcacatcccatatttgaatcaaaaattattttcagtaattggaataaattcatttgaccctcgagaagatatattttaatataaattataaatattattattttggtactacaacaaggattaaaaccttattatgatattttgacatgtcgaaacaagttgatttagttaaaattgtgtggaaaaaaatttgtttatgatatatcgtgggctaattaaatttcggtgtgttgcaatgtatcatactcatttcagctttcttagctaaatattacttgtacttcaataactagtacaaaacaccaaaataccatgaccttgcttcttttgatattctctaataaaacccaacttggtttaaacatctctaaaatctgacttgattccaagattgaccaatcatctaccttcttgagatgcagcctcgtgattatacttcttgactcttcatctagtttctttagatgtagtcccatgatctttgaatgacgtacgacttctccccacatatcatttagaatcttcattagatacctagagattcctcctctatgcaacatcgattgaactctcttgaagtaaactcccctcctttatgggtacgaaaggttttaatagacaagccgacttgcttctctacaaactcttgaaaagcttttaaaccgattagaaacttgaatcaatatgtcaacaaagaaccatctcgttcttgttgactgattcaactcctcttcacatgctttccaccattaaagcacatctttagcctcttggctcattacttgtcgaaagttgacgtctcttacttttaacataagctt

SEQ ID NO: 25 - DNA, 119091 bp, Arabidopsis thaliana
gaattctgcttttgaagtggaagataaaatctctcgaggcactggaagctcttctcgtggaggatgatgactgagttccaagtcttgaggaagatgattatctctcttctgattctgattctgatattgaatcttaatgctagacaaaagagttgacaaatctgtcctaaagaaaatgttttctgtttctcaaggtaaaagaaaatgttccattgaataattccaaactaaggcactaaccctgactattcagtggccatatagtgttaccaagaacaagtagtctcaacactagaatcagctattcagataatcaaaatgtaaagtgatcaaagtaaattcaaggtgaattaaaattactatcagaattagctgattatcatatcaaaatcaagtaatttaaagcaattccaagatagttcaagatcatacacgaactaatgaaaatttatatagcatcaataatcagagatacatcataaaaaaaaggaacagccttgttggatcttcagcaactagaaatctccattgtttatttctgcgaacgaatcttgttgatttcagatttagcgtaatcaagttgtttctgcgcagagattttcgctttctcggctgatgtgaggaagaagaggttaccgtttttctggtagatacttcgagaagaagagagactgctcaattcatctaacgaaacctcttgcctctttatctctttctcaagctcgaattcgcgatccgacgaagttgtagtcgccattttttccaccggtgcggcagcgactgcgacggaaactaaattttcttaggtttctagaaaaataaattaaaaagaaaaaattggtaaaagccagagtcccacatcggaaacaagttataagatgataggttttggtcgagtataaataaagcggctttgaggtgagaaaaatttatctttgcgcttggggcaatgacgcagctaatgaggttctaaccgaggcgcgtctattgctggttgaaaactatttccaaaccccctcctgggcctaagcttgtcttgggccttcgagaatttctggaagggctcccttcggggtaaagccctacaatctcccagttaaattttttattttgtataatgattagcttattgcctgttttacatttatcagtaatcatcttctattttgaagtctacattttgtccatgactaataaaccaattggttaagtactaatgttatcagaacttggtgcaccgatgtaccgatttatgcaaaaacaagtttaaacagcttactgatttgttctaaaactcgaatgttaggctaacaataggtaatttttcgaatttgttgtgatacttcctaacacagaaattctgtcaaataaagtacaaatatcaatagtccaaaaacttttgtttttatccgagtttgaagaggctacaaacaaacaaacaaatggacaagaatagagaatgaagctgagtttgaaacgcggattagtgcctcaggtaagagcgagagcgggttttcaaacctgctcctccttagacatctctccaaacgctgtaaccggaaagtttctcacatagtgcacaaatgacaaaggggaaaaaaatttgaaacaaacaaattggagaaatagaaagaaatgtgatcccgtcatggaaacgatgtctctttagtttagaagcattttctgtggacaatgcctggacctgcttcatcatactctgccttagagatccacatctgattacacacacacacacacacagaaaatgtaaaccattagaggagttgtctacatttaatcaaccacaagaagcaaaaacttagaaatgacagtccaattttacctgctggaaagtgctgagggaagcaaggatagaaccaccaatccagacactgtacttcctctcgggtggtgccacgaccttaatcttcatgctgctcggggcaagagctgtgatctctttgctcatacggtctgcaatacctgagaacatagttgtaccaccactgagcacaatgttaccgtaaaggtccttcctgatatcaacatcacacttcatgatcgagttgtaagttgtctcgtggatccctgcagcttccattccaacaaatgatggctggaaaaggacttctgggcacctgaatctctcagcaccgatcgtgatcacttgtccgtcgggtaattcatagttcttttcgatggaggagctggttttcgaggtctccatctcttgctcgtagtcgacagcgacaaaggaaagcttctccttgatgtctctcacaatttcccgttctgctgttgtggtgaacatgtaacctctctcggtaaggatcttcatgaggtaatcagtaaggtcacgaccagcaaggtcgagacggaggatagcatgtggaagtgagaaaccctcgtagataggcacagtgtgagacacaccatcaccagagtccaacacaatacctaaagaaaatcatttcactgtgatcaatatgacataatcattaaaaacagaaaacaaaactttgttcattttctcgacattaataatgaactaaccggttgtacgaccactggcgtaaagtgatagaacagcttgaatggcaacatacatagctggagaattaaaggtctcaaacatgatctgagtcatcttctctctgttggcttttgggttaagaggagcctcggtaagtagaaccgggtgctcttcaggagcaatacggagctcattgtagaaagtgtgatgccaaatcttctccatgtcatcccagttgctaacaacaccatgctcaatagggtatttcaatgtgaggatacctcttttggattgtgcttcatcaccaacatacgcatctttctgattcatcccaaccatgacaccatgatgtctaggtcgaccaacaacactggggaaaaccgctctgggagcatcatctccagcgaatccagcctgcacaaaggaacttgtatcaaatcttgccaaaattaagagaatccttaaagtaagaaagaagagactaaccttaaccattccagtaccattgtcacagacaataggttgaatgtcatcagcatcggccatggtctacgatctgcaatcaaaaacataaagatctgaatcttgatcgagaaaaccgaaaacacttgcttaatcaaaccaggcttttcattcatgagtagattcaattcaatgtatgatgtatctatcaatagaatcataatgaaagcagatttcaacgaatccatactcatcggaagacaaaatgttacagtcaataaatcaacagaatctgaagtcaaacttcaactaacatttcaaatttcagattcctattgacagaagaagcgaaaggatccggatcgatttcaaatacaacgcaagatcaagtcaaacatgaatcgttgagctaatcggagccaggatcaaaaatttccaatagtttgaccgatctaaattccaatcaaaatcaaatcggaaacaacttttgaagtaacttagaaatcgtaatcgagatccaacacaagaacaagtagatcggaggttttaattaccttaatcggaaaagcaaaagcagaagatcgagagatcgaggaagaaacaagaaccacgacgatgaagatctggctcactctttctcctctttctctctcttatcgccgggaaatgcaacggccgatgaagctgaagacgacgaggcaattcaaagaggggagaagaaataaaccgagtgttgaactatttatataggcgggtttatctgaaaaactatttttttttctttagagtcatcaattttggaaataattaaattcgacaaagacgaatcatttcgatcatacggaaaaagtataacgtgacatggctgtcagacagcctcttttatttatacttttttgaaaagtttgtgaaaatttgtgagccgttggatatatcagttggcgaatataggctattggattgactgtgatagggtcgacatatatgacagcttcaataatcattccttttttttttttattattcttttcatttttcttctaattttcaagtcggcgatcgggtgttaccgagtcgaggagacaacggtggtcgtgttttggattgtttattaaggaaaatccacgatttctacaaatgttatttctatattgaaaagggtacagttattttttttctcctgaaaacgtaaacaagtcctgaaatattttgatgattattttcagaagacaaacacataaaacgtaatgtcaggtgaatgtagtagacccatgtatatatccttttaaacatgaattatgcaagatgaaaaaaataaaaaaataaacatgaattatgcaaaagaaaaatggcttttgattgaaattactcatatttgacattaatatagagtgtgagaaaaaaatatagcattttgtaatataatttcactttttctcgtgattttgtttgtacttatgttgtttatgtaactatttgtattttgatagttctctataatatgtttggaaatttagtttgaataagtttggtgagaaaagaatacaaaatggtatgcaattttgaaaggaaaaagacataacaaaaagagaggataaaagtgataaatttctatagtagtattagacattataatttgataacaacttattcaaaaaaaaatacaaaaaacaaaaacaatttgacaacaacacataaaatggacaactttatcaataacttactaaggccacgatgaactactcctgtaacatgcgataagtttccatctattagctagtaaaatttactaaaatatttagaacattgtgtaggaaccattgattaatcactagacaattttatcacatgtatttttattttataattacatgatttttatttcataataaaacaaattacgtgttatgttatattgttacatattagatagaagtatgtgactctattatactttttagatagaagtatgtaactctattattagatagaagtatgtaaattttagagaaatttgggcttataatctacaaaaatattatatttaagaaactaacactccacaaaaaagtaacgtatattgtttgtattttttgtaataatggcaacattatccttgtttgagaaacacgctcatcatcttcttcttttcgcaggaacccaattcttctctttcaccaactgttaactttcaaacagagttttagctctaataagttgcagtccaccttttctgaaacttctaattttgccaacaatcagcagaggtatattgacgatggaagcaatgcaattaatttcctgaagtgacttatagggtttttgattaaattgaattggggttttgatttacagaggcaaaacttcaaattttacaaaatctaaattgggggtttcagattttgttgtttgggttccctaccattcttagggtttagttttctgtacttataaacaatttgatattttttcaaacaaagtaaagcttgaaagcgaaatatatgtatctttacattttgaattgtcgtattaactgctaaactattttcaccctcatctatatttttttgttttgtttgcaggacttttctttgatgatgctactgaaaattgcttggatgaaaacaacgtcacgttacccactcgtattcaattcttcgcctattccacgcgcttactatctctttcgttagaaggagtttgtgatctttttaccacacctaaatgttattcactacattatagatttgtagtgctatattctttatttcatctcctaaaaacgtcatttttgcaattcaccctaaattttattacactttttttctatataaaaaaaagaaaatcaaacatttgtaattaaaaaaatcataaacaatggtaaaattatcatatgttatttttttttatgcggaagcgttcaaacggaacatatattttggccggtttagtgataactttgatatgaaattatatgggaagtgatgtaaacatcagttaagagcacgaacgaaaattaatcccaaaccaccgctcaaggtcactttgacttcctattgatctctctaaattctctctctttaaaacgttttctttctttaattttttttctctttgtaatgtttacaaagatatcttttatatctttctcaaatcgtccttttatggacaaaagaagatgaaccatagagagacaagaatggttttagtctcttaatgaagtaacttcccaataatactgcttaactaaaacttgtttggtatgctgcaaatcgaccataaaccaacaagtttcctgacaacccaaaagcctaatgtcgtagttattcgtattaattacaaacacgggttaaattattaggtataacaaaaaaaaaaaattaccaacagatacaacataaataatcgtcgtattttaaaattatgcattcatttcgaatataaagttaattagttaatacaggacaaagaggtacacatcagatatacgaggcagtacttgttagctatatctcgtaatttgtcttggctttgagacacatccactacatttttcctttttctttttttgggtaaagtacccactagtccactacaatattataaaagtttgcaattatatatgtacaacagctcacctcagctcttcattgtgtaacaaaattgaattgaattttaagagatgggaacttttgtattgtagctaccaattatttatgtttttagttaaaagattaattgaggtgtcatgcaacattaccacttatgtggagagtccaaagaaccctaagaccacctctttgtaactttgttgcttgtcatcacttatgtaacgtttggtttttatctttaccagcctctttcttggagtctttaccattctgaccatctagtacagattagccatgggatgaataaccgatctgaaataaccaaattgggccgaaccaagattttagctgttcgctttgaaaagttacatgtccttaacagattggttaaatttgaattttacttcaattaaccaagtattttgctttagttcagttatcacttatcagttaactaaattatatgttgtttataaccagattataccacaattataccgttttttaccaaatttaaactagtttccatcgataacctagccaaaattaaactacccgaatctaaccgaagaaccaaaattattcaaatataatttaaaaatcggattagaaaataatcaaatattcggttaaattacattttggggataaaatttattttttagttatatatttttgatctatataagagagtggatggatataaaccacaaatatatgtacctacaataatgaatccaacaaaaggtagttacaatccacatgaggtaggtaccattaaaagaaaactacaaaatcttctatttttgttacgagggtaaatagaaatcaaaagatgtgtagaacccaagaaactgtcataactaaacttttaacgttggtccactaaccggagcaaaccggtagaaaaccggaaaagaaatagctgttgtgagatggaaatccaaaagtcaactttatgaaccatgtgtacagcacatgccgagagaaaattgagttggtagtactacccttaagaacgttgtgccccatcattatgaaactacattactcatgatcatgactatattaaactgacactccattgatatataataatacatatatataagttatatgaccggccacgttttgatataatatcggaaaaagtcaattaacaatcttttttgttattcttggttttacaacatgggttgtgaatggttacggcggttggggcggacacaaccgtcaatggatcaaaccgctttttatttttcattcatcaattatagtccgcagtggtccaaacaaaaaaaaaaagaaaaaacccgcagcggaccatctgcgaactatttttacatacaaataaacttgctccgcaacggtttattatccatcccaaaaatgaaatggactaaaccgcagataaattagaccgttttgtccgctgcctccattaatagcctatgtgtttttttcttttctcatgtggttgtaaataatttcttgtaatgagtggctcaccacattcattataacttgttaaaccaaatgtttataaactataaccaacaaagagatattttaaaaaatccctttctattttgatataagaaaaacacccgatttaggaaaaatgctaaatgggctttatataaatgggcccgttaaaagccgacccgagtggaaactatggaagatccgatattggtttcaagagagaatttctgaaaatcattggcgccaacaaagcgaacaatctctgaacattgctacttcgtcgtcttcagcagatcttcatcaacgaatacggtaagaaaattccccatttttcacatagttttctgggtattttcgtacagcttcatttgaacttcgtatctttgtctccttattgtcaatttgattggagcgaaacttgattttttcaatttcatgtactcttgtttacttcttcttgttcattgtttaatcccgatacgtaattagttcagaagataatctcatttggttgatgcaaagtttccccattttggtatctagggtttacaatttcgttcgtccacctcataacttgtttatcaatttctttatttggagattagtgaccatattgatgggagtttctagattactactaaggatctctctttagctagtcagtaaagtactgttacacgtactgctttttttaaagttctacttctaagtaattgatattgcagctcttcataatccattatctatgaaattgatcttggtaaatgccggttgttgaattattgtggtcactcattttcttcatgtggtcagtataacattgaacctccccttttagtattatttgatttgaccatatggtgggattcgtcctcggaccccattcgctttgtgctgtttcttatggtggtgacctctctctcttgttctcctttcgatggattatattattgcatgtttctctcatttgtgggccttgacatttttctccggggcttcgcattgtcacagcctacaacttaatttgttcaataacaaagcaagaagactcttctacctctggaagggtacattatgttattgtatgatttatataaaagtgtagtaacccttatgataatcagtaaaataagctagtggcagagcctgactttaataaccttgaaacttcataatggtaaagattatgacatctctctttagttgactaagtgtattggccacctccactaaactattgctttaagcctttcagtgattttccttctcatcatcctgtacatttgatttttgaattgtttatgttttgttttccagtgtgagtatttgcagatctaatgaaattttcctttattggcttgtaactgtgaaatataaacatttagtagttcaagatatgaagaaagtaacattctcgtaatatttacaactttacagttgaaatgctaaacttgtttttaagtgtagaccgcttgtaatctcaaataattctaaaacatagtagtttaatcatagctgctacaaatatctaggtgactagttctagttcacctaaaccagcgtatccatctttccggttctagtggtgctatttggagaatgatgctgtcttgtggtggttgagtagagtttaacgagcttgtttggctgcagtcggcaatcttctcgcatgtctggatgaggcagtgcctgcaggtgggacaggacgagtgtgaactaagccacttgtctatacaacggacatggaatccatggtggcatgtcggcaacagcttcacacgttcctcggctacaaattccgagagacagatagcacactcggtatctaagccaggcagatttagttcagtagagtaacttactgtctggaaactcttcaaggcttttcgtttgactcctgtgttggtcaagcgaacaggatagttgtcaccaccagcttcagatggtactaaattggagcacctcaaggcacatcttattatagaattgagtccaagtgagcaaacaagtgcacataagaggactgataggaccataacaacatttgcatcaaagttgttatcgcctacatatggggatggtgctggagttggtgattgatcatgggtatgaaatagtaattttcttgagtaagaacttccaagaatttcttgaaagatctcagttggttttatggtggaaatggaaatggaaatggtagtgcacatgataacttagttttaagatagattggtggctttctgtgtttccgttggaggttgtttatatagagtaaaggtttggaggctaattgtttatatagaggaaaggtaaagtttcaattttttttcagatatttaatgaggaatttttttttatatatttcatttagaaaaacttatggttggatgaataagaagctataaagatcaagctcacattatggacctttacctttagtgtctaattttataaaatcatttgcagcgtaatatgctttgttatataaaatgggtccatcataccagttgctgcaatagtagtgccatgtggctgtggccttagcaaatcatatctcccagaattgcttctagggacccatgagctttttaactggagcagccatgaactttccctatctttgatatagcagcattcaaatattaatatctcctggctcattttactgatatctcactgttccttgatattagcctgttagggcttataatatatgttttctacttatggtcttgatgaaaaccgagtttcggtagatagttctgacccagtgatatatcacatatgtgtctaacctgtaaaggagtttctcatatataaagcaaggtttgatttaacttttcttttctttccctttttgctattttttaacagtggtggaatcttaaaagttttgttgattttgtgcggttttgagagtgtacggatgaaatatttccatttagtgaactctacttatgtttggggaacaggaatccaccccattcgtagtaactcaagttgtccatagagtagccaaaaggacaaagcctctcccaatcaatcttgttaaaggctacttttatcactctcatagcattagtatccacctcctgcttttttttcagtaaacagtttctctctctctctttatctttacatgcctttgttttaaatcagaggtaaaggaattggtcccacggatgaacgaataaaaaatgattctttttgtttgctttatgagatatcttcttccattggttgcaaattgcgagggaaatctacatgaatctagtatctaatgtttttcttgtagctccaaaatcaaagcaagattctttgatatgtgcttttgtataacattgtttcttgctactttcctaatagctggtttagtgaaacattagattagggaagattgtgtatctttgggataaaaagttgatgttacacagtaggagatgcatcttttctatcttttctcaccagtctcactcggaaatggattccttttttcttttgtctgtgccattaggttacatataactggtacaaatatatatagtggtctgttttcttggtaccttctttaaagcaaataaactttacttttgttgtgttatatgctataatgattcgtttgttgggaatatcttaatttgatactcattcactttaaaactgcaggggtaacatggatgaagatgagaaatctgaacagacagaaagatcatccaaactaaaattggtcattcaccgtttttttttttgaatgatggaagtgaaatgttaccaacatatcgaggtgaaatcacacgacacgacttaaggtgaaataacgcaacttggtgagaatttgaaatatttctgagaacatttttgctggatgcatttatgatttggaaatggttttggatccagtgggtgttaagagccataagaaaagtttcagaaacattttaattatagttctctttggctagaaagttgaaatactgaaacacagagctttagtcctgtcttttaatcatttatgtaccattattgactttctttggtggaacctattctttaatcatttactctttggcgccatttctcagtgttcatcttttggtgaacttttgattaaatatatatttgttcttagttcctgctaaatatctataaaatatctttttggtcattcttcctactaaatatctgtaaagtaaatatttatttgatcattctccctacttaataatttctttctgtcaagtaaatatctatttgttcatagttcttactaatatctttttatcttttttgtcttgttcatggtaattgctattttgatgacttatgcgtgtggatcggttttgaggcatatagattaattattaagtgggttgattcatgtagatagatgtaattttgtttcacaaactttgtgcttttgtcattatcaagagtacatgggaccaggtctggaccataattccatatggtagactacacactgcttcttcacacaactaactcttggcattagttattgggaaaccatttattctgtctagtgacgttttggttcagtgtactgatatgacacataagaatatacgaccagcacttatcaatctttggttatcagatgaatcttgatgtttttggataagattgcaaaattcacattccaccgtaaaaatagttttacaaaggaagtttgatggactcatgagatgctactgaaaatgaaacataatcactctgtatacactttgtgctacaggtaaaaagaaagtcataaaaaaattagaagtacaaattctgaattgctgatggtttctgtctttctttgcatctagctgatttctctaatagtgtttactcttccttcaggttctagcggagcaatcatgacaataacgatctctgttggttctagaggagcaatcgtgacaattacgatctctgttggttctagaggaacaatcgtgacaattacgatctctgttggttctgccgtaactgaatcagcttgactgaagtcacctaatatcttttggcacgtctcaaccagacagtttctgcattttggacaagtcagatgttgttgaagccacttgtctatgcaacgaacatggaacccgtggttacacttggggagcagcctgagctgttcaccggaaacaaaatcagacaaacaaatgacacactcttcgtcaagccctggcaggttcatctcaggtgagtaactcacaactgggaacattctaagagctttcttcttgattcctttgtttgatgaaccccgtgttgacgaaagacttggtacaggctcggagatcatgaaacgtgtagaacgtctgagtgcacaacgaatgatgtaatgtaacccgaggcagcagataatgccacaaatgaggattgagagaagcatcataacattcccactgaggttgttctcatgggttatgagaggagatggtgcaaccgcaaaggctcgttgagtgttgtggtcaaatgggttgtgcagaagcagctttctagagacaaaaccgccaaggaattgttcttggaaggcttgagctgaagaaggtaactcatttgcagacatttttactctttgagaaagcttaaggtcaaagtcgcttctctatgctttgttggctttctttggttattgcttcttaagttctgaggaattcaaagttgtcttaaatatagctcgagatgcttactgattactgtggggactgagtattttatctaatactatttttctaagaaagtggggtttcttctttttagttttttttttcttcaaatgagacttgagtgctgattgtgccattggcccatacctcctccaaccctaagatgcttgtgtatagggactatcacttttccaacattaaatttggaaatcatttatttatgcccgactttaaattataaaactttgttttatcatttttgtcctgtgttgagtcttgataagctagattctatttgattaacgttattatatgtttaagtctgggtagtatttgcaaattttattctgataattcccaagtatctaaatgtctgcatgtatatggttctcttgaggtgaaataacatgagaattggaatatttctggaatactcaagtaagagtttggatccaatgggttttaaagtgtcattaaaaaaatttcaggaacgttataagtagagctcacttttgcaagaaactggaaatactgaaacacagagctttaatcctgtttttttagttatgcatgtaccattattgattttcaatctatgaatttctttggtggaacctattctttaatcatttactcttgaacgcctattctcagtgtttgtctctcggtgtacttttaagtacttttcctactaaatatctgttaagtaaatatctagttgttcatcgttcctgctaaatatctgttgagtaaatatctatttattcaacgttcgtactaaatatctatttgttcatcgttcctactaaatatcttttcttgtcatgataatgtagagaacttcggtatgtgctaggatgaataggcagagcctattgtgtagcagctcttttgctttataacggtatgtcgacgaaactttctttataatactattagcatagttacaatatatgttatattacaaaaaggttagacatgaatctatcttactgatcaaggtctttaggccaataagtggccaagattttcttaaagcactaagatagtattttgaaacattatcttctaaagctatcattgttctctagtgcttctgtatttacatacttttaacgcgtattaatataataggatagttctcccccaccaaaagaacattataataattgcgatagtagcagaaatttgaacatctttgttataaattacagctatgatctattgatatcctacagttgttccagtagttaactgaagtaaaatttatagattgttgagagagttgaacaattttagaccattgcatgttgaagtaagggcattacttaagctaaacctgcaatttatcacagcaaaagatgtgcttaggaaaactttgttgcagtttttgtacttacaaatacttcgttgcagttttcacaagctcaataacatattaccagatatgatttgataccatctaagatgcgtgtaatggacatatgctacctgtaaaccacagtcttctgttgttaaccaataacccttcttttttgtggaaaagctcaattactctattgaactctcattgttaagtggggctgtgcttattaattgaacttttcaacactttagttatatctcatccaataagaaatgcctaggatcttaagccctatttgaaccatcatatttttatgacatgttgcttcattttaaattgcaggatctccaaaatctcgtagttagttattttttatacaataggttgtggattgcaacttgtttggctgttttgaatcacccagtgatcaagattctgagtttggtatttggagaatctatgaaaacgactaagatatcaagtggtatatcactatatctagtgaacactccatgcattcttttatattagcataactttttttttttttttatcattaggccaactttgtagttttcttctgttttcatactaggagataggacttccaagatctgaatcgttacactaagccttttgttcgttcaattttcatgaaaatatcttgcagtagctagtgtacaatacccaagatgtgtgcctgttgtggggaaaagaagaacaatagagcaagtatattagatctagacaccacgatttgatacaaactttagtaccaatttgataagataaagggtgggtaagttgaggcatcaatacggtaactggtatcaaccctcagagtagagtaggagatgcttgtgataagaatccttggaagtttaaccgtatttggtttaataatggtgaatgatttctcacttatcttgcttcataccatcacttggattttggtgtatgaattttggggatggtatctacagatcaactctatgtttttacagtgtattttggcttggatatgtctggtgtcaaagttagatctcataagatgcgtttatcactgactggcggtttagattcttacaaggctatgcattccccaaagtagcttcaggtctaacttgaaacttatgttggttgtttttctctattattggttgggtccatattcctatggcatagtttatttctttatcattggggggaaggatcatctgacatgtgttatttgctatcccgatgtgtgtttattggttttgcggtatataggtagtttatgaagtgggtcgtgtcaagtagatagatacattttttcaatatcaagcatacacaagatgaggtctgcatcgtaaatgcatgcacttcatagactagacactgctgctttacacaaaccttagcatcattactttttggttctgtgtagagattgtgacacagaagaatatgattagacaccatttgttctgtctaatgactttttggttctgtgtagagattgtgacacataagaatatgattagcacttatcagtcttggttatagataattcttaatgtttttggatatgaatgcatagttgacatgccaccattacaaataactttgctaaaagaactttgatgaacccgtgagatgctcttgtaaagtgagattatattcgctctgtcgacactttgtgctacaggcaaaaagaaagacataaaagaatagaagtatctacctttctatggcttagaatctaaaatcttctatctaactgctgacagattctagattgatgttggtttctgcttttcttgcatctagctgctttctctaaaagtgtttactcttccttcaggttctagaggatcaatcctgacaattacgctctctgttggtgttgatgccattgaatcagcttgactgaagtcacctaatatcttttgacatgtctcaaccagacagtgtctgcatttcggacatgtcaaatgatgttgaagccacttgtctatgcaacgaacatggaacccatgattgcacttggggagcagcctgagctgttcaccagaaacaaaatccgacaaacaaatgacacactcttcaccaatcccgggcaagttcatctcacgtgagtaactcacgactgggaacatcctcagagctttcttcttgattcctttgtttgatgaacttcgtggtgttgaaagactggatataggctcagagatcatgaaacgtgaagaacgtctgaatgcacagcgaatgatgtaatgtaacccaaggcaacagatgatgccacagatgagaactgagagaagcatcagaacattccctttgaggttgttctcatgtgttatgagaggagatggtgcaaccgcaaatactcgaagagagttgtggtcaaatgggtcgtgcagaagaagctttctagtgacaaaactgccaaggaattgttcttgcaaggattgagctgaagcaggtaactcgtttgcagacatgttttactctttgaaaaagctttaaatcaaagtctgttctctctgcttttcttggctttgtttgcttattgcttttttaagttttggggaattcaaagtggtcttatatatagcatgagatgcttactgattacttaatggggactgagaattttataattggatagtaataattattgtttaagaaagtgtgttttcttctttttttcaaatgagagttgggagaatatgggacccagaaagagcttatccaattccatgaattcttgagtgctgattgtgtcgtttccccataccccctctaaccacaagatgcttgtgtcgggacattgaatatagaattagttctttttgtgttatatattagaaaactttctttaatcatgtttgtcctgtgttgattctttataagatggattttattttatgttgtgagtcagggtaatatctgcaaaatctattttgatctccctaagtagttacatgtctgccaaaatactcatgtaagagttttgctggatgcattcattatgtagaaatgctttggacccaatgggtttaaacttgagaaaagtttcagaaacattacactttggctagaaagttaaaatactgaaacacagagctttagtcctgtcttttaatcatctatgtaccattattgactttctttggtggaacctatttcaatcatgttctcttcaatgccatttttttggtgaacttttaagtaactatcattttgttcattgttcctactaaatatcttttctttctcttttgacaatgtagggaatagacttattgtgcacagttcttttgctttataacggtatgtcgcaaaactttctctaatttataattagcctagttttgaattatagctagtatatgtattataatacaaaaaagtgtagaaatgaatcttatcatattgattgaggtctttagtccaacaagtggccaggattttcttaaagcactaagatagtattttgaaacattatctcccaaagctaccagtgtcctctagtgcttctgtatttacattgttttacttataactctgtgaatagcagagtagatagttctcaccaacctaaagaacgttacaataattgcaatggcagttaactagtagcagaaatttgaacatctttattatattgatggcaattttgtagaaagtctcaattgttgagagagttgaacaattttagactactagctatttttgtaagggcattacttaagctaaatctgcaatttatcacggataaagttgtactaacaaaatactttatagcagtttttacactctcaatggcatatcattggatatgatctgatatccctcagatgcttaatggacaaatgttacctgttaaccacagtgttctattataaccaataacacttctttttggtgcacggcctcaatcactattaaattcccattttgttagtcgggtattacttattaattgaacttttgaacactttatttgtatctcatccaatcagaaatgcctaggatcttaagccttatttgaaccatcattgtttatgacatgtcttttgttttgataaccttgtttatgacttgttgcttccttttatattacaggatctccaaaatctcgtagttagaagatgtggtccttaactaaaccagtttagtaggtttgcttacaatgggttatggaatgctcaattataagattttgatatcttgataatatatgaaaatgacaaagatatcaagtggtatattcatgttgatcactcaatcttttcttttatatatgcacaagtttttttaatttatcatagagatggaattaaagtaagttaagtttgtagttttgtttttgtttgcatactacgagatagcagtgagtagatctgaatcgttaggcctagccttttctcggttcagctatcatgacaatatattgaacaaggtagtgtgcatacacacgatgtgcacctgtttcggagaaaaagtatataggagtatactaaatcttgacacaacatgcactacaatctgatatacctatttgataagatgtaggatgagtaaattttgaggcatcaaccgtcattttaacttgaaccttccactgtttggtttgatgttggtagatttatcctcactttaagattttggtgtgtgatcttgtggaaatgggttttctcgaccaggacggttcttacaaatcaattctacatctttgatagtatatcatggcatagctatgtctggtgtcaaggctatatcccataggatgggtttattacttgactggaggttgataatcttaaatgactatgcatccccaaactagcttttaggaattacctatatacttagatcggttggttttccttatcatgggttggttggttccatatcactttcctatggcaaagttgatttatttatcattgcaatgaagaatcctctggtatttcttatcttgatgactcatgtgttgattgatcgatagtgttttaagtgggttgagacaagtggataaatacattttttcttcacgaacttcgtccatatgtcactatcaagcatacatgagatcagatctgcaccgtatatgcatctagttgtctaaacactacttcacacaaaccttgccattcattactggaaaccatttgttctgtctactgaatgtgtaattctgtgtagtgattgtgacacatagaaatatatcacactctggtaatagatgattcttaatgtagtttacattccattgaaaattttactttctcaaaaagaagtttgatgaagtcgtgaaatattacttaaaagtggcatatattctctctgtaatctgtatacactttgtgctacaggcaaaaaagaaagacataaaaaaacattgaggtatccttctatagctaaagacatgaactaagctcagatcaaaaatctcctatctaactaaatcacgaattttgatttttgatggtttctgcctctcttggcatctagctgctttctcttaaaatgtttactcttccttcaggttccagaggagcaatcctgacaattacgctcgctgttggtgttgctgccacttgatcagcttgactgaagtcacctaagatcttttggcatgtctcaaccagacagtgtctgcattttggacaagtcaaatgttgttgaagccacttgtctatgcaacgaacatggaacccatggtggcacttaggtagcatcctaatctgttcaccggaaacaaaatctgacaaacaaatgacacactcttcgccaagccccggcaagttcatctcaggtgagtaactcacaactgggaacattctaagagctttcttattgattcctttgtttgatgaaccgcatggtgttgaaagaccggctataggctcagagatcatgaaacttgaagtacgtctgaatgcacaacgaatgatgtaatgtaacccgaggcaacagatgatgccacagatgaggactgagagaagcatcagaacatttccactgaggttgttctcatgggttatgagaggagatggtgcaactgcaaaggctctttgagtgttgtggtcaaatgggttgtgcagaagcagctttctagagacaaaaccgccaagggattgctcttggaaggcttgaactgaagaagaagctaattcatttgcagccatttttttagtctttgaaaaagctttggtctcttctctctgctttgcttggctttgtttggttattgcttcttaaggtctagaggaattcaatgtggtcttatatacaacttgagatgcttactggttactgagtggggactgagaattttataattggagtctaataattctgttcaagaaagtgcattttcttctttttttttttcaagtgagtcttgagagaatttgggacccataaagcttatccaaattcatgaatcattgagtgcttattgtgccatttggcccatacctctccaaccacaagatgcttgtgtagggactctcacttttccaacattgaattttctatcattactttttgtctcactttaaattggaaaactttgttttattgtcttgtgttgattcttgataagctggattttatttgatttccattattcagtgattgaagtttattttatttactttagatttttgttgttttttttatcaagaagaggaagattttgttgtatcttcctcgcagtttaatgctttgccgacaatatgtggtgtgtaaagtagtagtctttttgctttagcattaatatttctttgctctttccatgtgtatatgttttgttgcttaatagttcactttacttaaaaaatttagagaatggttgggtggtaatttcgattttaacattttaatttttggtatacttcataaaaataaaggctagctcctttcactatttctattgtttgctacttaaccaaatatatttgaatatgttgcatcatagtttaactcgattttaaaagtataaatgtttggagacttcataagaaaaattactacatccttctactattttgatttattgctacttaaccaaatagatatttgaatttgttgctccttctagttaccttttcattgttgagcttctaaaattttgaatcaaaattgagaaaataagtatgcgataatatttatttgcaaaacacgctattttaatatgacatgcatgttatctcttaaaatgacatgcaatttatacattattttagctatttgtaaaaaccaacggtctcttttagttatgattttgccaatttttagaccaaaatatttttatctacctaaaaaacttgtttttcacgaaattttagagagtttttatgcttttgaaagtttatttttaagtatatatatagcccgatcctctgatatgatttacgatcataagatcttccctaactttatatgatttacgaaatgtagggaaaaatatcagatcataagatctttttgacttttcctatgcttactaaactattttctctttacgggtaatatattgcaaaatctgttttggtatttcgaagtatctaaatgtcttcatataaatggttctgttgtttgtttatttgtttcatgttcttggtcggcatttgtttatttcttctatacctttcaagaaaaaggaacgtttataaatttatacgtttggatatgaactttgtcgctttcttcccctaaatttccccaaccttaacaccaagtcccatgtttcttagttcttaatgcgcttttttatttgtttcatgatcgttttatttaaatgtttaattcttctaaagttttctatgaatttattttttgggtgtttttctcttttcctttccggattcaatacgttataagctgataacaaataaataaagtattctcttttcgataacaaactaattttcttatcatcagtttatatgataaagaaactcttagaatttttataaaagttccaatccaaattagagttaaatcttgcaaaaaaataaaattggaagtaagtctttcttcacatgaaaaatactgaagctttgactaaacttgttcatatttaaaagttaactatgtggagttagtggaacaatggaacagaacaaggacttctacagttcgttttttgttagtattagtgtgtaattttgaataaatcatttaagtatagggataaacttctaagaaaagtaatatttaaatgcatatacagcatatatatcatgtagtaagtggaggtcggaataatgcatttcacttttaaccaagattatatttgtcagcaaattttgattactaagctagtatgcataccctttttcaattaaaaattatttacctgataaaatgattatattgattaaaagactttggagctatagtgctaacgaaatttgtggacaacaattagcccaccaaaagagaacaagtatgtgatccttcttcttttatctctttttttaatttgcactttcaattattttaatcagtgataatgtagtaaagccataataagtatttaacttctattttgatgcgccgtgacaagctaaatcctcggatttattacctccatcgtagtcgagaatcgtcataaagattttgcatctcacataaccacatgttttctgtaattgacatacatacatataagtagcgatcaacttgttgaaaaatactttcaaaagaacatgaccacatacttagaatagtacttgttgatcttgttttccttcttttatctttaagatttgaactttttcgttttttggattttcattgtttgttctaagatgtttttctttttgtttcatttttgagatctcctcatttcttaaatcttttaatttctctataactcatagatcttataattacccttttaacttttagaagaaacaaaaaaattctacataatttggtttctcctgtcaccataacgactctgcctttccataaaattcacaaccataccaatttctgaattgttatatgttttttcgaaacaaggttaattacaagaaccgttaacttctctcatgtacttttgatatcaaacatagttacgcgatcacacaaaagaaataactttataatatacgaaacaagagagttttaatgctttaggtttgtcgggatttgatcctaaattttaaactttacattacactttgctttcaccgagatgggtcatgtacacacgactgcccttctacatgcattgtcatataaaatatttgtataaatctccacttttttctttaggccctttgtaagaagacatcatcataatgattatataacaaagagaaagattttgtggtgagaaatattatgttcttttctaatatctttcaccacaatttcttctctatattatataatcacattatcattttcgtttaatttacattgatttttggtaatgaatatgagttcttttttctttaactcaccctttggtcatgttctatgcttaagatataatttcatgtattaaaaatagaactttaatttttttttgaataggatctcaaatattaatttccgaattggtcatgtttgtatagtgctcaagagtaatacgccaatctctttctatttcttcttgtaccaagaacatttgtgctatttttgtctattatcatctcgttagatcaaaaacttatctgttaccttttattttattttatgcaagctagtgtttagagtgttccaaccagttctttaactcaccaaacaccaaagtaaaatcttcacatatgactattttttttttccttcaaattaaaatctgtcatttttggtattcgtttcgaggattagaaaaataaataaaaactacgtacttatatggatattctaggaatcaaccaataatctagtatatattctcaaggatccttgtgcaccactcttcctcaagcttagcaacggttgctcgtgttaaaatgagcaactacaacaacgatatctcattatatctatatttttaatataatattaaattatattcaaaataaaattatcgattttataattaatgcaacgtttgatttaaatagaaatatagctgaaaatctaaagatcaaaagttgttaaatactggattcaaaccacatttgtagccttttgtcatatcttagcttccatctcccatcagtttgaatctcattatatatgtagctaaatattagggttgagacatgttgaatcaattaaaaacataaaacgtagaatcgacgaacattattcagttatatatatagtattggctttggaactgcaaatgttttgactaattaaggacatgatcaaaccccatatccgtttcttccggatgtattgaaatttctcttgtgggagtttttgtgttttgaaagttatatgttcttctctagactctagtctccagactctacccattatattggacatgatgggatcccatcttcaaatctttttgcttatgctttttatgtacttgttatatataaataactttagttttgttgataaataaagttcacattccaacaaataaccaaaaaactattcctgattccaatttttttatttatttttgcatatatgttatatcatgtacacgtctttagtaaagtgctctaattttataaattttaatcattcacgagaattagcaattcgttgattataaattagaatccagtttcttgttaataacattattattccataaaaaatctatgagaaaggaacaatgggtttatataatgagtttaaatgaaagaataatgaaacaatattgtgactcacaagggaagtcgcatattatttgtcatacatagactgccttaagtaaagagaagggctatatgactaattataattgtagccattgattagatactcttgtggatcatatggtaaacttggataagtgagttcaagatctgtcgcagagaggccagaggcttgaagaagttcttcattgttcatcaggtaattaaattgaggagaagactgatgttgctgttggtgatgatggtccaaatagggcaaaggaggcggaggattggttatgatctggttgttgttcattgtcaagaaaccattttgatattgattctgctggatttggttcaaagtggctggaccattcataaggtacgatggtattgttgtgttgacattgtctgaaccttggagagagggagctagtgtaccatacgcagtggcccaaccattcccttgtgtttgttgaggaatttggttttcttcaagattgatacggtgtttctgtacagcaacacaaattcaatgacttggaacttgtattatattggtatgtgaaaaaaccaacctaattcaatggtatacttgtcatgaaagaaacaatatttagcgtgtgtgtttttttctttacctgaagatgacttgccacattgcttctagtaattccttctatcctcatttcttgcaagcattcgacaagtacctttgggttagcttctgcattttgaaatccaaaaataattacataagaaccaacattaatcaagagattaatgaaagagttagctagagattaaagaaaagtttgattactttcgataccaccaattatttcgatggcttccagaaatttttggtgaagctcttcggtccacgtcatccgcggcttccgtggtttttttccttgtttcttttccatgttttgtatgccgttacctccgtttatggttatggaatcaaagtggtctcggtctaaaccgtcagtcggaaccagatgtgattgaaccggttgaaatacttcactccatgtcatccgcggtttctttgctgctttgttgaacatgttatcttcgttcatgatttgagaatagtcactgaattggctaaactcattggattgaaccagatctgattgaaccggttgaagtaattcgttccatgtcaatcgcgggttggttgctgatttgttgaacatgctatcttggttcatgctttgggaatatccattcactttgctgaactcgttggcttgaaccagacctgattgaaccggttgaatttcttcggtccacgtcaattgtggtttggttgctgctttgttgtacatgctatcttggttcatgatttgggaatagtcattgagttggccgaactcttttgtttgaaccagatttgattgaaccggttgaataacttctgtccacgtcattcgcggtttaggtggtgctttgttgaacatgttatcttggttcatgattggggaatagccattcacttggtcgaacttgttggcttgaaccagatctgactgaaccggttgaatttcttcggtccatgtgatcagcggtgtctcattgattattggttcatcttctacgatcttgaaatcagctttgacttggtctaaacggtcagagcgagccggatctgattgaaccggtggagcaacatccggtttaaagatcagcctcttccgtacaatgtgttgccatatattggccattacctcttctttaaccggtttcacaacatagtcacaagcaccgtaaaatgttgctttcatcacagattccgtttgattatcatcagacataactacacaaatatgaaatagattgtgttatttttctttagtaaaaacaaatttggtttaatttagttttaaaagtaaaaaagagagtttgagattcacatactcactacaggtaaatccaactttgaagtaatgctcttgagagcttgaagtccatcaattccaggcatatgaaaatcccaaatcacaatattgatttcatgtttgcagcttgtcaaaaacgcaagagctttttctgcatctgtctcaatagacactaaaacacaaaagaaaagaaaactgttataaaccctaaccctaacaactctctaaatcctcatagttagagagagagagagagagtgactcaccttgataagcgtattgtttcatgatttgtttcatgttgagtagagtggtgaaattggtgtcaacaacaaggacattagtattccccggaaattggctgagaagagaagtgatttcagatgtttctcgctccaaagagcgagtattatcttcatatccacttatctttcccaccaacattggaattgattttgtagagagagagagagagatatttttaagtgagagattatgtgtatgttgaagttgtatatgtcttattacaagaagtttcgatgcattttatagtacaaaaccagttgttcttatcatcaagaattgacaagtgtcgaaattaagctatgaaaactagttattattcaacaggtgtacattatacaatttatgagaaaatacataaaaaggaaatatagttacaacagaaaaaagaatacaactggtacttgtcgaaccaactaattcaattttattataaaaaaagaaaagaaaaaaaatgctattgaattttgccctttccatatatatgatatttatgctatagatttcttttcttaattaattgtaattatatagaaaatgaaagaaatccagaaaatgtgaaccaattttagagttttatattaaatgcttgacagtaaacaaacatttctaattaacttatagggatttacttccaaagataagacttttcccaaacgctcactgaaactaacattttcatatggaccatttgccaaaaaaaaaaaaaaaaaaaacatcttgttattgtcttagctagtgagctagagagatttgtgggggctgtttgttacttacttgtctatgaggcaaacacaatgacaaagctaaacgacggtggtgaagagtgaagactagatatacacgagacaagtcatcaagactaaaaaatactagcacaacgttaatatcttcaacgttaatatcttcaacgttaacaacttttttctcttaccattgtgtttttgtttctctcagaggcttcagagccaattccctttgttgttgtttctgtcataacgagatagagacatgtagatgaacaggcccttgtttgacgactctgaagtgatgtgacattattcaattgtacctatgacgaattttgttttattatggatgaaccaaagataagaaatctacttttatattcagttttttctcatcactttgagcatgttttacaaatttggttgaatttgaatagtttgattttaaatgttaagatggaaatgatatctagtattttttataaccatactgaatttgtggattttttatcattcatgtaatagttttagttcatccaagattcatggatgcagaatgcatatcatatgtaattcatgaactgaatattagtgcatgcattggaatgaaagtatactactatgcacttcgcatagtatctagctaatcaaaaatgtccaccaatattaatcaagaattaatgagttatatgaaaaaaacaataagtttggtgttaacataaataaataagtttcctgagtattttatgagatacaaaaatgcaaacaacttacatgtgatattttctttgataagtagttttaaagcgaaattttgaataaatagttgtttttgtaaatgaaaaacttcatttttgacaaaaataaaaaagaaataaataacttcattttggtttggaaactaatgattaacgataatatatatatatataatgacgcatataaattgccattagttattgttaggagaattagcgaatttagaatgtattacaagaagctcgattaaatcttatttataacggacaatattcggcgttgaagaaagaaaacaaatcaaaccctagttaaaaagacaataaaactcaaataacaaaaacatatcaaacacttaaagtccataaaattaatatataactaaaatgtcttaaaatagcgtaatgcattccatcacatattttttgtaatttttcaagacactttatagagttctcttaatgaacgagctatatataaaataataacaacgctaatatccaaagaaacccacaaaaattgagcaatgtgcagattgttttctagtgctagccccaaagattgtttaattcaaaaccaaataggataataacttctaattagggttttatgattcagtggagatgaaggaataccaaagaaattcacattattgaaaactcaccaaaccttttttattgtcataatattgaagctcggttatattttattcataacggaaaaaaaaaaacaaaccctaaccatgaaaatatgtttagttgaatatacgaggaaataaaactcaaaacccgaaaatgtgttgaacacgtaaattccattagatatttaagtaaaatgtcttaaaatagcgagatgcactctatcatttatctttttgtaaatatttacgatgcttcgatttatgatttttttttaataagcaagttatatattaaataacaacaacaaaattttccaaaaagaacacacaatggagcaatgtgtagattttctctagtgccttacctcaaagattgtctaattcaaaaccaaatatgataataactttcaattagggtttcctgattcagctgagatcaagttataccgaagaattttttacattattcaaacctcacaaatttgttttttttttgtcgtttgctatattgacactcgattgaatcttatttataagaagaagtattcaattgtgaagaaaaacaaaatcaaaacctagttattaaaggagataaaactctaaacacgaaaacatatcgtaaattcgattaaatattcaactagaaggacataaaacagcaatatgcactccatcaatgaatttttttatgatgtttcggttatgtctttttctttaataagaaagctatatattgaacaataaaacggaaattctaaaaagaacccacattggagcaaggtttagattttctctattccttacctcatagttcgtccaattaaaaatcaaagaggagaataactttcgattggggtttcctgatttagtggagatgaaggtacaccaaagatatttacattctttcaaaactcacaaagctttttttttggtcgtctgctacattatcatcatagatactttcgatctaattctattacaaataatgactactctattagatctagtgatatacaacacacgattctgcaaccaacacatagatattttattaaattgtttcacatgcaccatacaaacaatgtcaaattttacccctaaaaatttaaaaccattggacaaaacttgctgcacacaaaacctaatttctattcaaaatctaacggataaaatataaatataaatatatatatatatatatatataaattaaaacaaatccgttggattttgactttaatttaaacgcatgtttcttaagggaaatttttagaagattaaattttatatacacgatttaggatcttaaaatttggttggatttacattaccttttctggttttggtatggttttacggttattttgttgtaaccatataaaattgtatgtaatgtaactctcctaaagttcatttaaactacaatattctcaactaatgtacaagaacaacagattctagttttttttcttcttgttgttcattataatagagtgtgaagagtgatcattagaaagaaaaaaaatgtaattaacttcttactacaatgaaccatataaattggcgtaaattaaagaagtgagaagccaagtaagcaacgaagacttttctgtgagaacttatcttattctagtaataagtttacggtaacgaagggaagtcgtttataccgtaagctagtttcacgacgctttcgatttataccgtagacttttctgtgagaacttattttattctttacgaaaccagaaacgacgtcgtaacactaacattatccatttactaaaacctgacgcaagaggatctaacaacttcctttcaccaatttttgtttgaaacaaaggaaaataaagttgatctttctttggttgaagaagataatctctggaaaccaatgatgatgcttgatgattacatagcgaaatcgaagctcagtgagagtttaacctctacggtttggttagcgaagcacaagttaaccggcgaagaagcagtgatgaagtgtttcgacctctcgaagctcaatcgcaatctccgagactgtttaaacaacgaactggagtttctatcttctgttgatcatcccaatatcattcgtctcctccatgtttctcaagtactaacccaaaactgagtttttcaatatttcttgagtctatgaagaatatgattgatttgttttcttcaattttgcaggatgatgattttctcgttatggttttggaatattgtgatggaggaactttatcatcgtatattcaacgttatggtagagttgaagaagatatcgccaagagatttatgaagcaaattggtatctattgttatataggagaatgatttcactgcatttgcttcttcttgacttaatagtgtcatcaatgttttgatgaaggagctggtttggaaattattcatgataatcacattatccatagagacttgaaacctgaggtacttctagaattatagatactctggattcaagtttggttgtgaattgtgacaatagtatttgattggaacagaatattttaattgacggatctggtgatgatttggtgttgaagattgccgattttagtcttgcaaggtaaagttttttgaggaggaaagacatgcttatagtataaagatctttatatgtttcatgttcgtaagcagaaaactacatccgggcaagtatcttgaaacagtgtgtggttctccgttttacatggctcctgaagttcttcagtttcagagatacaatgaaaaggtgtgatattgtttttatgcagctccattgaatgataaggttttccagttttaaattcactgagaaacattgcaggctgatatgtggagtgtaggagcaatccttttcgagctacttcacgggtatccaccattccgtggtaataacaatgttcaggtgagatcttgaattagttagtagtattcttttatcaaaaagctccaatgcctttaacttaaaaaccttttaccactaaccataggttctaaggaacatcaaatctagtacagctcttccattctctcggcttattcttcaacagatgcatcctgattgcatcgacgtctgctcaagattgctttctattaacccaggtacagaaaaatctcatctgtttgcggctacactatgtacacatatcgctatatatattcagttcttggttaccattttctgcagttactcgtctctctttcgatgaattctacaaacacaagttcttgaggctatgattgatttgtccttgaggtaaaaagatgaagtcgtcttaaaacttctgttgaatccttgtatagattctcgtgcctgtatccatgtatataatttagttgaagcatgcattatatttgtatttcagctgagctagactgacatttaacctagcaaatatgtttttgattctcagagagctgccacactgggcatagaagattttccttttcttggccgtataaagaacagtagggtttgggtcaaggacacaacattttcttcaaggtatcttgaaatttatgtttccattatatccatagaagtggtggctcatatctaaattatactgcctttttttttttttttttctttcagatttgcggatctagttaattgattgtattattcatcagtattgggatacatccaataatattgagtcgtcttgtttcagacaacatggaacaagggaaagaaaagtggctacaattaacggaagacttcaatttgacctttcacaggttttttttgtccctaaccagtttaaatattgttggagtcatcattatattagatgctttattttcaaattaattgcaaaaccatcagccttcttcttcttttatatttttaggcaatgctaagagatcaatagttaagttcatactattgagtgtagaagattatagtttacaccattatgtttccatggtttctcagaattttgattttgttctattggtcacttctttcttgcagtaattgttctgtttctatttggtttcaactgttctttttctctgtttctagtccagtattagaatcttataaaaagataaaaacttaaattgcattcgtatttgctgttacaggatgcatacctcccacagaggcttcttgaaaacctgatgtatatttacaatactattgaaatggctcgtgtaactggagtccctacctcctaccttatttcaagaggagagagcatcaaggtaggtttcactaaattctgtcgcagcacactttctttgactaaggctgtctgagaagttatatatcttgggtctaggttctatctcaactacttaggaaagctaaacagaaaacctggttcttccaaatgctgagaagttggaacctgaacaaggaacttatgaaggtgcaactgtacgttggtggttttatatcccctacttacagttttacttattcttcgatcacttctaatattttgataaacatctccaatgatatatattcacactgttaacttcaaaatggtaaatcaggttttagaagcaagaactggtttctacgagccaattgctactctggattttgcttcgttgtactcgtaaatcatgatagcatataatctatggtactgcagcttagtattccatcaaacgcttttttttcttcttatatttattttccaacgtttgttgatgttatccatctattgttcaaagagcttattactgccatcttctcgtctttgaaggtgaaacctgaggatgcaaaaaaataaattcgacttacaccaaaattatgctaatcttaagaattattcactttttcattccaaagcccaaaccaaacccaaaagggccttttatcaaaagcctatttacaacatataaacccaaaaaggcctttcgtcgagaaaactaaaatggctccgacgaagaaaggaaagaagaccaaatcggcggcggaatcaacgacggtcacagaatcttcaagctttccgacgtgtttgcgtctccttacaccttcctccgtcgctatcaccatccatgcgaagccaggttccaaagccgcctccatcaccggtatatctcctcttccattcatcggttttgattttgtgtaaagtctcggattttattgattttggtttcctctctatgatctggagatgtgagcgacgaagcggtaggcgttcaaatcgacgcgccggctagagatggtgaagctaacgcagctcttctcgagtacatgagctctgtaaagtttctctttcttcgcagataaattttcacttttcaagttctttgaaattgtttatactctgttttgctctcatatctggatttggttctcagatagtttgataatgtcatgtagaattgtgtctctgtaatctttgatgaatttgattagctcttgttgagccactagtcataaaaaatatgcacttgtgagcttccgtggactaaaggaatcaaaccttaacttggaggatctttgttaagatatatgtaacatagttgttgctctgatttggattgctatggtttatatgctgctttaagtagtgagaattgtttgctgctgattttgagagataagattaagagatgaattctatcatcatattcatatcctgacttctaaaatgttatctttgataggtattgggggtgaaaagaagacaagtctctctcggttcgggatcgaagtctcgagataaagttgtgattgttgaggatatgacccaacagagtgtttttcaagctttgtcccaagcatcaaaacctacctaaagatctccaagcctgtaactaactatatggagaaactaaatcatcaaaagctaaatggttcatgttcacttaaggtacgaatggtttgaagagtttcaggatttgtgatagagatcattggtctgatattactatgagtccatgattaatgtcatgtaaatctatagactattgcttattatataacaaagctgtgtttagtctagtccccaattgatctgaagtcatggatggttttttgatgtgtttgttaatccttattttcatgtaaagtatttaggatggttttcttttctctcttgatccttatttgtctttgtatatttcaaccgtttttgacttttgaaccaatcaaaagagaagaaacaataatgggccaaaagaagataaaaatgggctatggagaatcacaagtccaatttctctgctcacaacttgaacaacaatattttttttttcctaaaaaacttgtacaacaaacttaaaaaacaataatatgagaattggaacaaaatccttttaagtttgtaagtctaatttcaagaaccaaaatacaaaagtaatatcaatttctcaatacagttataaaactacttgatttgtggattttatacgttttaaataataatggttggatattccttacgatttttttaattgattagttatgcgacgacccgtgccatgcaggttgaagtcactttcaatgatcgttgtctcataaattacaaagaacacagctattttgtttctatttcataatgaaaagcgaatatttgtctgttcagataccgatcaggtaagcgatgcttaaagccaccaaaagggattctaaagtaatcaatgatttgattaagaaaaaagtcagaaaacaatatccatttgagtatttccatgtcaccaattggtttataacttccaatgatcacatgccgcttgtaatatacatcacctaaccaagcgatcgactccaaaaacgaaaccgtatttattattatcttaagactatagtctatacaatatacattacataatcaagatgcccaattagatgttttaaaacaacaaaaagatcaataggcccaattatatcttatcttaataaaatgaaaaagcaattgcatgaggaattatggatatatataaattacatgggctaggttttttttatatacatataaatagtttggagagataaatcaggtggaaccaagtttgttgtttgtgtttcgattgaacaacactttaattatttaatctttccattgtctttgcgtcttcttcgatcaatttatcaaattagggttccaaccttttttcttttttttccccgttgtgtgttaagtcggcggaaaaacttagaacagaacaaaccatcatttttccaggtaaattatattctaatctcatgttcttgttaatatctgatttttgatgatcttcctatgcatgtttgtcattgcgtctttctcttacgtgatagatgttcgttgacgcgatttgaggtttatttaggttccttaatagatttaacaaaaagaaattctcggtcaataatatttatttgagctgatcaatcatttgctggagttagtttgtgttgtcgtcttcatatgaatctaaagggtatatatatgttttgcattctttgttatagaaatttgaagaatagataaaaaaagattaataagatatggaaggttcagaagatgcttctgcaattgttgaaccacctgacccagaagttcttgaaatcgacccaacttgtcgatatattcgggtaactacttcacctttatctcttccataattgttttaattctttgttaccaaatattaggctcgaccaaatatgccctgtttctccattttgttttcccttgacacattcaaatgtgtaaacctttcagtacaaagaagtaataggcaaaggcgcatccaagacagtgtatccctttctctgtttttctttacataatctctgtttttgttttacaatctgttattctgtgttatgtgacatcatagtttgtgctacgagaggatatgaaattcattatttctttaactctcttgaacaaataatcagttttaagggattcgacgaagtagatgggattgaagtagcgtggaatcaagtaaggatcgacgatcttttgcaatcaccagattgtctagagaggctatattccgaagtgcggcttttgaaatctctgaagcataaaaacatcataaggttttataactcgtggatcgatgacaagaacaagacggttaacataattaccgagttgttcacttcaggaagtctccggcagtatgtattttgctcatttttatactatcttgttatgtcgccgcgaaaatagcggttttggagttgtgtttaaagcagcgaaatcttggttttcttgaaggtaccgtaagaaacatagaaaggtgaatatgaaggctgtcaagtgttgggcgagacagattttaacgggattgaaatatctacatagtcaagatccgccgataatacaccgagatatcaaatgtgacaacatttttatcaacggtaatcatggagaagtgaaaataggagatcttggtttagctactgtcatggaacaagctaatgccaaaagtgtgattggtatgagcaatgctttttcttttatatagtttacaaattcgtttttctttgttttttttaggatctaaattgatagtgttatgttataaccaacaggaacaccggagtttatggcgcctgagctttacgatgagaactacaacgagctcgctgatatatattcgttcgggatgtgtatgttggaaatggtgacttttgaatatccttattgtgagtgtagaaactctgctcaaatctacaagaaagtttcatcggtaagttcgatattttcaaattgtttctaccattggttttatgatatcgaacaatatatgataatatgaatggataacttacttggtgagtcttttttttgtattctttacttaggggatcaaaccagcttcactatcaaaggttaaagatccagaggtaatgaaatttatcgagaaatgtttattgccagcttccgaaaggttatcggcagaggagcttttattggattcttttctcaatgtgaacggtttagttatgaacaatccattaccgcttcccgacattgtaatgccgaaagaaggatcattcggtgaacgttgtcttatgtctgaaggaccacctaatgctcggaatagaacgatgtcaatgaatcttgacgaagacaataaccttcctattgttatttcaagcaacaattcaggaacaaactgtattgaggttagacgggcaaagcgaggaaacttttttgtccttaaaggtgaagagaatgatgagaactctgtctcattaattcttcgtatagtcgatgaaaatggtaagagtcttttgcgtttatattttacaaaacatttcaccgaaaatgttagatgcatatacaatcagccaaaaattgcgtttggaaaattgcatattataccaaacttgattagttttgtcttctttttggcgtgtagggcgtgtgaggaacattcattttctattctttcaagaaggtgacactgcttctaatgtatctagtgagatggttgaacagcttgaattgacggataaaaacgtaaagtttatagcggaattgattgacgtgttactcgtcaatttgataccgaattggaaaaccgatgtagctgtcgatcatctaattcatccgcaacagaaccagagctccaaggataatcatcaaaacggtgcaagttctcaagctggtgaatccattagccactctttgtcctctgattattgcccacgatccgatgatgaggcaaacccgaccgtagctgcaacaacagaagatcaagaagcagagaaaccaggaagcttggaggaagaagaagaagatgagaggttaaaagaggagttagaaaagatagaagaacggttcagagaagagatgaaagagataacgaggaaaagagaagaagcaacaatggagaccaaaaatagatttttcgagaagaagatgcaacaagttgagtaaagtaaacaacagagcaacactctggttttggattcctctgttttgcttttctgtttttccatgttttattattttagttttggtcaaagagaaaaaagcttttgttgtttacttgtttcattgcaagtgtagaaagtttcctccataaaaaaaatagaaagtattttctaatggtaattgggatttacattatataaagcactaattgctgagataaaaccattcatcaggtatatatgtaaaactattctcgagataaaacaagaaagtgaatacacaattttcttgcctctattcataagaaataaacctgttttcattgtgtttatttaacaccaaaagcactcaaaattgaggcttaacattcagacaaaccgtaactatagaacataagaaaaacctaactattgaagaggttgcattatatcacaagtttaaaacaccaaagctcaagctgagtagcaaaaataggtctcttcttccgccaccaaaacctcaacaggaacgtctacaaaagccttgaccgccacaacgaccaccggaaaaacgaccaccgacgaaaagaccacgaccaccaccaggaccaaagacaggagtaccaaaacggctataaggttcctcatcagaagatgatccatccacagacatgctctctgcctgggctttacagagccaattttaacttcattatttgacctaaacaatgagatcaacagatccatcttctcttccattttatgaagacgaataccaaatccttccaacatctccatcgcatcagatattttcatctcagtcgtcatgtctttcttatctttctccaaattgtctgtaggcgtcgtgtccttaatcacagaaggagatgcttcagctttggttgcggatttattgtccatggagaagatgattagtagaacaacgcactagagctaggttaaaagagagaaattggagatcggcaaaaacccctaatcagctgcttaggaagaaaggtatttataagagtcttttatattctggcttggggcacaagagtcctttccttttattttatttacttttcccgttgttcattttttcaactaagcaagctttatctgggccgaggtgaggcccattaattgaattaaaagcccaaaataacaacaaaacattacctgattgtcggaaaatcagacggaaacaaaagaaatcaaaaatccgatggggaggaagaagggattgccggagttcgaagagtcggcgccggatggattcgatcctgagaatccgtacaaggatccggttgcgatggtggagatgagagaacacattgttcgtgagaaatggatccatatcgagaaggctaagatcttacgtgagaaggtcaaatggtgttaccgcgtcgaaggcgttaaccattaccagaagtgtcgtcatcttgttcagcagtatctcgatgccactcgcggcgttggttggggcaaagaccaccgtcctatctctcttcacggtgagtttttttcccggcgttctctctcacactggtgaaaatgcttagattgaaattcttagggtttcgtgtttttttccttagcctttgaattttgaattcagttactctttagtgtgtttgattgaatttgatttgaatttgatgtagagtggtctcaaaattcttcatgaatacctttgtgaaattgattcttcctttagatatatgtattgaattttttttgtttgtattgattttgtcaaaccaggtcctaagccagtagctgttgaagaagctgaatgatgttgtgtgcgtgattgatctttggtaagtaactggtgttgattagttatatagtgtgtattgcttagaagaggagaaaggttagactttctagcatgctttgtgtagacactatcttataactggacatgttatgtgaatctgtttgtggtaggagaaaattggaatatggatgtttggatagttatatgtatgaactgatcaggtcttagagtgacttagttttgcggaagttgtggatacactggttaattattgatatcaatctgactgcaatcacaaaggttaaagcttagtcatggactttcttcggtggttttagaaacaggacatgttttggaatgtatagaaatgaaattgatagatcttggagtgactcaattttggagacatatgggccgatattatagataccaatccgcttgcaattgcgtccatctttaatctgcaacagagctaaacctagtcacagaatttcattgatgaattaattatttgagatatgagatgttgtggactgtatgaagaaggatagagctccaacatttaggttttgattggtttaaacaatagttccaatagggttaaggcatatagtcaaaatctcaagttcaaattggattgatgatttttgtatttggttcaaagattttaaaggttttttcttgctccaatgacacaggtgagtgagagctttgattaccatacatgaatggagtctctgttgcaagttaatgctccacatcaaggttgttacttgatttatgcttttctgtttcgtaaaacatatattactaattggacttgggagttccaattggttaagctcagcttcgtttttcaaatgatttatatatatttttggcttgttgtacattgcgtccctgtttgtcgaaataatgaaattcccaagtacctttttgcatgcttgcaacttagtatatgtttttaagactttatctgataaaactaagaaagagttaactctaaaaacatcatactttccctttatttcaaaactgtaggaacatctttacttctttagtgttgtctaaatggattcatttctgaaatagttcatgaaatttttattaacctttaagtagtagttcaaacatctacggagtctattaccatatgttaaatggtgacaaagacaggtaaggaccacagacaaaatgagtcagaaaacaaaagactaacaaacaaaaagataaaacttagagatgggtaaggaaaagaagccataaaagacccaaaaacataatccaagtctaaccaataagatcgcaaagatatggatcaacttcggtacatgatgccaaatcatcactacagtgtcttttttccttgtacaacccaaccaaaaatgggtatggccaaacttcaataatacaccaagtgtttactcatctcaaattttactaccttttcttaagactaatctactctatataagtatgttcactaacccttaatgttaagattcaagaatattaaacatgtatagaacaagactcaaggaaacttgagctaaaaagtcatttctagtccctactgacataagaaagaagtgtcagtgaaaaaatcttctagattctaaaggaaaatgtctttgtctgatcccaacgaaaaagattattatatacctacctaagcaggctcctttgtcagtgcccattattctccatccctcttagcccttgtcttcttcattgtcccctttttctcactttaagatctttcttgttcttagcccatgacaagtcaccaaaatatcaaaatttcagaaagtatataaccattactctactgtttcctgataaacctccttttgtgccagtttcttcttctactttgatttcttctcatatctctgttttcatgttttgcgcagaaattatgatttcaaagtaccaagaagatgtcaagcagccacgagcttgcgaactttgtctgaacaaacacgcagtttggtactgtgcctccgatgatgctttcttgtgccatgtttgtgatgaatcagtgcattctgcaaaccatgtagcgacaaaacacgagagagtttgtcttagaacaaacgagatatcgaatgatgtgcgtgggggaacaacattaacctcggtttggcacagcgggtttcgaagaaaagcaagaactcctagatctcggtatgagaaaaagccacaacaaaagatagatgatgagagaagaagggaagatcctcgtgttcccgagattggaggcgaagtgatgtttttcataccagaagcaaatgatgatgatatgacttctcttgtgccagagtttgagggattcacagagatgggattcttcttgagcaaccacaatggtactgaagaaacaacgaaacaattcaactttgaagaagaagctgacacaatggaggatctatattacaatggagaagaagaagataaaactgatggagctgaagcatgtcctggacaatatttgatgagctgcaagaaagattacgacaatgtcataacggtttcagaaaagacagaagaaattgaagattgttatgagaataatgcaaggcatagactgaattacgaaaatgttatagcagcttgggataaacaagaatctcctagagatgtaaaaaacaacacaagtagcttccagctagttcctccagtaagcgcctaatcttccgagttcttacaaaaatgatattatattgtttcaaattgagaaaattgaacccaatctatcaaagaaacttattgtaatggttgttgattgcaggggatagaggagaagagagtaagaagtgagagagaagctagagtttggagatacagagataaaaggaagaatcgtttgttcgagaagaagataaggtacgaggttagaaaggttaacgccgacaaaaggccgagaatgaaaggtcgatttgtccgacgatctttagccatcgactcttagggaacagattctctcagtttcttctcctttgtgccaaataaaaaaaaggctactccaaagaaaccagaagctaatcaaaagaacaaaaaagctcatgtggaacatatttcgtagcttttgaatttatccctacaatgacatggttacaactttattcttaaatcaatttgagaatttaaatttcatactagtaaaagcttctcttatgaggtaaatctctttatataagcagttagttacaaaaaccaaaacgaattacaaacaacttgtaactcaaagatttgtagttttgtactaataccgttggccgtgtcaagaaagtattcataaaaacttatcgatccaatcagtagtaccattaaaccaactaaaatcatcatcctctggatctcctaataatccaagatcatccataggaaaatcttctaacttaaaatcatctatcaacggatcaaaatcaagtaaatcatcgacgaataagtccccattggtcgatacgattttggcatgttgattaactttagtgtgatccccaatcttaaatccaaatgttttctcctttcctactctatcattctccacaaaatcaaacttgaaatcatctacaatggaaataaattccactgaattgtaatccacccaaatatcatttgcttcaacagccgaatcaccaaaaatatcagcaattgacgatgtcatcaacggatcttccaacattttactaatcactccctcttcttcatgatcagcgttataaccacaaccaaatggcttctgatcagtaacaattctcttatttacctttttgcaattcgacttctcagtaacttccttctcttctggtttacgtacaccgcacggcttggtcaaatctactaggtctttttcctgtttaactaaacccaatcgttcatcaaactctcttttactcttttggtaagcttctgctgcttcttcttcagtaggaaacgttccaagccactttctcttcttctcaaacggatttcttatctccgccgcaaatttcccccacggcctccgtcgtacgcctttgaaacccgacgacgttttccggtttccggctgctttattccctgtagaattcgaaacgttctcataccttttgatcagcgtcgggacacagatctttgagacgtaacgtttcggtggttttggtttgatctgacggcgaggattattgccggagatagattcatcgtcgctagaggaatcggtggcgtctggatcattacagattacactaattgttttaatcaagttgagatcgatgttctcttctctgaaactgatcattgttctctctccgactaaactccggtactaagtaacagaatcttacaataaaaaccaaaaaaaaaacaatgtagtgttttgagttggtgatagagatagagattaaaaacctaaacatgggagaaaaacttgaacagaaaacatagttaagattcatcatcgtaccttgttatggagagtgtgtcaaaaataaaattcaaggagcttatggcaaagctaaggaagacgaaacatagaagacgttattaatagtttatgagaattgttttgttttcctttttaatttttgtttagatataatcataaaagtaaaatctgtagtaaatattaacgaggatatcggtaactaccatatctaaatttaccatttttttttttttgtgatagaaaaagaaagttaatattttagtaggaaaaaatggaaaattgggaattctctgatgatatattatagttctttttttctttggtcctaaaacttcaattgatatcacactctaatttttatttttttgtatttctcggagaataatttgtagactacacattaatgattaaataaaaagttttttattttcgatggagaaatcaaccatctaagtacggagaacacgtaaaattgggactatccagaatctcataggttaatctcaaccctcaacttatgattttgagaaaataacacacttttttttttttaacggcaaatcgattttattatatagttaaagtttacatgatacataagaaacattcaaaagcaacctgagaaaataatacacttattctatcaaaactagtagtgatttttttttttgttatattaacgagtttaattttcaaatcattagattattttttaagtcactacatcatagtatatatatttatcatcttatatgtataaaatgaaatttcaaaacttgataaacatgatccgattaagttgagaccttccagtttgagtgtgtcgataaacataaaatttttgttttaaacagtagattaaacttttaaaaagaccgtacaacaaaaagaaaaaacaaaacgcaaaaacgttacaaaaagaaagactaaagaaacaaaacaaaataaaaagcataatgagtagtattaatgagttatacattttcccattaacattttcacatttccccattaacgagttaatgagtcaaatctacttcttacgagtaagacgtctcttcttcttagatgatgtttctccaccatgaccaagaacagatccaatatctttcctcttattatcaacaagacaatttccatccatagacgaaaccggaacttcaaacctttccatttccttgagaacagcccgaagattatcggcttcgcgtaaagcaaaactcaccgtcttgcgttcaatcagtccttcaacatacttgtacaaaccgcatttcactccctctttcctacaaaaatcaagaactgcctcttcgtgcaaaacattgatggctacaccgaatgcagaaactggccagtacttgtctcggagacgaacaccagtatcactttctttcttcatgaccgcacgagctatctttagttcagagctatactcagcaaattgagcgttaaacgctcttatcatagccgattcagcagccgtcctaccttttgatgtcgctcgcctctttagcttctcgctgcgttgcacttccacaacggcttcaataccggcttttgttttcatccattaaacttcgtagatttgacggagattcatctcgtggcttagaggacaaatccctagtgagtttgccttggctaacacgctatcgcgtatatgggaagatactaaattatataatgacactgaattgaggcgagtgtgtgaaaaaagtagactattcagttgctgccttaataagtacgctgcttcattttcccaagagggataagaagcacgctgtttcattttcccataaagaaaacgaaagaaccgagtagtttagacttaagttatttatggattaaatataattctgtagtatattttaaaaataaaatgttactaaattgtattaaaaaaaatatagctttttgtatatatataagctgtttttataatttagcatagcatttgaaataaaaacagatttttgagtgtagctgacttctgaaagagattcattagccacacgatgcaaacctggcttgtagggctttgtcatagtgtcgttaatatgttacataatatattagagattaattaatagtatgttgtttttgttttaaaacttcctagacgaaaaccaaatcatgaaataaaatattgtatattgcaagtaaaagatacatttaattgttatcatataggaattttaaactgcatgtgtgaaaattcctctgtttttatagaactaaatcaaatgttagcattaattcaattatttttttaaacgttgttcaaggattgcatattttctaatacgtctgaccagtgtggttagagtctaaatggagtattcttgccgtgtaaccaaacaccgcatccatagatcttgatctccatttgggagattgcctctctagttggaacaagtgaactatcatcatcttttttctaacttctcttttttaaaatttttttttgaaaattgggtggttttcaaccttctttttcataaaaaaaatcagaatcattagagttggatacacgtctcaaaataacattctatatctctcgttgacatgttctccatatgctttaaaactaattataatcactcgcagtattaacttaccttatccgcatatatatatgttcatcgaatgaaaactatgaaggtaagggtcagctatatatgaagagatggagttgatcacttaacttaatgtccccaaacacaaatgaataattttctataccaacttgttagaagcatctattagggagtactattctttttgcttttggcacagagaacaacaaactttatacgatttttagagttaagctctttgaaataaaaccagtcggataacagaactttgaaatgacgcttacttatagccaaagtttcccatagggaaaaaccctaattaggctaaaggaaaaataattttgtattgaaatgttagaaaacggcgccttaatgttttgagttaatgttgtgaaattgcaaatgttagaaagttcagggttttctagacatattagtattttattttggccgttgacaatatatgggtttcgtttctttaactagtatccacttgatcagaacgtgatataaaataatattttggaacttaaaaagatgtcaagggtcgtgttatcctccagaaataggaaaaatggagaagtattttcatggagttttatgtgtgttcatcatcacagttgcttttatacatgttgttcaggctcaagatccaaacggtattatctttaaacctttgaaattaagaaacactcttcatgttctttttcttaatttgttttttccttttctgataattcctttacattgatccccttattaggatttttgttttggtttaatgttttattaggattcatcactttggattgtggtctgttacctgatggatctccatataccaatccatctactggattaacattcacttcggattctagtttcatcgagagtggaaagaatggccgagtcagtaaggactctgagcgaaacttcgaaaaagcttttgtaactctaagatactttccagatggagagcggaactgttataacctgaatgtcacacaaggaacaaattacttgattagagcagctttcttatatggaaattacgatggtcttaatactgtcccaaactttgatctatttattggccctaataaggtgacaacagtgaattttaatgcaaccggaggtggtgtgttcgtggagataattcacatgtcaaggtcaacccctttggatatttgtcttgttaagacaggaacaactacaccgatgatatcaaccttggagctacgacctttgagaagtgatacttacattagtgccattgggagctccttgctcctctattttagaggttatcttaatgattcaggtgtcgttttacggtacgtaaactttaatttgtgaaatgaatctttttcttggatcttggtataaaagataatgagtaaatataaaaatatttttaatctttctttgatgccaaacatctttgaggttttgtctagctatgtctaatacaagatacgtataggtaccccgatgatgtcaacgaccgtagatggttcccattctcatataaggagtggaaaattgtaaccacaactctcaatgtaaacacttcaaatggttttgatctaccacaaggtgcaatggcatcggctgcaacccgtgttaatgataatgggacatgggaatttccatggagcttagaggattctaccacacggtttcacatttaccttcacttcgcagagcttcaaactttgttagccaacgagactagagaattcaatgttttgctgaatggaaaagtttattatggaccttatagtcctaaaatgttaagtatagatactatgagcccccaacccgattcgacattgacatgtaaaggaggaagttgcctcttgcagctagtgaagacaacaaagtcaactcttcctcctctcatcaatgctattgaactttttactgttgttgagtttcctcaatcagaaacaaaccaagatgaaggttcgtaaatttacatttttcatacatatgaattgtagctttgaatgtgtttgattcttgatatattattaactatgaaattctagtgattgctatcaagaagatccaacttacttatggattgagtagaattaactggcaaggagatccatgtgtccccgagcagtttttgtgggctggtttgaagtgcagcaatattaatagttccactccaccaacaatcactttcttgtaagatttttcaatcaccataaccgtatcataattaaaattaaattctctattctaaatatatcacaattgaaacattctattttcatgaatgtatcactagaaacttgtcttcaagtggactaaccgggatcatttcaccttccatccagaatttgacccatttacaagagttgtaagtatcacacaaacacatgaacaaaagcaaacattttctgttttcttctgtgatttctgtgatggagcttttcttttaaaacaatatcaaatggcagggatttgtcaaataacgacttgaccggggatgtgcctgagtttctagctgacataaaatcgctcttgatcatgtaagtctcttaagacagtatgaaacataataatgtgttttaactatttttataagttgtctccttgtattattattatttttttttttaattatttttttttttttgataaacagttgtctccttgtattatatatctcttttttataccttaacagaaacttaagtggaaacaattttagcggtcaacttcctcaaaagcttatagataagaaaagactgaagctgaagtaagtatttattacattgatcttcagttgatgattatcataggtctgatcaataaaatatataatgaaattttaattcatagtgttgaaggaaaccctaagcttctttgcacaaaaggaccatgtggaaataaacctggagaaggtggacatcccaaaaagagtataattgtaccggttgtctcatcagttgctttaatagctattcttatagctgcattggttttgtttttggttcttagaaagaaaaatccatcaaggagtaaaggtatttatggtgaacgcataagctcttataattactatacactagtagaaactatacaaaatctatgaaatttttatattgcagaaaatggtagaacttcaagatcatccgagccaccaagaataacaaaaaagaaaaagtttacttacgtggaagttactgaaatgacaaataactttagaagtgttcttgggaaaggagggttcggtatggtttatcatggatatgtaaatggtagagagcaagttgctgttaaagtactctcacacgcttcaaaacatggccataaacaattcaaagcagaggtacttataacaccaaaatattcctctatgcaagtgtcttttgttagttttcaataaatatggaccatagatttgaaatatatgtgtgcttttgtggttcattaggttgaacttcttttgagagttcatcacaagaatttggtaagcctagttggatactgcgaaaaagggaaggaattggctcttgtctacgaatacatggctaatggagacttaaaagagtttttctcaggtaaaccaaatttaagtattataccagacacctaatcttaatccattttcgatggaacaaaaacatgtaacaaatcattcttggtcataagttaacgtcctggttaaaaaacacccagggaagcgtggtgatgatgttttaaggtgggaaactagattacaaatagcagtggaggccgcacaaggttagtaaagccttatatatgaacctattattctcttaaaactttagttttgtatgacatatataggtccaaatgaatttgtgacactaggtttggagtacttgcataaaggatgtagaccaccaattgttcatagagatgtcaaaaccgcaaacatattattggatgaacacttccaagccaaacttgctgactttgggctttcgagatcatttctaaacgaaggagaaagtcatgtctcgacagttgttgcaggaactattggttaccttgatccagagtatatacttaacacacattgttttattcttaattcaaatgattagaaacaatttcaacatattttacataatgtcttgcagatattacagaacaaattggttgacagagaagagtgatgtgtatagttttggggtcgttttattggagatcataacaaatcagcgcgtgattgagcggactcgagaaaagccacacatagcagaatgggtgaatttaatgattaccaaaggagatattagaaaaattgtagatccaaatctcaagggagattaccattctgattctgtttggaagtttgtggagctagcaatgacttgtgtaaatgattcttcagcgacaagaccgaccatgactcaagttgttaccgaactaaccgaatgtgtaactttagaaaactcaaggggagggaaaagtcagaacatgggttcaacgagttcaagcgaagtgaccatgacctttgataccgaagtgaaccctgtggctcgctagactgcgcaaggaaaatatcggttgcattacattatgtacattcacataaagcaaaaatattttttgcatgatttctttgattttactattgccaatagaaggtaaatttgatgcattccttcatagatgtaccgtgtacgtaatagttctgtataacaaataaagaacaaaaggcctagatatggcacattgcagttctgatccgtcctgcttgtttctttgattaataaagaatttgtttgcaaactagtacaaaacttaattataaaggtagtacagtcactattcacaattagtaatatagtcagggttttactgtttgtgaaatagaaaacttgtgagatagaaaagaaagtggggtagagggtatagaaaggaaattacaaacaagggctttttgttgggtgagaaagagagagacgtgtatagagtttgtttagtgggtctgttttttttttaaatttatttttctttctttactacatttcatcccttctaagtttaataactaaaatcttcatttgtaaattttatttttctaaaatttatcataaaataaaaaatctatattttcttctctataatttgatatgcattttgtttcatgattttctaaatttttattacaaagcactttacaacagtctaacgacaaaattatctgtacagcataatatctgtacaaatatatgtacaacagtttaacgacaaagttatattttcgtttgtatccatcccctttattttcgtagtcatactgtacaattttcagaatttcaaaacagatgtacagtttactctgaatttcgaaacagctatacaaaatactattatgggtaatatattgtatattgctcgtgtgttgattcagatggatgattatgccaaagtatagctacaaaatcacctaacagtcaaaatttaaaataattgttccaacataaatatttcgtatcgtgaaaagtataactttctttttaaacaaagacggtgattgcattaactcgtatcaaatcaataccatggccaacttaatgcattaactttcaaatcaatatgagattgcattcactttctttttgggtcttcaaaaagttcaaaaacctcaagtgatttctctacttaaattatccttataatctgaaaaaagagattaatcaacttcttaaattcttcttatggttttggtttacttttacttttacatgaataatacagaaaagagctatacattcatcagtaatacttgccattttgaaagaagttcaggtaatttgcacaatgttttctgtacatcgctatctgtacaccgctatatgtacaccgctatctgtacagctatatatgtatagatattatttgtacagtactcagtaatataaaaattaaaaataattaaacaaaatgtatatcaaataatagagaaaaaaatattttttttgtttatatgatcaattttttaaaagtaaaatttacaaatgaatattttaactattaaactttgcatggatgaaatgtaataaagaaagaaaaaaaaaaaattaaattagaaaagtctggcccacttctctctctcaccctctctctctttctcaaacgctctctttctttctagggaaatttgcaaatataaccaagaaaaatttaataatttagaaactaacacttcaaaaacaaatagatgatattgtgtgtattatatgtaataaatacaattctatcctcttcttcctctttcttctgcgtgaaacatcttctctcttccttctccttttctttcactaccaccacaaccaccactacctttaaagccattgtcgccggaaaatcgtatccggagccaccatcgtcggaaaatcatcactggagccaccatcaccatcattctattctattaaaattttggattgaaaattgaaacttgagatgatatcatttcgtttaatgatttttgtttgggttccatgtatagtatcttagggtttagttttattagatcaataggtgtttgtaattagattgggataaacataattattttttctggaaaaaattcttggattgaggagaagacaagaaccgggaagaaggtgaaggaaagagtgtgttgtattttcacacctcacatgtgctactcaataaattatgtatattatagtgttagatatttaataactttatgtagattggttattcacctaattcacccttctttctaacgcccaaacaaaaaacttttttttatttttttatttttaatgtgtaaaatatgtatatggcattgtcgtaaatataagaaacatctggggattacaatgtcttcaaaacagtagagcacagtaaaacatgaggaatttgccaattgtaaatagagtatctgtattagttttctaattaagtttgaaaaatatactaaattccaacatatctctaaaatcaaatgagtgcaaacatcactactggttattgaaacttgaaagcaagccacgtaataatttgtattatgatgaacacaagaaccagaaacaagctcatgaagaaaacacagtagacgctaaaaggggaaactaggtgggattacaataccttgaattgcttaccaatcggatcaaaccctaaaaagcttacccaatctacgaacatacgcactacgcagtttaggtaaaattgcatactgtcactacaagaaaattgccatttaccgactacagtattagtcactctgtagtcgttaaactcctatttacgacaaataaacgactattaaaattagtcgctaatcgagagtcgctaaataacgtaatcgtattttagtcgcaaaagagcgacaaagttacgactaagtttgggtaatcgcttttttagtgacattttagtcgttaaatttagcgactattagacgacaaattaacgattaacttgagggttatttagtcgttgtaggaaattagtcgttaaaatttacgactacgttgtcactaaatttagcgactattagacgacaaattaacgattaacttgagggttatttagtcgttgttggtaattagtcgttaaaatttacgactacgttgtcactatttttaagactgatttgcgactaaaatagcatttagtcggaaatttttgtgactgaattgttataaataaacgactgcttggttacatttttgatgactaaatttgcgactattgttgttattagaacatctatatgattgttataatgattgaaaccttcctgagaaaacaaaactttacaataagcataaacacaatacaagaagcatgaaaacaaatttattgtcatttcagaaaagtacaaaacccaaattacagaaacatgttcgattcactacaacttagaattttgttcagcataagcacaagcaacacaagtacacatataaaaactttgagccttgatattgagtcttgaggaaggagttaagattcagacctatgaagcagatgaagagggagaggcagctggagagggtgagataggatctgtggttgtctccttagctgaatgagattcgaggaaattgaggaaccgaggatcattttcgcgcaaaaacttctccactaaggacaagtgctcaagcttcttcttctgctcatctgcagctcgggaattctcagcttcacgcctctgattgtaagagacctgctcttctatcttgcgttgagcttcaagtaattgttcttgcaaagccacaaaagaagttgagtcacctgcttgcttccgcttgccattgacaagagactctttgaggcttcctactccataaggaacgcctcttgaatccctctcagtggactgcatagtatgataaaagctgagattagagactgaaaaagacaactcaaaaacactaaattgggaaacataaaacgttacctgaagaaatatggttgtacattcctcagctgtgagctcccgtacccgcgaagtgccatctgaaacagcagaagcttcagcctcgagctcagactgcctcagctgcaaattcttctgatataactctgcaatcttctctgcctttcgatcaacatacgtcccatcaggttttgtatgtgttttaatgaaaacgtcaccaatactgacagttttgcccaattggtcttcctgtaatgaaaaaaaaaacaagtcatagaaaagtacattgaaacatcgagttaaagttgcaaaggagtaaacagagagaagacttaccaattcgtcccggatttgatgatatgacttagaccctgagaagtgtatgtgaggacctagaccgttacggtcagacatacgggcatttgaatagatttgacttctttcctgagcttcttcagtgtcccagtacgcagtcatttccttccatagagttttcccaatccatttaggtttctttcgactagttcttacagtgctaaccatgcctttcattcgccttaaacagatctcgttgaagtaaaactgaacagtccctgtgatcaaaggatcccaatggtgtgttttctacaaatagaaaaggtaatgtcagtaaaaaaaagaagtgtaatcaactatataaaagaagggctgaaagaacacttaacagcaaactcgaggaagtatttctcttgtctctcttgaggcacacatgtccagctgtagtagggaccatcaaacttgtttgtaaacactctagtgatattcctaacaagtcgtgagtttgtgtcccgagtaaacctccatacacaagaaaaacaagcagttatatatggcagaaaatatctaaatatcagaccaaagactaggaaaacataaattgtggctgcaaagtacaaacagatcatatagagcagaacatagattgtggctgcaaagtatcatctagaactaaacttacacaatgacagacacgatactttgcagccacaagcagttgttctcgcaaacaacaagtagagtagagacctagacgacaaggctcttcaaacacattgcaatagattgtggctgcaaagaacatcaaaatatcaaagaccaaagaccaacacaacacgagactaaaacaaagaatcaattcagacattttctcaatctaatcaatctcacaaagctcattactcaactaaaccctaagatcaaaacacaacttaacaaaacatgttctcgcaaacaacaaaataagaccaacacaacaagactcttcaaacaacagaatagattgtggctgcaaagtaacatctataatatcaaagactttcagaccaacacaacacgtcacaaagatcattacccaactaaaccctaataacaaaacacataacttaaatcctaagaacaaaactttcagactttcagaccaacacaacacgagacacaacaaagaatcatttcagacattttctcaatctaatcaatctcacaaagctcattactcaactaaaccctaagatcaaaacacaacttaaactacttgttctcgcaaacaacaaaataagaccaacacaacaagactcttcaaacatgagaatagattgtggctgcaaagtaacatctataatatcaaggactttcagaccaacacaacaaagaatcaattcagatattttcttaatctaatcaatctcacaaagctcattagtcaactaaaccctaattgaacacaacatgggatcacaaacaagagaagaagaagatcataccaggtggtattcggtcgaggaatgggagagaggacggtgacgaacttatccctctccggcaacataagaagatcgtttagggattgaagtgtgtcctcctggagatccggcgacagaggtggatattcttcgaagttgttgccttgagaggatgggtgactgtgagcccgagactcttgaactacagaaggcggagggtcttgctgagaaggcggagggtcttgttgaggagccggaggaacctgctgagtagtcgcggcttgatttgcaggattgttctgcacttccacggaggcagacctttgcacttcaggttgtcgactgccagagtgctggaacaactgcagaggcggcggatagttccgaacatgagctgccgttgcctgtaaaggaggaccggcgtcttctgatgcaggcgtctgtagctgaggcgaccgttctgctgccggcgtgaaatcgtactgggacggaagagaacgaggtcgtcgaccagccgtggatgtggaggctctctgagcaaggttaggactggttcgcttcttttttcctcgcccaaacatgatattaaggagagatctagatgagacagaggttcaaatcgatgaaatcgaagaagaagaagagatttaagagaaaaacgaagaggaaagattgatttggtagggtttcaaagaggaaatcgaagagagagattgaagaagaagaagactgcagatgtttggtagagagattaagaggaaaatcgaagaggaagagagaaatttgctagggtttcgcagaggaaatcgaagaggaagagagaaatcgaagaagaaggctgcggatgtttcgaagagaaagagatggaacttagggttttgacattgaaagggattgggcctaatgggtttgggcctaaaaagttctcgaaatttaaacattagtcgctatattgtcacatattagtcaccaattttgggcctcgaaatttttggcccaataatttttatgtagtcgctaaattgtcacaaattagtcgccatatttgggcctcgagttattttggcccaatagaatggttatagtcgctaaattgtcacaaattagtcaccctatttgggcctcgagttattttggcccaatacaatggttagtcgctaaattgtcacaaattagtcgctttatttaatttttaataattgggtttgggccttgtgtttttttgggccatagatattcaaaaatagtaattatctataataaaaatataaataaacataacatacttaatcaaatatagtttttcaaaataatttaaaaatgtttgcatagtatttcaaaataacttaagtacatatcataattactagaaataacttaagtacatatcataaacacaaaactaatattgttcttcgtcttgttgttcttcatcatcagaagacgataaattacatcgaaattcatcttctggatcagcatctccagcatctaaatcgaggtttatggggttgcgattgattgtcaaattgtcgagtataagatcttctattgttgttattaaaacagcatcatcattttctgtttgcaataaactcgggtctttattttcatattcttctaatatgtttccccttagatttacttttaaaacattgagccactcccgctttggttttttcgtgtatggataggaataaagcacacttgttccgcttgagatgctgtttgtaaatgcaccatatttagagaattagatatttgtatatgaactagaaaaactaaatgaccatatatatataccatacgtacctaaaataaagggttcgtatttgttatatttcctcgatgaaagaacgtcgacaacaccactattgctcctccgagtacctcttccgagcttagggtcataccacgaacatttaaaaagtgtgattttcaaactgaccaccccctcatactcaagttctatgatatcagttaagttgccgtaaaaatctgctgcgtcagatgcatccgtataattttcacctttcacacatacaccatagttacaagtcttacgtcctgctccatgactctgcgtatgaaaaaaaatagcctcttgtaaaatacattggccatgttttgactttgtgcaaaggtccattgactatctcttgaacccaagttggaaaaggattactagagttccaatatgtaacctgtatgcaaatttagaaataaacatcattatagagataagaataacaataaataaatgcaaatcatatatattataaactatttagacatatataatctttcacccacacatgatattcctcgtttcttttcacgaagagttctttttcgttcaatcctggatatttaatagaaagaaaatcttcgaacatactatataaagacaaaaacaacatataagggttagtaaacaaacatttatataattaacttaaaatgggagtatgactttgttatatacctctcaattacttgaaaataatcacaattccgtataacatatccatgtgcgcattgatagtcttcctctgatagccatacttcacgtatttctccacttggacgaccaacagaactaaatatagtaggtactccaggaacatgatatacaggaacttcaccctcattgaatcttgttaacctgatccaaaagaggtaattcatggttatttttgcgcattgaaaacttgcatcacatcgataattcatggttaccttgattttgtttgtatatcatcggcaaagtagtgctctgagaaataagaaatctcgtcattgatatatgactcaacaattgatccggctgcatatcttttattttttgcttttcctttcaactttttgaaaaacctctcaaaaggatacatccacctatattggacaggaccgcccaattctgcttcgtaggggagatgtataggcaggtgctccataacatcaaaaaatgatggtgggaagatcttctctaagttgcatatgatcaaaacaatgttctgcttaagaatttgaacgtgacttttctgcaaagttctcgaacataagtccctaaaaaatgcgccaacccctggaaaaaaaaaatcatcatctcaagtgcatatatgatataaagagtaaattatattcttattttacctgataatgcaaggtgaacgttccggtcgaggagttctgcaaagataaatggaagtaatcgctccataaaaacatggcaatcatgactcttcatacctgataacttcccattctccatatcaacacaactactcaaatcagacgaataaccatcagggaatttgattgcatgtttaacacattgcaataaactcattttggcttcatttgtcaatgtataagctggaaatggagcttttctcttactatcaatatgtaagtcaggccgagaacaaaatcgttctatatccattcttgccattatgttgtcctttgatttacccttcacgctcataagagtattcattatgttatccaaaaaattcttctctgtatgcatcacatcgatacaatgtcggagattcagatccttccaatatggaagctcccataatatgctttccttgtgccaattatgttccttcccatagcctggcatcttcttttcgtgaccgttgccaccaacatccttggttcttggtggatttacaccagacaaccgctcgtaataaatttgctcaccggttaaagactcaggtggatactcggtagaagcgtcttttccttttcggaagtcttttttgttcttccgtaatggatgaccatgagaaagaaatcttcggtgacaatcaaaccagcacgtcttccttccattaggtagataaaaagagttagtactttccatgcaaattggacaagacagtttaccgtgggttgtccatcctgataacatgctgtacgccggaaagtcgcttatcgtccacagcaacactgcttttagattaaaattttgattcaaagacacatcatatgcatcgattccagtagaccataactcttttagctcctcaataagaggttggaggaagacatcgagactacctcgcgggtgatttggcccagaattcaaaattgtaagaaacaagtactctatattcatgcacatacccggtggtaaattgtatggagtcaggatcacaggccacaaagaatgatttcgcgacatgccaaatggattgaatccatcggtacataatccgagataaacgttacggggttcttcggcaaacatgggatgtagctcttgaaaatatctccactccgccgcatctgaaggatgattcatttcttcttcttttgattggtgctctgcatgccaacgcattgcagctgccgtcttgtggctctgatacattctcttcaatcggtcaccaataggtagataccgcatacgactatatggcactttggttcttcgacggtagtcatccataggcttccatctttgagcactacaaaaccgacatttatcttccttttcgtcttccttccagaaaatcatacaattgttaatacaaacatcaattgtataataaggaaggcctaaattgcacatcaatttttctgtcttgtaatgcgaatcagtagcttggtttccttctggtaaaaaatctgtcaacatttgatataccgaatccacacatctttcactcatattatgatccgccttgttctgcatgactcgagctgctaacgataattgagactggccttgtcgacaaccatcgtacaatggattttgagcaccttctaacaagtcgtagaattttttagaatggttatgtactggttcctccacattctgattagtaccgtcttgatgatagttatcatcaaaccccacgttataacgaaatgcatcgttcaccatatccacatatggatcttctacaacattacccacatccacatatggatcttctacaacattacccacactttcataattctctcttagatacgtactatcaattacataattactcgttcctacattcatgttgaaatcttccccatgcatataccaaacataataatctggcataaatccttgactaaacaaatgactactaacttttctacccgagacgatatgttttttattcttgcacacagcacaaggacaatggaatttacctcgacaactttgtactataggctggctattagcaaatgtcaagaactcctccactcctgcgacgtattctgctgacaaattccccgtcatttcatcgaacctcttgtacatccaatctcgattaaaaccaccgctactcggataattatagtttcccgccattataagactaataataaaactaaatatatttttaaacgttttttttcttcaaaaatgtttattttttttaaaggtaatattagtattgtgtttgtgttgtgaatgaatattttgtacgagaacacgactaaaacacgactaaatagtgtagtcgtttaaagtaggtacaacaacttacaaaacgaattacatgtttttttaatcgaaaattacgtctattttgcgactatatttaatgacacgccgttgtagtcatccaatagtcgctatttagaggactattacgagctgtcgtatattagtcggcaaattacgtctattttgcgactatatttaatgacacgccgcagttgtcatataatagtcgctatttaacgactattacaacgtgtcgtatattaatcgcaaaatagcgactaatttacgactacatttggcgactcattaagaagtgtcatataatagtcgccctttagcgactaccaaggcgtctcacctctacagtggtaatttggcgactaactaacgtctatgtttttgttagttgtaaattagtcgtataattgtagccaaatagtcaccaaatatagcgactatgtatgtaatcgccgggtgtagtgggtatttaacagttttcttgtagtgtgtcctgtgaccggattacatatcataggcaagttttcttgtagtgtgtcctgtgaccggattacatatcataggcactgtatccttatcatcatcttttgagaattgtataccttggaaaaagagcaaaccagatgcatagctaaatctacgactgtatcgacatatgtctccagagattttgatatgaaaatcggcagctagtatatgagacgacttctcattatacggattctgaatttcttaggctgaggcgatgagaagaagagccactcaggatattgtgcgacgattaataagagacgcggccaagcggaggacctggtcaagaacagctccgtgaaatatggatggaaaagcatgtaaccccatagcttcgacacgcaacaaaacctagcgattgactttgccggcaatctcaagaatatctcgttaatgagatcacttgggatggaatcttggccgttgataaatcaaagggcacacgcagattctcgagtgaaatatgagagatataggctaacacacgaattttgtcaatggacattcagaaaggcaaagaaaatatcatcagttttcgtttttgtaactattgaaatatttaatttcaccgcatatataactatttgtaacactcatcaacatatggaattttgataccatgcatgcatccagactttgtggaggctgtgatatgaagttttgagccttaaacctaaaaatgtagaaagttctttcatcataggcttcaaagtgtttgcaaaaattagagatatcaaatttttgctattttgtaatccagaaaagcatataaatattcttaccattaatttgtttgatatgttattaaagttctagttaaattagaagaacataatagtatgtgtaaataaagttttcataatgccaaacaaaaaccacgcttactctataatatagttcgatctacgattacaaaccaaaaccatctctaagtcctgatcatattttatgtagacgtacgatttcatttctggcacccttgagtctctctttgggcggttgcacctttttcttaatttctaccatgacctccacaaacatcaaatcggacaacttgggctagaaactggagttgtaatcattaagaatatatatgaattatagtatctaattatagtcttattattaatatgattgcattgatatgttacagatcaaaacttgattagtcttttacaatttatgttacacaatatgtaatcacgagtactattatacaagcgtgtatgtgtcaggttaattatacacatatcacatatgtaagaattatggctccttcagccttgaaagaaaggtacattgtgatcaatctcacgaggccggacgcaatctgatttcatccatccgattctccgtttcacattgtcgtacacgatcaagtgtccacgcatcgagatatctgcaataagaaaacaaaacatgtatctcataagtttcaacttaattgtgattattcagataagaaaattatgggttttacagctagaatgttatttttacctccaagaataatagtggaaccatcatgaacactgcttccatctaatatcccaagacagacatttcctttgttctgcatcaaaactcgaatatatataaagccaaatcgaaatcgaagaattgcaattgttagagcttataaaaagtgcttacgctgatgatcaagtaatcctcgggttgaatcaaaagttttcttgatatgatcaaccatttgctccctatttgcagagttattggtctgaagaacttcttaacatccgacaaggaactgcatattatcgaaacaaataactcttcagagatatgatctttctttcaccacagaaatcaatatggttttacaaaagatcaaattttctcaaattacctaaacgggaagttagttttggctcgccagcagataggcagtgtttcgtctgaatcatcgcgtgttagttctaaaccagaaacttcttgaagctttcaccaacaaaaatagtaaaacaccattgacccgaagaacttcatctaaaaaaggctgattttagtttctgaatttgaatacttactgatgtgaccaattgggagtaagcctggttagggaagtatgtataggaacttcctgtgtcaaataagactttccctactcttccgttttccccatctaagctaagcataccctgcccgtagctcatctttgtaacttgcatctgataagcatccctgaaagaacccaaaaatgtacattaccttagcatatatgcaagtgacaaagattgaagcttttgggaatatattcagataagaatccaatcaagcgattctaagctgctaggtttcgcagattaggctggttttcgttaagcacttacaagcgggaatcgtgaagcataggaacccatgtcattccgtgtgatggaaccaaatcacttcccatgaagatatatccttcaccgtttaaatcagaggcaaggcaatggccaaccacattgctgataatacctctgcttgcaagttgagaaggtaagctaattttagctctgcttagaccgagaatcccgtctgtctttagcagagtattcaacagtagtccttgctgatcatacccgcaccttaaagttcaaatcacgaaagccaaagtcacaacatgaaacactcagatattccgtaacagaatcacaaattgttaacggagaatgatatttacccgaaaactatatctgactcggctagtgatccgttatggagtttgagatgaaacttatctttggtgagaactcccatggagtagctatgatcagcatattcaatctcgtagtcacattgatgacaattttcacaatgttctgtcagttgattcctttggacttctacacaaaaggcctctgaagatctcactaagttatcttttctaggcttatatagttgatttgctccctaaaaccaaaatccagaaagttcatcactaaattcacagagagattctcctaaaatctaaaaaaacttgatctttattctttaccttagcacaactagtacaaggagcatcacattggatccaagtcaattcacttcccgtatcaatatcaagatgatagtattgtccatcttcaggctttccaacaagaatgcgtgtataatacagcctgcaacaaaagcaaaaaaagacaatctttgtttacttgtgctttaagaaacaaaccacacattcagattacagagtattagatacaatgcatacatacccatctggatacacattaccaccgacgggaaaaatcgtagtggaggagtcaatagaaccggcacttgtagataaaacatcgttgacttttacagggttgaccagctctaaatccattgattccacaaagttttcattctctaaacctaaatcttcctctaagatccgctcgtggaactctcgagctctcaatttgtgatatacagggaaaacaaacgacgccgtttcacggagattatcgtcgtcgtcacggttcctctcatcaggagaaaccctaaacatttgaacagagttgggaaaaacagaggcgtagaaagcaaccgcgagaagcgagattccgagaagacccagaactaatctcggcgaattcattgagagatccgagaacaagaggcgagattgttggtttcggtgaagtgggtcgggttgaaaactcgggtttgggttatcctcgggtgggatttcgagtgggtaatcgtggtcagtgagagtgaaagcagagattgttttgccttgtgaaggatcatcagatggtgggagagtgattatgactacgctgtggactcgttgttgttgttgctggtcatgaagatctggttccattctgtgatgtctccgatcgaattgggctggttttgatcggagagagaatggaaacaggacgagaaagaaaaatggcagactaggagtggtcaagagtcaagaggctttcgttatacgagacggaagctgcgaggaaggagagggttattttatttgaagtaaatgtttgaaaaatatgaattacacttaccaaaaaaaaaaaaaaaaaaaaatgaattttacttacacataaaattcatttttattaaaccctccctataaatgttctttttaaaaaaaaaagtatatatggaggacaataaaaatagcttttagtaaaaaactttaatagttttaacaaattttataatttcttgctttacatttatttttcctttttcctgtcaatttgatttcttttatttaactcaataaaaatatatgatacaactttaatttacatgataaaaatttagaaataaataaatatgtaatcataaaataactatacaacatacatttcaaaaacattatgtcaaacaagatatgttaggaaaaacaaaattttttacatgctatacaaaaatatatataaattagaaaagaaacataaaataaaacttgtgtgttcatgtatttattaactattgtaatgttaattttatgtgtgttaaatttctaaatataatattattgctgtataaaattgtttttaaatgtaatgtttttttattttaataatttcaattttgatgttaatgtatttaaatttatatgaatataattgaaataattgaatttaatagaattattgtgagatatatgcaagctataaggactcaatgaaaatatgtgaaagattttaagggtgttatgcaccctcaaaaataaaggttttaaggtttgttggagttaaaaaacttcaaaatttaaaagtttgaggtttgatggagatgttctaatcctctcgtttttttctcttcgatatatgaactgaaaaagtatgaggaccccgaaaaaatcttggactttctttcttgtcatataatataaacaacaacctgcattactatttactagtttgaagaatatctgagatgtagtatttatactatggggttaatgctaataaagagatggatcagtggcaagagcaaagaagcaccacccttgtagtttcaaatatttgttgagttttgctttataatttggtcatcttagtaacaaataaaattgaatatcagaattcaaaagttaagaaaaacatattaattgacgaaaataatatatatatatatatatatatatatattaattagttcgtaaagttccaaaaaataactgtaaaaacaagaaattaagaagataaagtataaaagaccgaaatgggtgcaattttagttagttttagagtttggttattggttttactattttttcagttttaatttttgttatatattaaaagcttaaataaaattaaacatatgaacacatttaaaaaaatgtaacctaaaaaataaagttaatagtattattattttttaactctaaaattaatattattagtttgctactttgcaaactttaaaataaaataaaatctacaaaaatttgattgttgtaatttgtgtgaaatggaaaacaaattgcgttcgacccgtaggattattttcccacgaacgacttggccaaaaaaacaaaggaggccgaattgaagcaactacttttctccatcatcatcaccatcggcgaaatccgccaaaaattgatctccatttggaaatccagatcatgctctagagccctagtttagatctcgaaggaagacaatgggacggatcttcgagtacttcgtcgtgtgcggacttggtccagagatgcgaaccgtggatggagatcttggattccatggaatgcaaacattctacttgcctgctcttcttgaccagttccctcctactgatcaatctccttaccctgcccctcctcctcagcttcctactgttaagtttttcacaacatcttttgtaattctcgtcgagattaggattttgattgggtttaggtccatgctggtaatttctttgttgttaaacggcgatgaaatgtggaatcagcgttgtctagttgttaggtttcttctgtatttgctaaacgaagcatttcgaagttattaactggagataaacgtgctgaattggattgatgttttctaggtacctctaattaggtctctagattagttaagttggaatattgaagttgaattgccttctaccaataaggagcttttgaaatttctctcaaagtgtggttatatttctttgcttttggtcttgtgcttgtagtttgcttttgatgctccatggtgaaatgagtcatctgtttaagagtttaacttgcttgattaggttaagccttttaagagtttgttttctttcgttagataagactagatatattaaacaagcggatttttatgattacgcttcattttcttttggacagtgtgttcttcctgctggggtggagttccattcttctggttttgtttccagtgaccctgcaagtttcccacggagctatcccatagtcttgacgggtatgtgattatccgtatattgcatactcggagttttgtatgctttgcattgtagctgctctatgtgcgatgttgtttcggttgcagtggaattattttagcgtagaagtcgtcttgcactcatttatctagtcttgtttctctgccatgttggatttaagttggtttgttttgaatacacctgctttaactgtggtgggtgatctcttactgattttatcttaataatttttgcacagagggtgatggatcaaaaatatttgtcagttgcattgcatttcgggatcgagtctgtgaggatattattgaagcttatcgcttaccgccgaatacatacgcagacaagtgtatctgtcttgtgtctcatgcccccaatttccgtgttcttcgtaattctctcgaagagatttttgttctttgcttctcttcagaaggaagctggtatataccactacgcttaaaacatcttcttcttgtctatacctaacatgaattatgccttgcgttactgttccgtatatattcagcaaacatatgtgggtggagcttgcattggttcttcatttacttttgtgttgattttaccctcttgaaaagaattgctgtataaaacaagaaaaacaacaccatttttaggtttgaactttgatgttagtgtccttcaaccttttcagtaagccattgtgggatattatcgcctatatggtatctaatgtgccattgccgactcccggaaaagacagagtcttgtttgctgtcgagaattgcctgctctcggtggaagcacctccagaggatagtcttcctcaggcagatgtatgacttgtggttttgtctccttaatctgttttgaatacctttccttggctactttttagtatcaacgttggagatttccaatttcctgacaactacaagggcgactgttccctgacttctttcaactttttccaataaacttatgtaacgtttggcatgttttactgaatgcagatatctctccagcctcttgtacaatgcttggatgtcgacaacttgattaagctgtttacatctgtactagttgaaaggaggattttgattcgatccaacaagtatgtttctctatgtagagacattatgagtttaagatacattttctaaacagttactatttcatactatctctattcaatcaccacactaattttgcctcatcgtgaatctcaataggtattcgcttttgactctggtgtctgaatccatatgtcatttgatttatccttttcgatggctggtatgtcatagaacactgatgagatctcagtttatcacttaaacaaatatgaactcatttgtaagcatgctaacccatgcatttctactgactaaaatatttcttctaatctttattatttgttttgttgtatgtttctgaagcaagtctacattccattactattttttagtggagtagactacattgatgcaccaacaccatatatgatgggtctccactctgatgtcgatacatccaatcttgctatggatggcgtgagtctaaatttacgtcatacttatcctctttaaaatttgggcaaccttatattggtctaaaaacattgccatttctaggttgtagtggtggatcttgacataaaccaaattactacttctgaagagatacctcagataccagagcctgagttcagcactttgcgaaacgatatcttgaaactactgcaccctaatgttgtagcgattgatcagttgaagggctttggtaattccgttgagcagtgccctaaaagccttagcaaaccttggggagaggatcatgaccttcaactcaggtgactttaggaaaccttgtcttgtgattgcctacaatttattatctttttccatgggaactgtttggttctcatgttatcttgttttgttatacaaaatccatttcctgtggcagggttatattcttaaagtgttttgcatctatcttgggtggctaccgcaatttcatagtatgtgatatttattctttccttattttatttattcaccccttttgtacatcttttcttacttatacggattcttttgtcaggaaaacaaagtttttagcactgatgcgtttctgaagagacggtctcgttccacaaatcagccaccagagcctatggtaagctaactgtttcatgtatggaaggcatatacctacacttactgcatttcataactcaacattactatccattgttccaattagtgtggtaaaccgtcttttcacatattactttcgagtttttactgcatatttttattcatccaaaagatgttgaataatttaagttacgttttatctgttgaataattacttttattggtactcttccaattgttttcagttggttcaattcttgggctcttttgcattcctcgattaccttgaaaggcgtctaagctctgatgagaagagtactaatctccttgagaagttacaagatgcagttggaaggggtcaagatgcaatgtcgattctgcctaaatcttctatggagcctgaaataatcacaatagccgagccagaagttgaagaatcaggtatattttgatttgttggtagaatttgttagatagcagaagctgaatgataagagattggggttgttcatttataagaaactcccgagaatgaaaatatatctaattgatggtataccatttttcataatctcatgggggttttggctggccaccagtatttggaaagagacaaaatttacaagttggtgtagtatgcataatagtagaaaaagtactaagactctttcactctgttatatttttctggggaataatcgtccgtctactgagtttgggatcatgttctgatttatctctattcttttttgtcagccaccaggtatacctatgacaggtttcctgcgagtgttcggtcagaggaacaagaagaaaagcgaaagcagatccttgcagcagcaagcggggctcttgaatccaatggaaggcaccctccaaggtacatcctgatttgcttggaacagcggtatgattcccttacttattttctactatcttccaattgtagctcaccgccagggaagaacaccaaagaagacaatttcagttcaatggagagggctgtaagtgttgcttgtaatcctgttgctattgcatggcttcaaacaaatcaatatgacatgaagaggtgccatggctctgatattgtaactactgtttgcaggcagaaagagaacgaatggtcttggatatacaagtcaagttgcaggtattttttcttctttgtgtatttaagagattccaattgcaagtttctggaatgatcaacttctccttcggaatgattttgtctattgagaattttgtgaaggaaagaacccctacagtacccaaattgaaaaacagtgaagatcaagtctaatgccactattttattggtttgttgtggtttccagggattatggctccgtcttctgaaactgggttcagatgaagatcctctttcttcattcgaatacggcacaatattgggtatgttccattttaatgggaatgtaaataaatgtagactaaaatttccgctgcaagaaattggtaaaccaaggaatgaaccaaattgttatgcttaatcagccgtatactaaccaaatggtttccattgtgattatgtttccgtctctgctgtaaaatccagagagctgatgttttctcaattgaaaattgaaccccaaattttgctcatgtagctctgattgaatctgatgctgaggggattggtgggagtggctttatcgagtgtatacgagagcatctgtattcggtaagcgtagcaactgtacggcatatatatactgagccagttttattgagctcaaccttactgtatagtggatttatttcctgcagggctggcatggtcaattgtccgaggagcagttcattgcggtcaaagaattggtaggtagatgatcgattaactagttttatctgtatactggccttcatattcccagtttctcaattgcgtgcacgagagctgtgcatatttagatttggtcagattagtcctggctgttgttgaaaggtttttagctttgggtaaccccattaatgatttttttttgggtttttgaatttggagtttaagaaatcttttaaacacttaacaatgatattcttcaacaatgattattcattgttatcagctcaaaatggctgtgggccgtgctgcttcaagaagcgatttgtcgacagtgcgggatgcacttgaagtttctgcagaaatgttcaagaaggatgccaataatgtctctgactatgttcagcgtcatctcatctccatacccatctgggaggagttgaggtatgcaatttaacatgctgccggctctatgaatttaatgaatttttcggtgctgctcagaaaatagattattcgacttattgtgaatttttttgacagattttgggaaggttacttcgagtatctcatggagcagcctgcaaatgagtgagtcttcttaaaattttgtattcatcgataatatcaattgtttgtttgtataaatgctccttatcacgttttgtgatgaaaataaaagtcgatctgtagcatacttgatatattggctctcgcaatgagctatttataatggtttccataattcttgtttgtttctctaactagatcgctgaaagaaaattttggagaaaaaaaaagagattgatcaggaatttactttgtctatgttttagatcttcagtctttaaatatttgtaatgctcgtagattgtaagtaatttccatgtcactcatcggtatcttttttcgatttgccctagaggatgcttcatcaacttttccattgttgtcaacatacttgaaattttatccctgttgagcatacatcatcttattgtctcttgcattatactgccaattaatttaatcatcatgggaattactaattcgtgtaactctttattgtattttctcagatctgtgaactatgctactttggtcacagccagactaatcatagtggcatcacatatggtgaatttcttattttgagagttgacttattctttaccttcatttcttgatatgtgatagttacagttctctttatttaatatgtcttcacattactttatgctcttttgaaggctggcttgggacttcctgatacagaagcttggaacatgatcgagacaatagcagagaaacaaaagcttggatataaattactggtaaattaggctttctgttcatatcgttctgcagttattgaaatgtcacagattttgttaactttatactccatacatttacaaacttcaagctttttaattgggcttttggaaaccataaccaactgagtccatatcttttttgttgtatcttgaattttgtttcagattaaacttagagggttcctgtcgcatgttcagcaacttcgtgtcggctattggggtgcttcttcatttaagcagcaggccatatctgctgggttgccatccccgcgtccaaaagatgtctctgtctctgatgaaacccagcaaccctcagaagcttctggaaggagttgggttcagagtatgtttagcagagatacagcatcgagagcgaactcgttcagtcgtgttcgtaagtgggtatctgataatgcatcttcaggtatacccatgattattcttctttctttgtggttgctattctggcttgttgttgctgaagtcaataacttggcaaaacagacataactgctgctgcgcagaagaaaattcagaccaatgtacgtgttctgaagggtcacggtggtgctgtcactgccttgcactctgtgacaagaagggaagtctgtgatcttgtgggcgatcgcgaggatgctgggttctttatcagcggtagtacagactgtctggtcggtataaaatgcttgattggaaaaatgtttatatggttatttttcattcatcagttttttaatcatctagttgacgttgctttgcacctataaatgttcttgatatctacattgagaacacataaagagtgttatattatattagatctaaatatctaaaggatggttgcattcactatctgttaggcctaaagatcattacttagagggtcaaagggtagttcgctcatttgctattaattcttatctagattaagtgaattattttgcttttattgttaccacagtcgtggatatagtaaattagaatatttggaagaataactttgccaaagtagaactggaacaataacccgcatgctgcttcttttcctgtgcaatgtgtcaacttcttatggagatagtcattgattgaaaagttttcacttaagagatgatgagcttgctcttaaataggatgttgtagtctttcacactttcatttcttgaaatttagatcgaggtaaaccttaatacagaatggtaatgacaatctagcatccccttttggttgcttcctgaatttgagcaggttaaaatttgggatccaagtctgcgtggttctgaacttcgagcaactttgaaaggacatactgggtatacactatttcttattcaccttgatggctctcgggagttatgtttttttttgttaatttttcatatgtggtggtttctttaacagcgcttcctttcttgttttcttttcaacttttgatgtagaaccgtgcgtgctataagctctgacagaggaaagatagtttcaggatcagatgatctatctgtgatcgtatgggacaaacagacaactcaacttctagaagaactgaaaggccatgattcacaggtttccactacattctagtgtttttctgtcattagtacacagttcatgagtgggaagtattaatggtcaacacaaaataaacatataggcgtggacataattaaataaacatataactatcagttattagaatcccatttgacagaatgttcaacgacaatttgaatttgttaagttactattgttgaccaattattaactatccgtcagtcataactcataaggcaccaaagaagaagcgatacttatggtgacttaccttttttctgactgtatgctacatccaaaactattctgcaggtaagttgtgtcaagatgctttcaggcgaacgtgtcctcactgctgcacatgatggaacagttaagatgtgggacgttcgaaccgatatgtgtgttgcaactgttggccgatgctctagtgccattctttcactagaatatgatgactccacaggaatcttggctgctgctggcagagatacgtatgtatgctatattactcataagtaacaaatggatttgctgtattgaatgtcactcacggattcaactataatgattggataattatcagggttgcaaatatatgggatattcgttcaggaaagcaaatgcataagctgaaagggcataccaaatggatacggtgagccttcccttgatcttgcacaacatgtttctttttgttgtgatcgaaaaataaatacaaagccaatatacgtatggctttttcttccgttacaagtttattttataatggactatctgcaggttgtagggttgcttcatcgtattatggcattgattgatattaaccatttatttattactttttaaattgttgtaggatattataatatctcagaatctgcaacttgtttgatcaaactgtgtcaattctgcagatcaattcgaatggtcgaagataccttgattactggaagtgatgactggacagcaagagtgtggtctgtctccagaggatcatgcgatgctgttttggcatgccatgctgggccagtacaatctgttgaatactccccgtttgacaaaggaataatcacaggtccatgctgatttcatctaccatcagttctcaaaagatttattaagtagcatctttttcacaaaataacatcaaagcttacgttagtgcgttgctgtctattttcttgcaggctcggcggatgggttgctacgcttttgggaaaatgacgaaggtgagaatctcattattaacctggatctaaacacaattatcaactattgcaccaaccattccgttaatatttttgtttccttggtttataggcggcattaaatgcgtgaaaaacataacactccatagttcttctatactatcaatcaacgctggtgaaaattggttaggcattggagcagcagataactcaatgtctcttttccatcgtccttctaacgccggaaccaaagtctcaggctggcaactttatagagtaccacaaagaacagccgccgtggtacgaccctccctcttttcatattagttggatagttgctctaaatttttctggtcatgcggtttgataagtcttatgagatcctgtaacaccctcaaagtagtatgataagaccacacagttattaatcattgtgttctacaacttcggctagtatgtgtcattctcactgaaactgaatctcggatttaatgattcaggtgagatgtgttgcgtcagatctcgagaggaaacggatatgtagcggtggccgaaatggagttctccggctgtgggatgccaccatcaacatctgattatgtcttccacaactttttctttgtgtatttttaagagtatgtgttattgttaccttgtatgtttgcttatgttctttgagatatgtggtttaagaaaattttgattttcttttatatatgttttctcagtgattcttgttttgatcaatccactaattaataaactttggcgttttaaaatgtatgaaatgagattcgattaaatgtaaggacctgtcaaaatttagaaatccagatatttgagctgatcattaataaaaagtatgttcatcttccatagacatgttacatttacttttaagtttatcttggaatggaagattccaatgctcaaataatctcttgttatacacaattttaatggttatacttattattttcttgtgagaaagagataaattgggtcttttgacgagtttatcttcttcttcttttttttctcgcaagattaggattttattcataacaacatgggttacaaaacagattacagcccataaaggcccacacaatatattgcttcaacttgaagaaagtttatcattagtttcattcccaaacaaacgtgtcaacagtggtacacgtgttggatgaaaattctaaaagctttccgacatcaccaccgccatctaagatgctgattctggtgaagaaaatcattgccgataactgaaattcgactattgattcttctgattttcaccgacaaagctggttgcaaaacgaatcaaaactccgaacaattgaaatcacggctaaaaggcatcttaaaatcgcgaaggaaatttctttcttttcttcaattttatttgcaaactatccttgaaatttcagtaatccgtatacccaacatgacgatccggagaaaagccaccaactaaaggttctaaatagatctaagtcaccataagatggttaagcttcgcttcaaatccaacaaacataaaaacacttgtataaactataaacatataagataggtgtgtcatctctcataaaactctgtaaagacagagacgaaagacaattcccctttattggaagcaaacaaacaacacctaacaaaagcgacgacataaaaacacggcaacggaaagccatgtctacggcaatgaaaaaatcatgttgacggcaagaacacggcaacggaatagccctgttaacggcgatgaaagataaaagcttctctctctagacagaaaagagagagagaggggtccttaacttattagatttttcattcacgagtttatctacaaatacagaatatatatgaaaaagataaatacataaataataataatttggaatttaaaaagaatatcaagttggttttatcacaataccctcaagatcatgatttcgttttcaaaagaaaagattgagaaaattggttctcactaatattatgataattattagaactgtagcatagtagttgatgcccactcacgaaaaacgaagcctcattgacatttatgttttggtacaaattaagaaagaaagaaaacacaaatgaatagcaagtttattaagagaaacatgttggtataaaaatagtcatcaaagtcaacccatcattcgttgacccattggaggagccatcatctcttgttgctgacccattcgctgcttttgcacgttcccaatccatcctaaatacaccaagatatgcaataagtcaaattaatcatttctaaaacccattatttagaatatttattttaaagagatctaagagcttgttggtttaccaatggaagggtcaaggccacgattcttgagttcacgatattcttggcaaagagcacaatattcacagaagcaatgagtgatccaatctggagctggagcatccggtaacccgtacttgcttcggagcttggtccggaatgtgcatgtatacacacacggtatcgcaaacaaacaacatatcaacccatacaacattccagccgtcccacaacctgcaacatacgcatatatacttaaacgtacataatatatgtttatgcatgctacattgataattattgaacctatcaaaatatatgtatacatgacagtatcaaatgcaacaattgcacatactaaaaaccgattttgtatacttttgttttcttgaattgaatgtaaaagataatgtatacttactggtcgctccttcatcgataacctctgcgatctgtccgaacgtgacgaatggaaaacagcatgtgatgagagctaatacaaaaacacaacgaatacagaagaatcattttgcaatgtaaggatggaccttcaagatagaattattcaaaattttgaattctaaccattttcgccgtcgttcatgcaatcaaatagacctgaagtccagttcgatggctgtgtatggaccggtccggccattgatactccatatggttggttaaatgttgcactttgattgatatacgtaggtggaccaggtctcatcggtacttggtttggttggttaaccactccaccgttgttgggatatatctgctcagcttgcagaacccgtttctcgtcaaccggttgttcagattgtgcatgaaagaccggattaaagttattgttcatcctcgggctcggagtttggtctggtcgacccatttttgtaaaccaaagagaagtgattagggtggtttgaaaataaaggttttaaccttttccttctcttttttttgtgtggaaaagatttagaatgaaggtttggtttatataaaggttgatgattcctgtgcaatttgaactagtttgaaaatttcgttacatcttgcatttttattttataatacaacattgccatgtcgtatattaaaaaattcgattgaattaaaattctgattcgtttatcttataaatgaaactagctctatctgtcatcatggttctttggaacatggacctatgagttgattgatatcattctcgcgaaaatgtaaatatatctaacctacattctatatgcaacaaaattgaatgcgatttaagttatatccgcaaattagttttatttacttgtatcataaaacaaaaaggatttgacttcgtaaccttgttgacttctattggtggtgggaacttttataatctataagtcggaaaaaaacataaattggtattgactatggaaaatgatacttcccatttgataatgctaaacatgattgtctatgctgcacatggctttctttgtttgcttaaaagacttttgacttatgccaatgtgttatgatccaagctaaggacttgagaaggttaatatatttaggtggtgttattcaattatggagttaaaatctattatttaaagtttagatgattgacttcctgatattggcatattgcttttaagaatatgtttgcttggatttcaaaatctctggagtatatcttggattttgattctaatgatttactcatgaaactccaaaagtgtttcatttcaaataaattaatatacaaatattttacaagtcttttagttttgaataacactgaattttaataaactatttaaaatcttaattgaataacaacaaactttaaaatctattaagcatgatttaaaaagataagctccagtaacactagattttaaagctggatttagaatcattagatgaataacagtacattattgttgaatttcaattctattaaaatccatcaatgaataactgcaagaagttaaaaagttgaatatccttagtgaaggatcaaggaacatcaaagtcgttgtagtatagtggtaagtattcccgcctgtcacgcgggtgacccgggttcgatccccggcaacggcgtttttttcccaacttttttgaagcagctgaaatcattgtgggccgtaagaggcccaaacgcgttgtttgagtttaaacttttaatcaactcaaagtaagttaatttcccttaatactcttgttggttcattgacgagggattttggcatctgttttttttcattgtctcactggagatgcatttattgaaaacaaacagtaagatgacttcgcaacactacggtcactcctcgtctggtcatatatcttgtcaagagcttgctcatgctcatgactgtatacctactacctactacatctcaagcttatccacgtcgaaaaactcgagatggccattgaagcagctttcaaaccagcgagaacgatgtgcttgcctcttggcgaccagaagagagcatcagcttccttgtcgtcaaaggtagctagctttgaaacttttccagggttttggggtgtctccatagaatagaaactgacatttggctttgattgatctccgtgaatcacggcaaacctgtgaccgctcggctcccacgcgaaagcaaggattttctcatccacttcaagagcctcggtggtaatgccttgtaccttattgaagcggaaaagctcaaacagagagcacgtatgtcgagtaacttggacagcaagatactttcctttgctctgccagtacatcttacagtcgctaacgctgagaatatccttgtgcatcagctccacatagcccggtatttgcagaaaaacaacctttttaggctggttcttgacatcccctttcaacagtgaaaggattggttcagtaggagaccaagacatgcccacaacatcatcaaaattcacagccgcgccttcttgcgtagcagtctgaaagtcttagtctcataaacagatacagtgtttttgataagtgtggcaaagtatttatcatcttttcccccagcccatctaaggaaaaaaagagaggttatgtcaatgaatgtattaagaattctattcaaaggaaattcaagaaagtacctaattataggccatgagttgtcaacaacatgaccatctactccagccattattctcccagttctcacatcaaagattcttaaccagggttcctgcaatttggatgcaaataagaatactttgcatcaaaatgagattggaagtagagaagcaacgatgatctatggaatctctcgtctgtcaccagtttggcacttgaaaagtttttaccattcttaacctcttgtaagaattttacattattgaatctttacttctcttcttatcatatttttggacttggttactttttttccctggaataagagatcaggttggcctgtgcttctacgtttttgttatgtattttgcaaacaaattgctcaattggtttcatcatgcctattttcagttacaagagatcttctctgataagtataaacttgagaccccattatctcacctcttagattataaaacttcaattttggcagctacatagtaacatgctacgctacttttagtattttttggtgaaattttctagtcaacacttggtctatgactctttaatatgttttgtttgttgtatctatgtatacttctattcaactttctctctactgtctgaatatgaaatcctcctataggcctttgtttcaagaaatatattgagaagaaaatcatagatttgaaatggaaaaacagattcctctgctgtacattattatttgccgcagtttcgctattcgatttgagaatgtacacaagttttcagtacaatatatgtcagttttaataccaactgtattgttttcagtcagtgcattgtcgacggagctggatgttgctgcggtaatggcggtaccggataagccggtacagcataaggagcaactccaagatgatggtgatggtgatgatgatgagttcccattggaggtggaagcatcacaggtgttccaacagctgaacccatatgatcaggtggtgcgatgatcggttgtcccactggcgcaccaccatacatccctaatccagccattgttgggggatgatgttgttgtggttgcggttgtggctgtggttgtggctgagctggtctatgtttaaccacttgcggttgttgtcctcctcctgtaaccgcaggagcttgattgttcacagtggtgatgtcgtgaatgctagaccgccttctatctcggttcatcgagttaagcctgatgaagtatttttgagcatgacttgcaacttgtgttggagttcttgagatcacaaagttccttgaaatgcttctccaatctcctttcccaaacttgtccaaacccaaaagaaacaaccttccaaacaaaacagagtattcaataaaggtaaagaatcttccaaatcttttttcactcttttaagtctaaataatatcaatggatagatgatggagatgaaggagaagaagaagaaaccgatgctcttcttcagtccatggaatcccttttcttctctcttgctcagctctcgagccaccacttcttcctccattggagctacttatcccggaggtgccaggatttggtttcttctcagatgatccagaggaatgagagtctctgttggcaggagaagtagctgctgctgctgcttcatctacgatgagacctttgcggtgatgataacgaggtaaaggaacttgaccattctcgattgctttgacatcttctaaaaggatttggtaatgtttctttacttcttctaaggctttgcttggtaccattgacgacattttgttccattgatcctctgttatctcttcctctacacaatgcaacgcaattgcgttctcgaatgctttctcttcttctctgctccatgttgccaccacactctccattcgattgcttcaatcttttcttctctgtttctctctctctctctcttctctttggtttaatcgtgtggtggacatgatagtgtttttgaaacgcatatgtgaatgggtcagattctttaccttttggagttttgtgaaacttttttttttgtttggtattaagttgaggtgcgcatgataagaatggacatttgtatatgcgcatgataagaatggacatttgtatatgcgcatgatagtatagaggacagtgcatatgcgcaggataagtaagaggttgattgggactttatcttattcacaaggatcaatcagttgggtttgttttctattgtgtcactcataaggaaagagtacgcataggataagattcttgtagttgacgattactcttcacttttctttgaaatttgatccttattcattctttagagactttggtcatttcgatttatattactcgaatacaatgcaaaagattagtgtagctttaccttttgatatttataaaacatttatttcaaaaaatttatattttttttttgaattttgttaagacaaatgcagtttgaaacaattgatcacattttaaaactttatattagtgagcatcattataattaatagagaatgtaaataatagagttttaaaatgtaaaagaatgtaaaacaataccgtcgccgagtttactgaattcagacatcgcgttttataatcagtcgtaaagataaatagcgaccaaaaattataatcgcaggtcgctatatccagcgacttccatacgaacaacatttggtcgcggtcgccaacgactaacaaacgaacatcacataaatagtataaatgcaaaattcggaaaaacaataaactaatcgagatttgaaaaagaattttatcaagatcaaaatattttctttttccaagatctacatacttgttaatagaacatgcatgaaaacaaactcgattaaagaaatttatttaacatagtatcgaatacataaaatgataaatcttcattcaacaacccatctataaatttctagagctagaaaaacgtttttttttttttttttacgtcatttctcatctctcttttaaataataggtggaaattaatagatgggttgttgaatgaagattttcttccaaataagctcgtatatataatggtcatctgatccagaatttgtctttggaaggtaatgggcctttcgcgataaggagcttgactgttaggcttccctgcgtatgtcaccccacccaagtcactaaggtacgatctttttttttttttctttttttttttgttaaagttcttaccatctttcacttcaataataagttttttttgaattgtgagatctcacaccatatatatatggacacttaaaagtctaaatgaatcggatactttactttctataagacaacaacaaaaaagtgtaaatgaatcaaaatatgtgaaaaaatcaacttaacgggtacttaattcattgaaaaattgctggctagctttttgtagacaaccttttatatttccagttgttaatatttgggcttttgttggagacgtttcttgaatattttagctactttctatgtcttgaggaatttgaactttctcaaggtgtgttatagcctttattggggctgggtaaaatattcgttcgatccgcttcgattcggtattcgatttgatttgattcaaaaaatccgaatatccgtaagattttggaccaaagcaaatatgaaaatgtagtattcgtaaaaaccgaatcaaatagcaaatattgtcttttttaaaatcgaatatccgctttgatccgtatcttttgatatatattagaatatatagttatatctatatgtagatatcataaatagtttgtgtattgttgctaccttatgtttttatgttaagatgtttgttttatcattttttttatgttgtgttttgatcaatgacatcaaaattaaactatcggattttagtttttggaattagtttgataacatttttgttgaccggtaataacaacaaaggttatatttggtatttataacttattttgaaagtatgttaaataaaaattttgaatatctgatatgcttatatagtttacatatttttttaatatttatacgtatcaaagtagatatccgcaaatatcacaaaaaaattcggatattcaaaattccggatatccggaaagtttcgaatcaaagcaaatcataaaatcaagtattcgattaaaacgaatcaaataacaaatatcacaatttttccggatatttgcttcgtgtccaggcctatccgcctttataggcccatagacagtatgtgttaaattataatccaatattgtacggatgattatactatatagttccgaatatatatcattgtgttacagctgggaatgaatcaaattaacgtaatgtacggaagaagaactatagaagctttgttttttgtgggcttcaaatttcaatatgtcaattatgagaataatcaagtaaatattgtaaatacatactctaataagaaaataaggcctaaagtttaggatatgagaatgttagagtgcaatttaagaaaatgtccggtgcaacgcgacatttgcgtgtttttcacatccatgcatgcgtactatatgtatccccgcaatcttagtcaaatatcaaatattcaaacgagagatttcatctaccgctgattcatttgcttcgcgtatatcactatatggatttgataattactagtatatatattgttactattgagattattacaaacgaacaaagaaaaaccatttttgccaacaaccaaaaaaggacaaagaaaataaaacaagtagtattctactgacatatatgcaatagatatttaactctctaatttcttaaacatcattcaattaatatttgatgaaatgaaatcttaaataatataaaccgaatatcaaagtcattaactaacaaaaagaaaggaaaaaaagaaggaatatcagagtcatcatcaagtcaactaccaccgtgcattatggcgacgatatcaaaacgtcggactactcaaactttatttagacagctcagttaattcgaatctaatttgtcctatttactaagtagcacaaaaactaattttgagcatttctcggcttatttcgaacccgtatatcgaaacaatctttattttatgtaacaaataagtatagtataaattgaagatgtaaggttaaaaaatgtgcccaacctccaataacagtaggtcataccaaatacattcaaaactttgactatttggcttttttttttaaaaatggtaccactccacctccattcttccttgaacgtaaagtaaccttttttactctcttctttccctcattttcatacctttttcacaaatccaatactcaaaccccatacatatgtgccaaatatgaaattagtacgtattactctatatcataatttgaaattttcattaaactactatgtactttattaattattcccacttatataaaactccgctcaagctgtaatttcttcgagattaacaaaaaagaaacacctttttaatcataaaatctcaaaccttttttctctaatcatttctctttatctctttcttgctctctctctctctctctctctctggctccatgacctctcttgcttcttcaccttcatcaaactcttctctagctacaaggccatgacgaaacaacctaagccgtgtagtttcctcttccacatctctctactctctgcgttgtttgttttccttctcatttcttttgcttttacgacttcttacaagcttaaatccggcattaatagtttaggccataagagaattctagcaagtaattttgattttactccgtttctcaagaataaagatcgcactcaacggcaacgtcaaagtccaagcctgactgtaaaagaaaacggtttctggtacaatgatgaggaacgggtggtacctagcggtccaaaccctttgcatcactagctaaaaggtttttgacttgtttcaatagatttttgttgcgtttttggattaatatttttgttacgacaacatacatgagcatggatatatcatgattaaatattgtgtaagtgtattaaattgacgttaccatcatattgttgatggtttcttgatttgaagggttcattaatatctattaatagctccgaattttgtatatatttatagatatagatctctccattatcctatacagtacttgttatgatgtttactgaacataaattatttttctcttatgttgagaaaaagtacattgttcatgttaataagataaggtacgtggcgctaattggttattttgaattaatctgtttggttaaatgtaggcatgtaaattagaaccaaagtttgtatatcggcccagtccactcttaaaaaataacggattcgaccttaaaaatataagtccaaaaaaaatcaggtttttcaggctaatccctttcggacttaaggatttttggggcttaatctgacgggattcgaagcggtccgaataacctttaattttttttgttaatattttcgtttaattgagagaattgcttatttttattttttgcaatagagttgaaaactctaaatctagttatgtaactgtgtcttattataaacctaagaaacaaatcttggctctactcccaagttgaagtcttctgcttttatattttatttggtatgagtttaaacaatttatttaaattatttatttgatttgaaattttttgtttaaatcaattggcttttgtatttatttagattttgattgactcattctatacaaattattttttcaagcgatattataaattataagtttttttctcgaaaaagccttaaaacctcggaaaaccttgtggtcatgttagagttggaccggactttaaactataggttcagaagttctacgggtcagacaggactatcctgattcacatgtttagttaactttagcgtattcgaataaagaaaaaacacacacacaagacattttctatataaaagctcatttttaaatatatatatatatatatattattgtgaaattgaaaattagcttattccatgaaaatttacttttctgatattacttgtcaatgttcttacttaatcacaaaagtctatatatacattaacttgcatattacaaacagaagaagaaaataagacactttatcgaattgattcaaaaatcgtatagttggttttttttttcctgaaatcgtatagttggtattgacaattaatctgcaacaaaaacaattatccccaaaaaatatggacctaatcccacttccaaatgtcaacaaaagagatggtgtttgttcactagccaatttattaaactatatatattatgaatacatgagatctatggaatccgtcatcatatatgaagttcgtttacatatatatctgtttatatcagatctagtgttagtttttactgcgaagttcagagccgaagttcctactctttgtggaccaagacagaacttaataaagaaatatctttttggagaacattgtccccaaaaaaaaagaaaaattgaactagaagtccaggttcagcctccatttagaaggacctaaaaattcaccattagggtatatataaactaaagaaaaaaagcttttggttttgataagtactgtatttgctatcggtaataactatatactaggatttcacccacggtttaccgcgagcaataggtttataaatataaattttttaatcaaacataactaaataatatttggaagtttttttgttgttatttagtgataagaggaatgtgtttaaattttttttagttgttatttacttatttttgttaaacggtttagattgaagggaattaattttattgaacggtttagattgaatcggatcatataaagtttagaagattgttaagaccaaattacccttaatgattttgaataacaaagaacaaaatctaaaattgaaatcaaaattgaagccaaattagacaaaatttcaattcgtatttcctttattaaaaggataaatttggttccaagaaaagacagtataattcacgcatttgacgtttcttttcatgtcacttcaggcttttcttaatgtgtggaacatgggctcaattgattaagatgattggccctctatgaccttttttaatataggtcaaatagagcccacaccatcaatactttttacaaaatgaatcagagattataaattaacggttgtgtaaaattacatgagatagaaataaataagtatgcaatgccatagatatgaatcatgagttctatggcattgcatacgattattaactacatcttaaacttaaaattatttgatgctatcggttcaactttttaactttttggggacaatggacttctagttcaacttttttttatgaggctgaacttggacttctagttcaacttttgctatcggttaaataatttggcacactttttaaaaatatcatatgatgcttaaattgttctttaattatatcttaaatttaaaatatcatatgatgttttcgttgttctgttaattatcggcacagcatcatttaaacaaaaaaaattgttacaaattaatggataaaacaaaatatttacttatatatgtcgtgaacatgggaccaacctgataaaccatggtgaacaatctccactttttcttctttgtaaattcatgatttcacgtttcttgtatcgtttttgtatttataaaggaaaatctaaaagtcatcttgtgtgttcatacttttttgtatcccataattgctcttcatacttttactaaaaagagttatgagtgaaagatgtccaaggatgtgttccaagttgcttcaagttttgccacacaataatgaaccttttgggatcacataaagttactaagggatataaataaatgcaatttagagcacacaaactattagaaaaaaatagttgacttgctacgatacgaccagtcaattaaccccctaaatggcctttcgtatatcaattagaaaaaaatattgtcatctacaatttgttacgtactcactatcaaatttgaatcggcgtaattacacgatgtcatcactagtagaaagtattactgttacacattccaaattctaatactaatacttggctaaaagagtttatatcaagatataatactttcttgattgaataaatatgatataaaagttacaatttccaacaaaaatacgtccaagtaaaatttgatttctaacttcaacggccaaaaacaattactactgaatcacatcagttgatttgtaattttgtatttataatttgattggcgaaatagctataaagatgattatttttcttcgtaacactcaaaattagaattgtcatgttaaatgttagtacatccatggatatagtttacaaaaaaaaaaaaaattggataaagtttacatactcgttgttgaagtatatatatatatatttttttgggtgcaaatatcaagttcaaaattaaaataccaaaatgttaaaagaatgacgaaccgataaagactgagtcaattcttcgaataatgaaatacaaaagtcaacatacgagggaccagctccagcaccgccgtattcaaagatcaagtcgctataaaaggccaatcaacgcgactcgacgacccaaataattacataataaaaaagtagtgtgtaaaattaaactacaataaagaatttctgaaaaacgttgtatattcttttccaaaaacatacattttcatcgaattcaaacagcaattagcgaaacctcaacactattattatataaatcacgagacaataaatcttgataaataatctgaaatttgtttcacgatcgatgagaaatggaaaactatatatcgttttgtcaatataaatcatgcatggccatcaggtgccgtttacgttcctcttaccaatcagcatgtatatcattgattctttttgtctggttatgtacgttaatccaatcaccaaaagaaacaaagagatcaattgctcaaaataccaaaaaccttttagtatttcttagtttgttcattgatattcaacgcatacaaatttacatatataatatgctactgatctaaagaaaaatggtaagaaattaacttaccatttatccaatcatttttttaattcctagcatcaagacccactccctttttctgtaatgagattttaaaggatctgtaatttatactttaatatttatgccaagatcgtttaagcataacccacgcatgctctttgaagtttcaaatattcaacataaatctaatgaaaacgaaactttcaaatttattaacaatattcaaaaactcattgtacacatatgacgatataacaagtatatgaaatcaacgcaaagacgaccgattccaccggtaacctaacacccttttcttaaatgtcatcaatatgtctatacttatatataacattaacacacacatttcggacactagagattacatcggttataattctagttcttgagtttgacttgttaaacccctaaaaatagtacctataagaggcttctttttcaacttctcattcttcatttccggcgaagttatggaccgatcaacgccggaacataactcatctccctcacacaagcgtctaagcgtgagctttctcgtctcaatgatggttctctgcgccaggcatgcgaatcggctctcgaagaaactaaagctgaagtcaaagaagcgaacttgcagcggcggagagggtggaggagaaagattccgatggaatatgataagctcgtcgatgagttctcctcggccaaaagagttgttcacgactttaagcaacaaggcgatgaccatggtccgccggaaaaacccgccggaggaaaaagcaaccgccatggaggaggagcatggcctttggcagagagagatattgatgggaggcaaatgtgagccgttggatttctcgggtgtgatatattacgactctaacggacggctattaaacgaagtgccaccgagatcaccacgtggcactccattacccagttacccgacccgttcttaagtcgggtcgcagttaaacttaatgggaacgaatgattattaagcaacttcattagatgattgaaacgtcgattaggcagcaaaacaaaattactatgtatataagaatgttatcgtgtactgtatgatccattttatcctaagttgtcttgttatatgttatacaccactgaaatttggataggctatttaaatttcagggtccaaagtttgaaaccatcatggtatactctagagatccaaatcgttgttgtaatctaatttcttttaggtagaaaagtcgaattaatttcctttattaaacaattattatactgacaacacctattcctgaatgttttcaaattaacgagtttaaaatgatttcaaaattatccgtgtccgtaaaacaggtgaacctctcgaggatagcttattcttcttctttttcttgttttgttttggggacaactattcagtctattcttcttcttcttttgtttgtttgttaatgagtagggctacatatatataataatagtctcgattcaattttggttttcatattacttttgacttgatcaaatttattaaattcatttgacttagtttagtttgattcggaacggttagttgttgaagaaaaacctaacagtaaacgatgttttcttaataacaaaaagaaaaaatcaggagtacataagcttatactctgtttcttttttcattagttttactgctcatgtgcagaacatatgaactatacatcaaacagatgtacataatttctttattcttccattaataaatttcacatttcatcaaaaaaaaaaaaaaaaaatcaggaggatttaatgccaaaactttttttatgccttaatttcgtgaggaagagaagagttcaaggtcacttaattacctttttttaaagggtaatttaatatttcaactataaatatgatctaaacatcatttgaacgaaaccataaaaactttcatctttttgttatggccagaaaatcgtatttctattatttaaaaaataaactaaaatgaaatatattattgtagaatttcagttaaaaacatatttagtttgcctctttaacaaaagtaaaacttaaaacaaaaggatgaaatatattatcaaagggtttcttctctgactccagtaactgaaactccggtaatctctccaatccaaactattgtatgtaatattattttcgcccaaactagtatatataatattattttcgtttcaaacatcacttgaaccaccctaccaaaaaaaaaacatcacttgaaccaacaaattctaaactttatctacaatctttaataattgagctaatgacacttgatctcataattatttttaattaataaaaaaacttaaataccaaaataaacacaaatcctctcctataattttttgttgatgttgctaaagtgacattcatacaaacagagaccacattcatatattgatgataccaagagagacaataaaaaaaaacacaggaaacaacacaattaagagggaaaaaaaccgtgtaatttctacatgagaccaaactatacggttaagggtcaacctttcatgcaccaggtgctgcatctttcagcgtaccatggaagtacccaccagcataatctttgacatgagccgccgtgtcatgaattcgactccgagcataatcaacctgatccgaccttaatggatgcatgcctttaaaatatcgatacaaccacgacacaacagcccctgtagccaagatgagtccagcgagggacaagaatccggttacgataaggaacaaagggatccaaatagggcttgagataatgatgagtgggagaaaagcaatgaatccaaggacgaaagcggtgacagtgattccggtgagtaaaaggagtattccaccggagatgaagaatgcgaggaagccgaagagttgaccggagtgattaggagactgcgattgtagtagctgacggagaagagatgagagggggtggttggtggtggtgttgctgcgagggacggtggttgagttatagatgggtctctgttgggtgtggctgctagggtttgttcgatcagccattttcggcgaggagagagagagatgtgtgtgaggtgtgagaggagaaagagtgaaacaaatggagacaggtcaaggaagtgaaggcgcatgcatgcaaacacgtggagtttcggtcttgtttttcactaaattgttcttttaaaaaacaatctaactgcttgtatctaactaataatattcaatttatttcatggcattcttttttcctgttccaaattggattttggttggcaaaagttaaaattagtaagtagatatatgtattcaataagataagagtgtgtagttcatggttataaaatttagacgaccgaattgtagctcatatagcactataatgtccttttaaccggttaaaccttgtgtggcttaattatcatttctctgttgatattttgtgtttgtttctctcttttctttctctatttaattatcctgaatccatctttcaagctatttgtgtctattcatcaaaataatttggggtcattgattgccaatttgccatatccatagccatagccattcatatatgatatccatcaaagttttagtatatcttttatcttgtttgattgcatcacatgaaaccaaagaaaaacagaatctatgtagctatcaaactttatataatttagatctacaccgaatttaaccttcagttgaagtttacgtgtgacgcagggacaaactttatatcaaaccatattcaaaacaaaacaaaccataaaagtttgtgtctatgagaaaggaaaacattactactcacaaagcatacagaaatgaattttgccactaatttgtcaaatactgaaaattattctggttatctaattgctagaacgataattttttgtcacaccagttgagcaaccatatgaacatcaaaagaattaattatttgcactacatataaccactaatcaaactgtaatatatatcaattaaagttcaggaactaaaatacatggtcagaggagccacaagatttcagctcgtatgtcaatggctgaatcccttgcaaataaggttctggtgtgtaccagactggccattttgactcatccatttttctaaatgtgattgatattctgtgaataaaaagaagactcatgaataagaaaacaatgtttatatgcaaaagaaacgaatcaagattataccttttcgtgggaacttcaggtacacaatgcttagctacatcagctccattcccgtttaacacaagcactgatctgtaaagaagttaagtttttttttttttttttttggtcacatatactgttttcaagttataacgagaatgtgacataaaacatttgcaagcgcatataaatatataagaactttttttatagcacaagaacttacccaacaggaagcggtaatgaatatgaaccacccgaatattcaccggtttcctcaactttaaggtttgatccgaagagaatattgcattcactaaggaaagaaacagtacagaacgggcggaggaagtcgtgatggtcgatatgaggaggtatgcaatcaccttcatcataaatattgactacacaacaatcaggaacacaagttggaggcagaacatgccatttaaccaaccttcttatgatcaccttgaaaagatgaggcaatggatcaacagtttcatgtttaagaatccccgccaggtttccagttttgctctacaagtttactcattcagttgttgtggcactcactagaactcataaatcgagaagaagattgatcaagaactagttttacttactgtacggtagttgaaacaacagccgaattgaatagttgaacgtcctttgccttgagcagtaaaagcacgctctacatagagagatatacaaattaggatttcagatcaaaactatatagaagaaagaacaaggaatcttagctgctacttacttagttctcctttttgaaccttttcttgcaattcacacactttatcaactatccttctctgttccgctgcattaaaaacttcggtatgcaattcgagtccctctagtatgttaacaagctctccattaactttctccaagcaaacaaagtctctttttctcttcacgtttatcgcccgaatatgcgttctttgcttcctcgacagtttatgattctcaagactcgaaccaaaagcctctctacttgaatctttatgatcctcttcctcactgagctcatcctccaatgtcatatgagaaaaatctacagcaacttctgttaaagatcctaatattaatatcagcgtctttcgaattacttggcgaatgaccatcatagacaatgcacatatataatcatcaaatcattttgttactggttttattttgagtctataataaccaccattgaatatgaatcaatttacttaatcctttataccagcttgattagtgctactactagctactatgccatgattcgtcataagaaactcaaatcaaacgatggataatctaaatcccaatacaaaaagcagatagttgaatcccacaatattataactggtccttttagagttctatttttccatgaagaaaatagtgtgataagagaaattataaagaaaatctctctttacactacaaattccaagttaccattaaaaaaaatattctgctgaaccaacggttaaatccttaccttgttcttgagagcggattcgtttggagagaaggttgacttttgaagcgatctcgagttccgactgccggataaaagaatagttgtccattgcacaatatatcaaacctcatgtacgatacattaatccgtcttctaccgtttgttttggcgcttatgatcaacgaatgtaatcttgacttttgttaggtcgttgaagtcatcatatatttcgtgtcttacaagcaaattgaagttttctacatagactatagttttgtgtgaataaatttatcacttatcatttgaccgagtaattcatccaagactgagttttgcaggaatttataattgatagagagactctgtttcatcctgttttaactcaagtaattgcctttttctaaaaaaaatggttgtaaagttaacaaaaatccacgtctcagattaaaataacgttttataaaccacatgtaccttgcataatatgttgtctgcttgaatttgtctttgccagtagttgaacataatgaataacaaaaagttgaaacagtcgatgttagtatgttacatatactggaattagaattcaaaacagctgattattgcaaaatgagtagataaatataggtgcttcaaaattaatagaaaacaacgagttcgaaagtaaattcttggcatgatatgtaaatgattgtgaagtgatcctttttgtgattgtgctgatgtattgtagtgtgaattgtgtctttgaatttgcgtttagatgtgtgtttgtgtgtgtgttatttttttttttatgtatgaattacgtttgagcgtgcttagtttgtcttgtgttttgtacttttacgaccttctgttccctattttgtttttgaaaatattgttgtgacaagtgtattttgtgtatttgaattggcatttagatgtgtgtgtgtttgagtatgttgtgtttttcttgcgttttatgaaaccttttttttttttttttcaaaatcgcttttaatagtactaaagaaaatttgttcagacattaatattcttattttttttataataaagtttacataaaacttaaatgatcgatttgcatttctttgggttaaatactttttgtcacgttataaaaatcttattttatctcataataatgattacttgaaaacaaggtttaggccatttagcaaatctccccaccgttttggtcaatcctttgaatctctcctaataaaaccctaaaagatcatcatcatcatcgtcgtcgtcgtcccgctcaatggatactcgtcgcggagctcttgcggttcctaaagtccgtcgagtaggtttcttcacatcaatcgagccgcctccagaatcatcattacaacgaccaaatcgaagccaatccggtccagtagatgcaaccacctcttcttctcctctctccgattcaccttccggtaacttaatttctccggtcttaattccaccgtcgcgtcaccattccgacaatttaacctctcgcgttgctgctgctgctgctgctcctgtgcccgtccctggacctgccgctttccgccgatacttaactcctgaacggactcttcttcacgttggtagttacaatcctccggattcgcttctcgggacatcatcaccctcgagtaacggagggctttctgaggattcggcttctctgtttgggttccaacggagtgattcgacgaaattatcagcaagcttacctaatggaggctttgatttgactctagctgttagagctcctcaggaatctgaaaccaaaattgcgaccacgtctgcttctcaagggaaaaagaagatcgccgaagtttctggtatgtatacgaatctatcaatctatttaagtgtctcttgaataagctctttgtatggttgagttttgtattatccaaaagagacctttgtggtgaattgtgatccccaagtaacatcggatgaggcagcctgtagtgccgtagggactgggtaggcccggatattaatatcttctttggaatactctgttacttgatctcatggagagttttagggagaccttatagcggtatttggagaatgtttaaagttgagtttggtttagaagtctggtgagcaatttctgccaatgttgatagttcgactcttgactttgaaacaaagaggcgtgttttgaagataaagcagtcagctgttgtggacctgtggtctgtgtgaaatgcatacgtttgcggaggtggtacaacatactcccaaatcaagcacgtcaaggaagctgcatctctataatgggtaggagcagttagccagttactgtttcagaggtgtttaaatgtgaaggatgaaattgactagagcttcccacccaacaacgtgtcatcattgacacttcaatctctctgagcattatgtttcttagtttcatagtacatcaaccttcgtattcttcatgttaactcatttctacaaaaggacaattcgcagacagaccgacaacaggacatcgttatcttcaaagcataactctgttctttgcttcgtcacaagctatacctttttctcaaagttagtttttaggcaagtcttcaacattgaacgaaatgcatcatcaagttttgcttccgtactggactgcctacaaaatcctcctaaactgttgttgccatcatcgtcgaggctgggaattggtcatctatctctgttttaaactggattgcctgccttggtcttctctaacaacgaaattgccttcactgcattgccggagattggttgttagactcctgaagtaccctccttgatcagaggctttgggcttctctggaggggttattaagctccctttcaaagtggactatcctttagaattagaatttaaatagctactttgtgtttagtatcaactttgaccttatgaattgctatgggtttgagtcattcaattattgccatgcacagatgtttccttctagttttgcatttcgttacttacaggaagaataaatcctgcaggaaagagtgagtctgcgaccacaaaaccccagaaggaaaaggaaccaaaagcattgaaagataaaaccactaaagcagaaagacgtgccatccaagaggcacaacgggcagcaaaagctgctgcaaaaggttcttgttttgttcattatttttgctttgttttccatattcattaaagtggaacgtaaaatcatctaagtgcttccctcttgctaatttttaggcgaaggaagcaggcgtgcagatgagtctggtagagctaatcctggcaaggctgccataaagccccaaccaaagaaagaaagacttcccgtcacgtcctctgtttctgaaaaaacagctgtagcagtagaaaaagagaagaggatggatgtccctcagacacaaatgcagtatgatgataaaagccgagtggataaagctaagaggcgagctgtggttgaacagaccgagagcaagaacaaagttgaattatttctccatcttcctcaatacgaacgcagcaatcagcttcccaatttaagctccaattttttcacactcgattccatacaccatgcagtctataaggtacacctacttgtttatatgtgactgtgaaatgttcgttacacttttgaactggaatccttaagggtttgaaaccctgtggtttatctctgtgccatagatcctcaagtgacgtatatacatgtttttgttaatcttaggtgggtttgcaacatttggctggagatatatctggggacaatgcacgatgtattgccatgctccaagcatttcaagaagctatagaagattacagtacacctcctatgaaagacctgaccatggacttgacagccaagataaacggttatgtttcattcttgatagaatgtcgtcccctctccatgagcatgggaaacgcaatcaggttcctgaagaaccaaatcagaaaactacctgtaaacctgtcagaatcagaggcaaaaagttccctctgttctgacattggccggttcatagacgagaagacaattattgcagataaggcaatcgtgcaacacgccgtaacaaaaatcagagacggagaagttcttcttacatatggattctcttgtgtggttgaaatgattctcctatacgcccatgagattgggaaaaagttccgcgtagtgattgtagactcacgccctaaccttgaagggcaaaagctactccgtagacttgtgactcgtggcctcgactgtacctacactcatataaatgccatttcctacatcatgcgtgaggctacacgtgtttttctcggtgcttcatcaatatactcgaatggaactctttacgcaagagttggcacatcctgcattgcaatggttgcaaacgcatttagtgttcctgtaattgtttgttgtgaagcttacaagttccatgaaagagtcctacttgattcaatctgctccaacgaacttggtaaatgtttcactcgctcttcttcttgtcgattattcatttacttgaatcagagtttttttgcctgtgtgaaaaatttacaggcgatcctgacgccgtagccaacataccatcatttagaaccaatgcaaagcattcaaagacaatggacaacaacaaaaaccttcagtttctgaatctaatgtaaagcgcttcataagtggttttgagaatcatcacaaagctttattcttatttctcttaagtttgttcttatttttgtgtgttccaggtatgattctactccttcagaatatatatctatgattgtttcggattatggaatggtacgtatctctcacacattttgttatgttatgagtttggtatgcagagcaatttccatttagtgtctgatacatttgtgatttgtgtatgtgtgaatagattcctccgacgagtataccagtgattgtacgtgaatacaggagagaaaacttgttgctataaaaaggtaatgtgtttagaatattagcatacaaaatacaacagatacagtttacggaggagagaaaagcaagtatttaacataaacaatcattctttatatattttctaatgatgaattttgcattttgacactcatggaaaaattgttttcatttataccttgatcgctcgaaccaaatttttggacgagggtttgaaaaactgttcattgtttaagaataatgtgattggaatgactttctttttagtatcgagtaaaatttgtttatttgaaggtaaagttttggtgggtttgtctcaaaagcaaatatcgtagactatgaaccgacaccgtattggtctttggatctcctccggggccttgttctccatagtatggcatgaggactcggacataatctgtatggcactttagttggtgtcggaatctcaggaaccctgtttcaatcaaagtttcattttttttaatcagcactatgaaatgtttctatccaaaatatcaaactaaaaaaaaaaaactatttcaccaaatcacgtagttttaattaaaaatagacttgataacaaaagaggttaggaatcttactgtaatccagaaatttcaatttgtgaaaagtcaaaattagttaaacaatctgaagtcgctgtcgccgtcgccttagaggtcttgtgtcccttaaccttcaccggaggcgaaagttccggtgaaggctgctttatagccatcactttgcaattgaaatttctcgctacatcgatcccacttattgcccatctacacatcacaaagacacacaaagtcacaaacattactcattcgtctatgtagggttcaaaatctttaataatgaccccgtatcgatcaaaatagttcctacctgtaaagaaagctgttctgatggagaccaacgagaagcatcgaagcaccaatctctttgacaacttgagcaatcattcttccatcatcatctccttctctcacaatgatctcagtattcgtctgtcaaaattacgatcacaaaggaaaaacaaacctaaccatcaataaaatctagtaatctttccgatcaagattcatttccactcacgttgaagaaagagtcgcagatttcacggaaagagagagcaagattgtatccgtgacggcggaggagacgcgccgccgtggatttcttcttacgcggtggaggagagtacacgtggaggagtactatgacgtcaccttgacggaggaggttgtgaagtgcccattgtaacgccgtcctcgccgcttgtttatcttctacgaccaccacaatcctccgtacatcttccatttatttattctctctttctctttctttttctcgagaattgggtttaggtttagtgtcgtaattcttgtgactcactctctctctctctctcaatatgtgttgtatttgtaaataatagtataaaatggaatttctttgtagttggaaataaattaaaagtgggtcaaatgtgaagttgagtatgaaatcatggaccgtgtttttttgttattaggataaagtggtgaatatgtatgtattgcattgcatcttacactgttaggcaataacttgattttagtcttttaccatttatatttgaacatgggtttcttactatcaccttaggaatcattgttctgattaataatttgctttatgaaatagtacttgaaaaggtcattatgacggttttttaagaaaaatattgtcattgcaattgcaagtttttttagttcatgttagtattacactattaataatggaaaccataatcagtagatagagatacattaaatgcaatttgaaaaaccgaacatgaatattattggtcgtgttggtgctaaacccgcgtctattaaagtatgattcattacaatcacatctagtcatctagaaaacaatcaaaatcgttaataaattgacactttttattattagataggtgtaattggtacggtagatgaagaaaaaatcttaataacaattaagcactgtgtgagaacagtttctacttgcgcgagcaattaccatgtttggtaggacacaaattttcaacacgaattagaatgtgtcaatttaggaaaagaaaaaaaaacgaatgtaagatgtaaactattattaacaaagatttcatggagatataaagaatttaaacaaaatcaaggggtcaaaacctaaacatacagaagttttaaaagtctaataatatgacaacgcgctaagatccgaacacgtgtcaagtgaaagacttggtaaactcgaaaaggtaacgcacgaaagagggcctacaaaagtccgagtcatcagctgacagaagcatatgacttccacatatatttgacacagaatgtagtaataaagtacgaatctcacttcttgtcgtaattttcgtgtttaaggttattttacgtgagattcacgctcttcatgaacttgataagctataaaaaaagttaccaaatcctaaatcatgaaaaattttaagaaccacgaatatgttaacacaatccataaacttgacttgagccatgaatcttgtgggatacgggctttgccctccatgcccaattcggcccaaacacaaatagaacaagtcaagaaagctcctaacaaggaagaacggccatcagaacaacggcccatcagaatgactgctcggcccatcacggcttggtccaacccgataaattcagaagggcaaaacagagaaatcgcaagagagactaagagaaccctagatcagctccttgcctataaataagaggagacactactaagaagagagatccagaacctatcaccactcagagaatttaagagagaattgctgtctagctctttatctcttactttctggttttccattctgtattttctggttttccgaccattaatatcggttttccgacctgtactttcggttttccgttctgtacttacggttttccgttctgttaattactgtctttccgttcgtcattaataaagaagttactccattctccccaaaccccttaatcattattgttacaacctcggtataaacaaatccggagatggtccacataattatttttatataaatactaaatagtaaagtattcatgcaattgcgattttttttttttaataaaaagtatttttaaggaaataaaatgaagatagtgggacatgacgagaggaattggttgtatctatgagatctacttgtgcttgtcttcttcatccgtattcaggaaaaatccgcacacttgagtttctagttggaagaataaaaactatacattatctttttgcaaatatacaagtaacaaatattcataaagatatataatgccaaaaaaaaacgaaagtgattgaataaacgtcaatcatcctacattatgagatggatggatttgttttaggcaatgtaatgtgttcctgccaccaaattttgtttacgagaccgatctgatcaccaagcaaagtcgagtattgttaatgtttcaaagactttgatatagttcggtacaaactcatgtgtaaacatatgattttaatctctagccatgtcaaataggtgaatgattttaagctctagcaatgtcaaatacgtcaacaacaacatagattacttttctgagggatcaacaaataacgcataacacatgattatcacagtttttcaagttccaaaatttcgatacagtgtagaccaagagggttcaagtttttttcagggacaaaatcgtctggtgtctcagcttgaagatcctccgttcagctttcgttttttcggggatggcgacttaaataggtttcgaacagatgttaacggatcatctacctgacaacatcacgtaaagaaccatcaaagacatcagaaattggacatttatgacataagaactcatataaatgtatgtggttcttgttcgttaggatttgatcatttatctcatgctcagagagtatccaaagatatcaaatcaaggaaacgtcatgcataattttaacagggacaagggcataagttgcactctcagccaaaaaaagtttaaatactattagtcatagatcctgctattactggctacaaaaggaagttactatgatcttcttgtcgagaatacatgacaatagtcgcagttgagttatatctacccatctgtaattagctttaattccattctaatactaaaagcgagtgtaaggatgcatgaaaaagagtgtagtgggatgtttaccttgaagagggaagaggatgatggtggagtctgacaagatcctttatgccgttgtaatgcagacagagtctgtcgccatccagggcctcttctacccgttgaccagatccaaggacagaaatgcctatgttgcttgattggatcaaattccatctgtttgtttgatgtcgctgatttttctttataatcacaaagaaagatatgttaagcatagttagtgcttgtaaaaatcagagaaatttgtatttgcatttatactcttagcaatttacctgcagttgaatccctaggtttgttgttttcaggaagatttgatcttactaccatcatttgtttgtctttgttttgtagtgcaatatcactctctacatcagttgagtttcttccaccatcagccttctctcctatatcattcatcacttgattgctattttgtgtaacatcaccgttgttctctgcagttctactctgttgatcctgaatagaactgacatccccgtgatcatgatctctagagtacgaagcaaatcttgacctcaggttcctcccgataataggcagcgatattgttgctttgaagttttgctttgttgctgggggtcctcctgctatggtaaacttcaagcttgaaggttgatgttgaagggtaccacccttgggatgtttctctatattgatttcggtatcaccagtgactctacacaattctagtggtctcggaacagttgagaaaacccatagaccaacacaggccccacagagcttgcagtccagtacaacagaactaggatcagagtttaatgtgtcaggaagtgttgggttctcattattccctgatatgccatttggaattggggttgattcagagatgcttagaagctcgcgggtagcagtttctggcagtaaatcaatagtctctgtacccctagccgtctcactcaatttatctttgcagtccacaatataaggaagtgcccgcggttcccagccacataaactgataagtttttgtgcctggaaataccaatgcatcagcattacaatcagatatgactcaatattataccaaaaacctctcagaaaagatgccatagtcactaaagtgatcactagttaactgtacgctagtattttatcatatggacaacatcgaatgaataaagacgaataatttggacggaccaaattaaagtctgtagatagaggaacaataaaagaaggatcatccaattctaccaaaatctacgttagttaggaataattcatatctctagttgcaggtcaaacctggtagaaaagttgagccgggctcgctccaacatgattggtaagggattcagtttgagaactttctgctgctgtgtcactacatgcaggtgcaataggtcgtttgagaaattcctccagatctgagctcctcatgtactcaatggctgatggtgaaataacaggaagggccaaaagttgaagtaaagcttctgaccgttcttcgtgtctatcgactaaatcctgcggtgccattaacggaaactcagaaagcgtttcttcacatgaattctctatccatggacaaagtaatttgtgtccactctctaactttaagctgaagactgatgccgctttttccactgtcagatatcaaagagaagatatccaattttagtgaggacacaccatataactgtttatcagagtatcagttacatagagatgattctacgaaaaataaaattttaaccataccttgttgcttagaccaagaagatggggctgaaaagtaaagatgagctccacaagattcacaagctatagaatctgcgtcatcattcacccaccctctcctcgcacaatttacagcactaataacctaccagcacacacacaaaaaatagaatgagctaagaattttatagctaggaacatacaacaacgagatagaaatgacttaaattctaacggaaggaaaattgtggtttaaaggtcacaagaagcaaacctgtggcttggcaaaccaagtcatggacttgaaagtagcaagcctcctcataagatctcctctatcccacggcctgcaaagaccagaaggcgatgttccagcaggaaccttcaaagctgaagacctatcaatggtagctaatacaatctttggctcaaccaatgctaacgcagatgaaggattttgacgcttcttgcctcttgattgttgctctacagaagaactacacaaaccaaaggatatatacataagctgacgcagaatcataacatgaacacaagctctgatgcaaatatcacaaaatcaactaacatctgaaatcaatccaaagagcaatgtatatgaacacaaatacaaaatcatctctgagattaagcaatttatccacacttcaatcagcgaaacaatggaactcagataatggagatgaatcgatgcacagtgtaaaacagtaaccagcaagaagagactgacctggtggaggaagaaggaagctgagatttcgatggggtaaagagtttatccatgatttggtggaatctcttctctgaatcttgtgccattgtttatcttccagaaaaatcgcagcttcctctagctcgtctttctgatttcgtcctcctataatcgtataaaccctaatctaatagattcgcttccaccttcttcgccgcggctcaggtgaaggagtggtgtttagatggcggtgacggaacaacacgaaaacgacgggatctgctgtcgtttagtcctcttcatatttattccgcaaatcggaagtctcgaatattttatctattttacgaatagatccctttattctcacttcatcccatgtatcacccaaacatttcaaatatgtaaaaagaatccaaaaacacaaaaaaaaatcatcaaattatttaacgctttatgatattagtcaaaattaatacgaaaaatactcacaaaaacagattttcctcaactagtcgtatttctttgaaaacaaaaattcaaatttcaaagtagcaaataataagtcaaaacaatatctattagatatccctcaagttgtggacaagcaaagccaaactagtaacaaacctagctgcactctcacactacttaaattcaaaccttaagcaccacaaagcagaaaaactaaacattttcttcgagaacaatccctcgatatcagaaattaaacaaaagaggattcaaatgggtggacaaaagattgttctgctttcgatcttcgtatgtttttacgtgttttcacttgtgtcatgtactgaatttgaagctggaggagaaaatggttggatcattccacaatctagtaaccaaagtgacatctttaaccaatgggcttccaagaaccggtttaaagttggcgacactatccgtaagtttttcttttgcttctattatgaatttatgatcatcgtaatgcatatattgagttttgttttgatttggtggaaaggtttcaagtacaagaaagactctgttttggtggtaacagaagacgaatacaagaaatgtcagacgaccaaaccggaactttactccaaccacgatgatacggttttcaaattggaccgtcccggtttgttttatttcattagtggtgtctcaggccactgtgaacaaggtcagaaaatgattattaaagtcatggaggtggaatctacgccgcaatctcctccaccttcctcgtctctacccgcttcagctcacaagaaaaaccacgccgtgaggaaaacgagtcggttcttaggtgccggtttagttacaatttcgattctggttattacggtttttagtcttgtgtagtatggaaaacaataccactcggttatggcggttcagccgtcgagttttattccggtttaggttttgttgcttagtttatttaaggtttttttattcatttgataggttgatttgattttggtttttggtcacttcagagctttaaaataattgaactcatgtcttattttataagtttagtatccattttaattctattaaattctaggtttattgaaatacaatgttttttacctttatctaattataaacaaacaactttcaattttctataacaaaacaaaatcaaatattttgacaaattttctaaatatacactttttagaaacatctaatattttttttagaaattcaataaccctactcaaagaatcaaatccaataatggaacacgaaattattttgttatataaatttttataacaaattatgaaatttataactcattcaaccgagattgggtcaaccctataaccttataaaatttccaattagcattttgctctagctataaaaacattgtcaaaacatgatcaagtgatgcatcaaaatacatagtttgtagtccggtctaatcgcccgaacctagtttacctatacatggactttctgttaaaataaaccgacaaaagaaaactataagttatggtcttatggacatatcagaacacaaatcaatcgagcgacaaatgaattttttttgcaagaagtggataccacgaatggattacttgtccgttcacaccttatcaaaaatcaaccaaatattattctttgtaccatttttaaaattttaaaacaagatacattcatctgtttctatcaaatgcattagtcaataacgcttccatccaacggcgaataagaggtatacacgtggtgaggcatagttgattcagcttttatacacaaaagtctcgaggaacaacgtgagaagctctaacaaaacgtgaaggccacaactattatcaaaggcacataaaacacacgaacacaaaaaaagacaaagacaatgattattcagacaagtttcgtacctatttgattctctacattcctctctctcacacaccaaactcacatacacaatctctctctctttctcaacatgtctatataaatacacccacgtctatactaactcacatcatagattcacaattttgaacaaagaaaatttctttggagagaaaacttagaacttagattgacatagagaaatgaggaagtttggtggatcattgttcggcgtaagcctattgctgtccgttcttctagcggcagcaaccgcggcagcggagtactataactacggaagtgctcttgataagaccttcttgttctttgaggctcaacgatcagggaagttgccagctgctcaacgtgtcaaatggcgtggcccttctggtctcaaggatggtcttgctcaaggagtaagtccatatacacacaatgcttgcagtatagttggttaatacaatggatctcttaatacattccaaaattgatacttcctgataaataccatcgtatgaattgcaaaactagtaccaaaattaccacttcttcaactagaacatgttggctagtgtggtttgtattggttctgttcttgtatcaccatctataggttcaaacagaaaacttgttgtttggaaaaaataacacttactggcatacaatatttttttaaaaccttaaatctacaaggtattgttgtcacttgtcatcagtacaaagatttaatttgtatgaaaccttgacgtactaattccaataaagaaaatatatgaagtaataaaatgatattgaggtttgtgtatgtatgaatgaataggtgagcctggagggaggatattatgatgctggagaccatgtgaaattcggtttaccaatggctttcgcagtgacgatgctatcgtgggcagcggttgataaccggaaagagctatccagttcgaaccagatgcaacagacattatggtcaatcagatggggtactgattacttcatcaaggctcatcctcaaccaaatgttctatggggtcaagttggagatggagaatcagaccattactgttgggaacgtcccgaggacatgaccacttcaagaacagcttataagcttgacccgtaccaccctggctcggacctagccggtgaaaccgctgctgctttagccgctgcttccttggctttcaagccatttaactcctcttactctgctcttctcttatctcatgccaaagaggttcgtttgttttttgttcaactcctcttactttggtttatgaatccggttcggtttagattctcaacatttttgaaactttgtttttgtatattttagctcttctcatttgctgacaagtacagaggactatacacaaattctatcccaaatgcaaaagctttctacatgtcatctggttactcggtatatatattctctcaacactttcattctctaatccttccattgaatcttgttccactactaaaatgtctctcttgtgtatttctttgaaggatgagcttctttgggctgcagcttggctacaccgcgccaccggggatcagtattacttgaagtatgctatggacaattccggttacatgggaggaactggctggggggtgaaagagttctcttgggataacaaatacgccggtgttcaaatccttctctccaaggtaaactatagttttgttaaagaatgttcttcacggtttcaaaaatactactaatcatggtacttgtttgatttgtgtgtgtatagatcttgttagaagggaaaggcggtatatatacttcgacattgaagcaatatcaaaccaaagctgactacttcgcttgtgcttgcctcaagaagaatggtggctacaacattcaaacaactcctggtggtttaatgtatgttagagagtggaacaatctgcaatatgcatccgcggctgcgtatcttctcgcggtttattcagattatctctctgcagcaaatgctaaactcaactgccctgatggtttggtgcaacctcaggggcttcttgactttgctagatctcaggtaatgatcaaatcctcccaagaaaccgaaaatttttctcgttcttttcaatccggtaaccgaggttttcctttgcaggctgattacattcttggaaagaaccgtcaaggaatgagttatgtagttggatatggaccgaaatatccaatccgtgttcatcatagaggctcttcaatcccttcaatatttgctcaacgttcttctgtgagttgtgtacaaggatttgactcttggtatagaaggtctcagggtgatcctaatgttatttatggagctcttgttggtggacctgacgagaatgataactattccgatgaccgctcaaattacgagcaatcagaaccaacattgtcaggaacagctccacttgttggcctattcgctaaactctatggaggaagtttaggtaactaaacaataaaccttgagctcaaagtctttagctttacccttatggaatcataaagtaatgtaatgaacattttgtaggatcttatggaggaggatcatataaaccttatgaaactacaaaaccagcaggtttgatcttttttacttgcagcttccaatgcaactttttctacagtgtctgattctcatttcctctaaaactgtcacagcttcatcttacaaagcaacaccaacaacatacagtccaaagcaatcaggtgcacaaatcgagtttcttcattccataactagcaactggatagccgggaacacaagatactataggcacaaagtgatcatcaaaaacaattctcaaaaaccaatatcagatctcaagcttaagattgaagatctctcaggacctatctggggtttaaacccaacgggacagaagtatacttaccagcttcctcaatggcaaaagactttgagagcaggacaagcttatgattttgtctatgtacaaggtggccctcaagctaaagtctcagttttgagttacaactagtgagaaaacaacactttcttcaatctttttgtttatgcttattatgagtgaaagatgtgaacatagccaaccaagttgagcctaaatatgagaaatgtaaatttgtgacccttggtagagaatgcttttttgtctacctattcatatggcccatacttaggtaaaataagtaatgatagacgaagataacaatgattgaacacccaaagcactcaaaattgagcttaacttaacattcagacaaaaatttaaggttctgacagaaacttaactagaacaaaaaagaaacgaaacaataaaaggatgcgaagtatcataagttaacaacataagaagagacttttcttctacagacgcttctactcgtcaccgaaggtagtcttcttacctgcaacatatattgcaaagccaacataaacccaagaattagtgacatgttaacttgttataaagaagctagaaaacatgaatcaagaacaatttatctaaccttggggagtaaaactaggtcttccacgaccacgatcacttcccctgccaccaccactaccaaaacgaccacgacctccatctcttcctctgccaccaccactaccaaaacgaccacgacctccatctcttcctctgccaccaccactaccgaaacgaccattgccccttccaaatccaccaccaccactgctatctcctctcggtctaggctcatcgactacaagatagaatcctcctcccatatcacttccatttagttccaacgccttctctttgccttctgaaaactcaaggtaagcaattctgaggagaaaaaaaacattaatttagttagcacttaactttcaatagagaaaattcacaaactaatgacaactaagagagagtaataatcactaaccctttggagttaccagtgtcacggtcaattggaacagatacatttttgatctctccacatgaactgaaatgttccctcaaagtgttcttgatatcatcctcagaaagtgaagcgtcaaatcccttaacgaaaattttcttttcatcaccaccatcaccaccacttctgaagttgctgcaataatttaaataagagaatattatcaacatatggaactattttacaagaaacaaaaactccaaatcatggaagactaacatacccgctttgtggagtgaatgcgggtctctcgcctctctcacctctctcctgagcaatatcaagacgaatctcacgaccgagcaatggcctaccatggaattc

SEQ ID NO: 26 - DNA, 104679 bp, Arabidopsis thaliana
gaattccttagattctcttctggtcgagatccacggttaatcaacgacttcgaatgcgtcggtaatttaaatctctattgtttttttttaattcttgtgaaaattgtgtgatggttctgaaaaaaaattgaaattttgcagattctaagtttgatgttttccctggattttggacgatgggattcggtagggacaacgttaatgggagctataaaatagtgagaatgttgtttgatcgtcatttcgagaaccgctattgccagattctagatgttaatattggggaatggcgaaaacaaagacagcctccttactttgtgggatatagagagaagtccgcttgtgtgaatgggtccatctactggtcacaagcactcattcgttgcaaattactagcttttgatctttactcggaagaatttcgtgatgtcccaacaccgcctcgatccgaaatatgcgaaaggtcatgccaaatagtgaatcttgaagaccgtctagtcttagccgtaacctatactacgagtcttcattggaatgttaagatatggagcatggatgcacacgatggaacacggagcattacttactccatacgtttattctctaaagatatgaactctagtattatgaaccatttccaattgtggttttggactaggccactggcggtttctaagcgagggaatcttttcttccatgataatgagaagaggttatagaaatattatacaaagactgacgaggttcgtatcctcgagagagacatatgtgttatttctccttttattgagaatttgctcccacttcgacgtccagattctgttaccaagataaggacatacggatttcagtttcttgatcacgcgccgagatcccggatatccaattttctaaaacgactcgaaaaccaaaataatttgcttaccaccgctgctgctgctgtggctcttgcgactcttgtatattttatacattaggatttcggtatctagatctcacttggcgagctagttcttgatattactagtttattgggacaatacttcaaaatttattgttcgtttacggattgaccaagtaaaaatattgctttgcttgttgtgtataactgtgtagctgtaggttggtgcaaaacttggagtgatgttatgaatatcaaaggtaatccttatcttaatcaaccgttgtgctccgctttgtagtggaacatactaggaagagtagtagaatagtaatcgacaaatcaggagaggttctgatcatttggagcacaagaacatcttcaaagagaagtgtttgttttacatcttcaagatgaatctggtcaagagagtagtttctcttgaaaatgagatgttgatatatgatcatgggactcacattgagagcatttgctgatggtagtgaaagaatcaagagtgactatctgtttggtggaagatgatatttggccaagttatgagaatactaatccacagaggagaggttctggtcattccgagtagattctcttggtgatatttggccaatggactcacagtaatagtatgaagaaataaaagatcacataaatccactaaacttggttatcaattatcactcagtttataaaacaaactcactgaaatcaagaccacaattcaagcttcaaaagctcataattaaatttctcttgcatggtaatgctcatagttttttttttccgttttaattcctctggattaataagctggtttctgcataggagcttgggtacttgtcgataataagggtcaccttcaagctcgatatgttccaccattttataatcgttttgcaacagaattacaatgtctcttacggtaattggttactgatgttgagtcctcgtacccatttttccgtcttaaacgtgtttattggcgagaaaatcaatcttctatctctatcactccaaagaggtaaagtgagattccgaagaatagacgatggcggagtctaccacgaacactctcctaaggatcgtgagacaatcatcaacatgtttatcaaggcggctgttttatggattgatgagataacgaaagattttgtggtttgttggatataccaccgatcagtacttgttctcttacaagaaaggagatgattcttgatggcatcttgaagacataaagtgtttagctatggcttacaaaagaaaaaagctttgtgtttatacatggtttcattacatcaagattcttgatatattatttctctgatgatttcccgaatgagatcatctaagaaaacccgtatctgaatcatatagaacatttaactttaaaactattaaatgtaatttatcaacataaaatctaataaaagtgatgaaaaaaaaatatatatataataaaagaaaatgtaaaaaaaaatttgatttgtagaatagaattgttgaatactaagaaaacaaatctttggaatagggaaaatatctaatcatcattaattgtgttacatgaatgttcatagatttcgcataatctaaagaatttttatcttaattgttaaaaaaagaagaagattctttcttaatttattcaaccatattattatacaagtccaataagaaattacattttcttcattttaccattttattatataagtttctagtcaaagtcaatttctaaaatatttcattatgccaatttatttaaaaaaggaaagaaaatattttgttttctataatatcaaaatttaaaccactaagagctttatcataaaatagaatatagtaaaataaaggggtaaaaatctgaaaacatctattagtgaaaaatatacttttaaatatattttattttcctttttctgaactttgaatctatcatataagaaaatggaataactctcaaatttcaccatcacttcaacttttgcattctggtcatcttcaattcatttctccaaatccatacaattagtttatttactctcaaacccattattcaaatctttaatctctaccgactttgtgctttagacctcttttggtgatgtcaacatttggatatggatagatttttttgatatgagtcagttgagtatcttcaaatcaactgattcataccaaaaaaaatctgaccatgtccaaaatttgatatcgcaaaaagaaagtccaatcctgttagctagaatatttgatatcgagcgtgtggcaatataaattccaaacaatatgtaatttgtagttatctcagcgtttattttctcttcacataatccagttattgaaatatatgccctattatatgtggtaatagttagctggcagtgtaaatagatttggaccatttcgaaatctgctctaatctcttaagaaaagggttttagacttttaggttaaatcaaattagttcctctcacattggtacgccaaaagctgtctgatcatctcgagtgtgttttaaatttaatatagcttttgacccgaatttcttttcgccaaaacaaattaaacgacagctaaccttttctcgtgctgcatgaattaactaattatcttagcctttatttgatcccattttattatatttgagttataaattacaagataaacatgcatgcacaaacgtcgtcgtcttgtttccagtttccatcttatcacataaaaactcacaaaaaaaaccccaatattaaaacaaaagagaccctggaaactgatccgacagtggcagtaattgttagggattttgggaataattcatattttatttgagaatatttatttttatgtttttgtgagaaaatataaataactaaaataagaggcacaacaaaagaaggatgagctgggaagcacgtgtgaaggagagagaagcacgtgcaacaaagacagtgcagggttgaccggagaccgtagggtcgcgagaagtgggagacgcactgtcccctacacacgccttctgcgacaccgttttgcctttaataaaatgaaacctaaaaatattttgttttgattttagattattatttgaaatgaatgaataagtccaacagctagaagagtcatgccaaataataaaaattaatatattaaaatacaaaacaactcgtatcataaatactagtatgtgatttagagtcgactaaaaaagatagagcaaaatcaattacataataaaagaaaatgtgtatattaataatggaccaacctcttttgtaattgtttaacacttggaccaagctggacccaatcttaaacactcatgtcctcactgttcattaagattctctgaccttttgactcatccaattttttttggctgtaataagtcttcattttatattggcgaggtccgccattaatttaaaatcgtatttgtgatggttgggtatataattgagtacataaatttgtaaatcaaataaaaaaattaacttggtatacaaaacctagacatatggtcgtgggagttcgactaatcttagtgcttctcctccccaattattcgtttggtgtatagtgtgtagtttttcgtgaattgattggtcaattgacgtttgattgtattgtaaacagatttgcttattatttttctttgaataaccaattctttggttgtaagttatagccatcaccggttaatgaattttaacagaaaatgttatggaaatagtcaccattattgatttaatgcaaccaataacataattttaaaatattgtctcttatttttctacgggaagatgggtggacaaaggcaagagacaataatcacaaacttctttattgttcccataaggtcaagccaatgacaggcggattttgttcttctcgtcttctctccttctctcaatttaattaggtaaatcaatactattcaaaacaaaaggaaaataaaaagaacaaaacaaaagaaatagaaagaaaacagacaataatacggtccaagtccatggatcttatccctgctcccgaatttatatgattttgatataattgtcttagaatatttgtcttcattcgatgatttatttatctcaaataattctgtaaattcttgtactttcccgacattacatttgtaaattctagcatcaaatttaaactccaacaaagttacagtctggattctttttcttttcgtttaaattatttaccatgcacattgtaccaaccaatcataattgttccaatgagacatatatctatctttataatccatgcaagtctttgattagcttctaattaattagttgttattaggctattggttattttaccatgatgcaatggcaagttttatttcaatcgagaaaaagatgttatgtgatgtcaatatagtcaaagtcgagacaaagttaactttgaagatttgatcataattagcaactaaacaataaacattgacctattcgaggattgaccgttaaaaaaggtgaaaacaggataaaaaaaagagtaatttctatcagcgacgtaaatttgaaaacagtcaaaagttattctataaaagacaaaacagtcaaactattttaattggtcttgttatgatctattttggtaatgtgattataggcttgatgtaacacaagtgagtgggagctgtcttgtgggtcctaatttcgttcccagtctttcgcatttttgtttgaccaaatttattgattttataaattttatactacacacgattgatataatcaatataatttttttatataaataggtaataataaatctggtggttgtatacgttcctgtatacaactggtgatatgaattctcaataggaatataaattttgttaacaaataatagatatgaaagcatataatatatatttcattgtttgtgatatcagtttatcaaaaccgaaaatcatatatacttgaatatagatgccttaagcttcacttctaagattagatattttgtttccaacaaaaaaagtttgttttctgacccaaaggaaaaaaattgtgacttttctcaaccatgcgcatggaaataaagagtttgggacatactagtaacctatgattaatgcaaccggaataagtacaaatacaattagttttaattacgaacgaatcgaacaaaacaaaacatgtgaatatgacctaatacacttttttttttttttttttttttgcggggttctaaaccaaaacaaaattgtgacaccaatatctctacgcatgaactaaaaattaaacaaagcaaaacttagattccatttcaatatttcatatacaccctattttattttccaatacatatattcattctgttttatgaagagtttcttaaaaactttcacacattatatatattttttttaaaagcataattgatcatttttcatttgtttttcttatagtttttgcttgatttaacacaatctgtttactctctcaaaattaattcagatcatatagtattattttgaatttaatttgaactaagcaacaaagttataaaagccacacgtgtggcgcatagcctgcacagataaggtccatcgtcttccttccttctctctcaattccaaattcttcaaagctcagaacaaaaaattcctccaaaaaaaaaaatgccggggaatttagagccgttggatctcggaatccaaataccataccatttcagatgcccaatctcacttgacctaatgtctgatcccgtaaccatctccaccggccaaacttacgaccgaaccagcatcgactcatggatcgctatgggcaacaccacttgtccagtcacacgtgtcgctctctccgacttcactctcatccctaaccacactctccgccgtcttatccaagaatggtgcgtcgctaaccgctctaacggcgtcgaacggattcctacacctaaacaaccggcggatccaatctccgttaggtcacttctcagtcaagcatccgcaattaccggaactcacgtctctgttcgttcacgcgccgccgctattcgtcgtttgagaggattagctagagatagtgagaagaatcgcgttttgatcgctggtcataacgcgagggagattttggtgaggattttgttcgccgatattgaaacgacgtcgttgtcttcggagcttgtttctgagtcgcttgctcttttggttttattgcatatgacggagacggagtgtgaagctgttgcgtcggatcctagtcgggtcgggtttatgacccgattgttgtttgattcttcgattgaaattagggttaacgccgccgcgttgattgagatggtgttgaccggagcgaaatccatggatctgaaattgatcatttccggatctgattcgatattcgaaggcgttctcgatcttctcaagaatccgatttcatcgcggcgagctttgaagatcggaatcaaagcgattttcgctctctgtctcgtgaaacaaacgagacatctagcgatctccgccggagctccggggattttaatcgaccgtctcgcggcggatttcgataggtgtgatacggagcgaggtttagcgacagtggagcttctttgccgattaccagaaggatgtgctgcgtttggtgagcatgctttgacggtgccgctaatggtgaagacgatattaagagtttcagatagagcgacggagtacgcggcgggagcgttgttggctttatgtacggcggaggaacggtgtagagatgaagctgcggcggcgggattggtgacgcagttgttgcttctggtgcagagtgattgtacggagagagcgaagagaaaagctcagatgcttttgaagcttctcagagactcttggcctgacgattctaccgttcattccgacgatttcaatcgtagcgaagtggcgccgttttgagtttttttttttttttttggtttaacaagttatttattctttcttagaaaatttagagtagtcttaattgtgtaattaatttttaaaacaacaaaaattcatgagtctttttcttcgtaattgtttgtgagcctttctttgatctaattttcgagaaaatttggggtaaaagaacttgaacatatatttgtccagaactaaagtttgcctaaatctcttctaagtgagattcaaactagggttcttacttcttagctattgacccaaaaaaaaaaaaaaaaactactgacatcaaatactccattctaatatgtatgttatcagaaaaagactctacgcgaccgaaagctagacaaaaaccgataagattacaaatatcagtaatcaaatttgttatttttgtttgtgagtatgcttagttccgtgtaattttcttgtgtatttgggttgaaaatagatgtaagtttttctacaatcattgttttgtttcttagtttttgaaggagttgaatttgtaaataaaatacatatcagctggtaggtatgcacatattatttattcattgatgcacacttaaggtatgtattgaaatggttaggtagccattttttcttttttttttaataaaaaaattcattccatattttttctttaacatcaggtacagtagtttgctttcattatgatttccaaaacatagatgttgatttatgatatttgcccaaaaaaaaaaaaaaaaaatgttgatttatgattttcagtttgatcatgggcttgatgtttgttgcgaagcccaagtccattcatatatgagttgcgtttaacaaattaaacatccttcaacttacaacaaaaacaattagtcgtctggtggttaccgtgacaattgatccccattgaaagccgggttcgacacgggggacgcgaggctgtgaggaaacttgcgcttaaatgatggatttgggttcatcaccatcgtctgaaatattgacgagttagtgcgcatctgagcttcttttttttttcctgattttttggcttgtttattttctaaactaaaagatatatatttatgtaataatggaaatgtaccagaagtggataacgtttctagctgaaaattcatcatcttctagtggtttctttgtttccctttttatatattgaattctggtcttcaattaaaatatcctcatcaagaagtttgatgataaatatcaaggctaaaacggatgaagagtatgaaaagaaagatattggattagaattggatgatccaatattggattagttagatcttcatttgctctagcgtttagtaattgtttaaacttgggtctaacagtataacaaattttccatactcaaaaactaattgacagtaagtatattggttagtgttatgttttttttttcttacacttcaaaagcgacatctttataacatctctatcggttgaaaaacttaaaataatatctcatcaatataatatcaataattttaatataatttagttatataattaaaatttaatttaaaatgaaaattgaaccactaaaaagacaagtgtctcaagagtctctttagagtttatcaaatgagaattgattatctctctttttgtttttgtttttgttttttcccttttaatggacaaaaaccattgatgaaaatgttttacgtgcctccaaattgatggtttttattggcccatttcgaaacgaatcccatgtaggactgacaataaactctactttgatcacttaacttctgatttgtaaactgctcatagatttattttctcctaaaatgatgagtctagctagtaatagaaaaaacaaacataaatgtacatgaacatgaacatgattaaaaaaaagtcgatagattaaaaaaattggatggataatatatatcataacacaaagcatcaaatatatagttgaaagatcatatgaagtttttagttttgaactacgttcatattaataaatctgatcttatcgtcaatatactgaattcaaaatcatgtttcagttaattgaaaatttattcatgcataagaaaaaaaaagtttagtataaggtgttgggaaaaatatttgttcactcccaaaaatgaaaaatgagaagccagaaactagatataggtatttgtttgagtaaaaatataaatgcttatagagttctagtccttgttgaaaagaaaagaaaaacatcttaagcttcaaagaaatggtgaacttaaatatctcatttgataacatttgccaatacattgataaagaagataaaattaaaattgcgaaaaaaacaatgtccgaagaagctatatatcttctcttattcctttttttttctttctttccttctgatgatggggtttaaagtgaaaagtccaagctaatctctctgcataagccttgggacttcgcaaagaaaacaaaccctgaaaatacttaaaactcaaaccgaagcagccagttatgatttatagagatgaaaaatataacaccagttcttgagaaacttgcttgaaaacgtctacaactccaagaccatttcccagtaactgattctcacaactcggatttacctgtttcatcacataaaaaaaaagaaccatggtaaataatagatgtcaccacatatcatatgataaaaatggttatatgtataagatacctgtgcttggatcacgtaggtgctccagaaaacattagaggagacattagcaaacaaaacctccatgttgtacttctcaaacaagtaacaaacagaagtgaaaacccctggtttgtgtttagggacacacaaattgaagaaagcttcattcccacagatagtcagcaccacgttacgtgaggaccaagtatcgaaattcacgatcggatcattacaagggtaaggcaggttcgcagcagcggcactggaagaagatacctgatcggccaagaaagctgcgcgagggtaagaatctgttgcggtggcgtctatgggatggtttgatattggtgtgaggagagctgttggagaagaggatgatgatggagcataagcaaaagttgtagtaggagttgtgtttgttgaggcagaagaatactgaagcttctcaagcttttgcatttcaagtttttgcaaagtttgttcaagggatttgattgaactcactgcttcatctacaattgttgatttgtctgcctgtcgatcatatcatacataaaatattagaatatatgattctatataacgtaagaaatccgacacataaatgtacatatcagttcatatattatttattatatgtagtgctttaaaaccggagcctttttaccatgtgtaatcggtggattcaaataggactcctgttttttttataaattagatgtattagctaagatctatattagatctatatcctataatcctataagaaaattatcaaatatacatttcataaaaatttactaagttaactataatatatacataactgataacacccacaagaaaaaattatgaaaagaggaagaagaaatgtgagaaagacaagcaagtaaagagaaatcgaaagcatggcgaccttgccaaatcacaccaaatttaagtgacatagttatattaattaaaagcgcaaagatgtgaaacaaaacctgaaaaggaacaagcgtaagcatgatatcttaaaacatgtcaatcggcaaaagaatgaaacataagagaatcttatgctaacttaacatatataaaaactatgttataaaattgttctgattggtaataaacagaatgacggtataaaaaatagaagaagaaatctacagatctaaataaaattgatgagtttataacctgtcgtttcaccaaaaataagtcattcttttgcatttggataagcctagaccattctctgaatgcaaatgttattttcaggatgaaattggattttttttagttatatgtatatgcatatctgtaattttatatgattggtaattcatacagataatcgtgttataaacacacaattttcgcatataaattaccggttaaaaacgatggtaattaatatatgaatttcatgctaaataagaaaaaatccttcaattaaagcatacactcttattattgaatcataccttaggaggaagttggggaagcaaagcatgtaatttagaaaacatgtccctcatcttctttctcctttctctttcggtccatatatgtatttcatgatcaggtgattcttcttcatggtttttatcatttcttttcgttctcttttttccctttttaaccgtcgtagtctggatctctggcgacggatgagacggatgtgatggaagcggttctttctcgattcttttgcaaccacctccggaatcatcagaattggatatgccccacataaaaccctcttgccccaactcttgagcattagtcatattgaattgaatgctcattttaccctttttgctttgttgtgtttattgtgattttatgaatgacttatataaagagagagagagagagaaagaaaagatggtgaaaaagaaataggagaagatagagatttataaagagctaagtaagctcacagcaaaaccccaaaatacaatcataagacaaggccgttactaagacatcaaaatcaaaaagggtatttggttacttttctttctttctttcatgaagttcttaggggatttttttcttcttaaatataatatttaagaattgtttataagaccaaaatttcattgttgataagtaattaaacgagtggtcgtaaattcatacgcgttttctctattttcatttaaatatctcttttaaataggtaaataattaagataattagtctctaatttaatgcgatcttatctttctatgaaaattcaactttatataatgtatattattgaaaataggtaggtaagtaattcactatatagtaaatataaccataataagtcaaaataaaattgtactacttcataattatagaatgtactaatattctctaaaacgtgataaactcgttattttcttctgtcaaactttctgcattattatatttccattcgtagttaatagggtgttattcaattatggatttaaagtgagtttctaagttttataatcaataagatttgaaatttaatattatttttaagaatttattgtgtgaatttcaaaactctttattataccttagattaaaatgaattcatatcttttcatataacatcatgaaatttccaccaataacctgtaaatgttttaatgaatttttttcttcgttatttcaattttaagaccattgtgaattcaacaaatttagacctgatatcatttttcaaaatgactctttttaaacaaaattgatgattaattttcataattaaaacatatttttctcaccaaattttacaagatgcaaaatgattttcttaaaatatatataaaggtctcaaaggatttttaaaatgtgataatactacatctgaacatcgttaaaaatcatgttgaacgggtaactataaatcatgtagtttaaagatatactcgtgagtaaatctagtttttatgtatattattcagttttgtagtgatacattcatgtaagaattcttacttaacaaactaattaatatctgtaatttaattattcgagtgttgaataagtgtaatttgaactttttgttaagatatgatttgtagtaccaaaccattccgtctactaccgatctatcaacagtactactcttggtaatggaaggtttgttgttttagaaagctaatcaactttgtcaaagtgtactacaattttttttgttttttataaaaatttcgttgttactctctataatacacttaactgtgaaattcatgagagctctcaaaaattaagtgtattaacgtccaagagaactattttgaaaaaaaaaaataacgtacaaatacttcttacgcatataaacaaaattgaacctaattgattaagattttcgtattatgccaccacaccctgatttgtctctagcgtatttagttctcaacgttcgaatcatttatgtaacacagtaaaaaacaaaaaagaatattgaacagtttaggcaattagaataacagttgtattattcaacttttatatatgaattgtttctttacaaaaaaacgtttaaaaaatatatattgcatatattactaatttttttgttaaccctattaatatttattttcatcggaaaaaacggtttttactgaaatctgtatataacatttaaattcaatgaaatctgtatgtctttttttttcttttcgaaaatatgtatgtgtcttataataagaaatatgtatgtatcttataaaaagaactctgtatctgaaatgaagaataatttaaaaacaaagaatattccaaattttaaaattcgttacaacgtaacacaaattttagtatctttactaattaatattttatgtgatctctcgtttgaacaatataagttctttatcagagaagttgttactccaattttaaaaagaacaaaagttgtaattatgacccttaattaacttgtgattatcttaactgtctaataagtatagggtggtaaaagtgagcgttatctttatggttttcagtgcatgtaatcattgatcgccagagatttgaagtgtctctttcttctttctttttctcgtaaaaacaaacttttaaaattaaattaaattgtctgaatccgttcatattcaattacgagtttttgaacttattccttacctaatgaaagactggatttttaatattttattacatacataagacaaaactgggaattttagagttgggtaacgtggcaatcattcacacaccacaattgagtctaattttggattttagcaatggaaatggggaaaaaatccatgaagattaagttttgctaaattgtaaaaattaaaagctattataagtaatttccccatttcttttttccattagagccttccatgttctttttatgttgaggaaatatgcatgtatgtattttataaagatacaatatttatttatattattttataaatacatatattatgtataaagatattaagagaaaatagaataaataacaccttaacgaaaaaaaaaggaacatcatcaattttgctgattttttttatttgtacaaccactgttgctcagttttcttctaagattttgaagacaatgttttttacttgtaataatatttatctttttatttatcaactgatgttaccatttaccaaaaataaatctatagtacaaaaacattaaaatatttgaacaaaactatatgcatcatataattagtttgggaaaaaaattttgttctaaacgttacttgtttctttgaaaaaaaaaaagaaaaaaaaaatttgctcgtttctaaatactggtagcagaatgtcaaaatgataatgatattaattgggacgatcagttcatatatacaaaggttttgttttgccatacatgacttcaactgctcttctgctaaaatggataacatgaaaagcatttaggcccgtataagtaataagatgatatcatatacagtaaaaactccataaattaataacgttggaataattcatctgttaatttatagaaatatttacgcaaaatataatattatattatttcttaattttttttttacttcaatttttttatactttgttgtttgcatatttcattatgttaaaaaaaaaattatttttctttagattttgagaatcacattcaagaatttgaagttatgattaacaattttggttatcgaaatagaattgatatcaatatcctactcgattattcgggtgaaaataaagcatgtttagaagtttatagtttaaaagaaattatagcttttgtttgtaatgttggtaaagaagttgaagacgataatgtagaatttttggaaatagtgacacgtaaggaagcaattatcgcatctacaatttttcacaatttttggatgtagatcgagaagacaacaccaagagtttttgatgtaataagaaaattagagatgaacttcaacgagattcgaacttttagaaaagacaaacaacattagacttattttatattagattattttagaatgtatgcttaagatttatgatattattgagaccatatttttacatagagatttaaaaatatatatatatatatatattttatgattttagttaatttttatattggtccaatttaggactggcaaaattaattagtttaaagagtttattaatttatcgaatttctagtgtatgttagacaattgcaattctaactcaattcaaatcaatagaggaaaggagatgttaatagtttcgactatacggctgtttccaacgattcccaagatgcaaaggagattgatcctctgccaccaggtttggtcttcttgaatgtaggagacaacgaaagcttttttacaaacaatttgaagatagcgagggttttgatgtgaactaggatagttttaactacgtgttatctgttgttaactttgactggaaaccatctatagatgataaacagagcaatgaagagctgctcaaattctcatagaaacagccatcaaagaacacgatgaagaatatggaacaaaactcgagtatgtcaattgtcaagtatgtgaatgcaaatattactacatgcatgggtcttatgaattatgtaacactttcggctagagaccttatctcatcaaaaccaagagcttaaactttaccaagcaaaggccaagtttcgtgatgagatataggttgttatggtcaggccaaggccaattcagtaactaagtcgataaggttattccaaggcccgtttgatttctcccagtctgttttcggaagcaagaataatttcctagaaaagccctgtaaacttattgttacattgatcattcgaagcttttaaaccaaattttatacccaaaagtcgaaactctagacaaaagccaaacaataccctatcaaatgagcagtgtaggtaaaaaaaggtgagagtaacgatacaaaacttcccaaagtattaagaaaatcaaaaacacagaaggaaaatgttaaaactctcgcccaaaacaaaaactcaaaaatccaaaactttcaagaacaactctgtttctgattctccaaaagaacaaaataaacacttttacagtgtatataaactgagctctttcagatataacttagaactctcaaggtacgatgttgtctccaagagacagagaagctaactgatcagctgcaccacccgcttgctgctgtgctacactcctcagaacatccattgcttctgtaactttagctttaagtgcctctggtgattccagcaagtgaagtacttcggtttggtccatttcaagaagcattcccgtgactttagctgcggattctggctccagctgctccacaagcgggtatagattctcaccaagcatctgtataacgaagaaacataacaggtttaagaaagacacatttttcttagttgtttccgagctgttagaaacaaatcatttgactttaccgttctctgttgctctggagctgcattcgcaagccgtgtagccaaagctacaataggaacaggttgagaagtaggcgagtcacgatgatgcacaccaccaccacttgagacgtcatatggaacagaaagcatgttttgagtaggaccaggcattgtgtttacatctcgctgaggataccgatacattcgacctcttggatgcatctgtagagaaacagattgatgcaaaatgtaagcatgctatcgattttaaacatgtggagaaagtcttgggcctaaagcaaaacttaacctgctgctgcatcataggagaaggttgttgtggttgtggaagagctcctcttctaccaccaccaggtcgctgctgctgctgttgctgctgttgctgttgctggccttgttgcatcataggcatgaagaagtttggcattggagacccaccaggtctcatacccggtacaagctgttgttgatatccgaatccaggctgttcgatacccagttggagaagaaagttataaagattggtctcaaatgttttatgcttaaagctttgagctttacctgaggaatcatagcaggaggcccttgaccatagaagagttgctgacccattggtggaccacctggtggatacatttgcatcctaggaccaaccgcaggtggcatattgaccggcctcatctgtgaaaattgagcctaaaatgccagagaggtcaaattaagcacgataagcatgggattaggataatccttttcaaggataacaacatgggtaaattaaccagacctgtaacctagctttgcggtcttctttccgctgcgcaagagcaacatatagaggtttggtaacgatcatttttccattcatctctgtaatctgaaacattgaaaagaagacagtgttaagcatcaagatccttccagagaataggagatcaccaaaatttgacatgtcttctttatattctagtcacttacagctctagttgcttcctcaggagttgaaaatgcgacaaatccagatcctctactcactccactggggtcacgcatcacctgtcacgttcaaatgtaatacattttaatgcaaatctgctgaagatagtaacaagcagcgctttttattgtatcagtcacggaccttgcatgatgtaatagttccaaagggagcaaaatgttctctgagcttatcatctgtgacgctctcatccaagttcttaacatataagttcgacccctgagacttgtctgcagcctccttcaaactttgctcaaacttttgtttgagttcagtttccctctcggacttcttttgggccttcccaacaaaccactccttgtcgtcaaaggtctttccatttagagcgtcaacagctctggctgcatcatcagaattctcaaaattgacaaatccaaagcctttagactttccttcaccatctctcatgataacacaactagtagtcactccgaactctccaaaaactttgttaagctcttcatcactcaaggactcggagagatttttgacataaacattagtgaacttaactttctcacccgaaggatctctctgcagcttgtgaacaaagggtccaacataaacttgcttatcgttaagaagcattccattcagtttatcaatggctccctgagctgcttcatcagtgtcgtactgcacaaacccatagcctttcgactgaccagagggatcaacggccactttgcaagatagaatgggaccaaaggctgaaaatgtctcgtgaagtgctttgtgatcaattgatttgtcaagattctgagacacagataataaaccatgtcaataaacaaacaaactttgagataggatattaaacaagccaaggtttctttccatctctgcatagaagttcaaacttggacaataggaaaaagagatttaatatatgtaccttaataaatatattaccaactccgctcttacggagacttggatcacgaacagaatacataactcttatagcccttccattaagagccatgaaattcagctcattcagtgccctggaagctgtcaccaatcagaaatattaacatcaacataactcaaatcattcatttctgtaagaagaataacattgagtctactcataacattgaggtcataactctaactctatgacctcaaaagaaaactatcctccctaacagccaaataccctgaaagcccacaatgttaccaaatgtaaccactttccaaattaacctgaaagctttcaccttttttatagaaagctcccaaatttagattagcatttgatataacacatcagtccataccccaaattcagatgagctacaacgactaagttaccaaatcagataagccttaagaaagttaccatcttgaggagttgcatagttaacgtagccatagcctagagatctccgagtcgtcatgtctctgcagacacggacagaaaccacctgacccgcttgggtaaacgcctcaaacagctgtgaatccgtcacggtcgcatccagatcaccgacatataaagacgtcgtcccttgctgcgcagctccggcagccgccgccgcagctccagccgcagccgccgcagcttcagccgcagcagcaccgggaacagctacaccaccattggcattttgaccctgatgctgaatctgagccatttttcgagatatcaatccgaattacctatctatctatcttcttctcctctccaaatcagctcaaatcaaaagataaagcagagatttttaggagatgaatcctcaacgccggagaataaaaattgagtctttgaatcggaagaaggaaggaaaatggggaagtaaccgacggcgagagttgcagcgttgagcttagataaaagggtcagaggaagtgaccttatcagagagaagctcaaatgaaaaaaaactgcaaagaggaaagacaacttggaggtttcagtgtttatatatggaaggtttcaccaaaccctaaaagctttgatggtaatttgagaaatctcagccgttggatttacactgtagtgtgtcttgttgtgggtcacacacttgtataaaatatgcgttgggaaatatcttaccattttattttattttattgggcaaaagtatttgtgctcaaaaatatataaccgtattcagactaatgaggagtaattactaatgagattagaaaaacaagaatcagtgtaagtgtagtgatgttttatttaagaaaatttgttaaaattattagtatgtactgtagtaaattttctgcaaggtaaattagaaagtgaagtgatttttgtataaaaaggataaaatatgaaatagctgtagtaactgtcaaaaaaaaatatgttcgttcagacatatttaattattattagtaaataccattgaatgaccatgcaaatttatgaaaatagctaagaagttgtaaagtttttgattaatttgcaaaaaatataaaatggtgctctttttctaaaagaacacataaaattttaaataacatgcagttatctaacaatttggttatctatctctccacatacatgtgaatatgtgatgtaatgcatgaaactaaaaacatgggggactttttaaaaaaccttttctagcttgcgttatgagaaaagttttaagaagtttcgaaatcgttatgttgcaacttcatacctcagtcaaggataatagaggctaaagatagtagataattaaaaatgggccaacaaatcttgtgaaccagtttcttgatgtcttggaaaattatggaccgaaattctagcctgtattgggcccaatcttgcataatttaaaattagtcgatcgaacataactctttttgcctttctaactgtttttagtatctcttcagcgtgaaatgtgtaataacaatatcatctcttctattttcagtcagaagaaattgaaacatggtataccgaaatcagtttatgctaattcagaaggtaaatttttttaacagattggtaacgaccgttatttttggctttagaaggtttgactttaaaaatttgaggtacaaagaatttagctgtaaagactttggctgttaaaatcagattggtaaaacaaagttgtagaagctgtgactgttattttttattagtaacaataaaactttattactgatttttaaaaatatatattattcattcatttttaaaagaccaaacattgcattatttatatttattgtttcatgcacttaatatccaaacacttaatatccaaacacattaataattaaaatactcatcttgaatgattcttatggctaaatttttttctcaaaactgttttgaatgatttttttgacttatcataaaatcaacaaatttattaatgataatgaaatgacatctaactttattagtgttgatgataaaaaataaaattattattagtgaaatggatcttaaaaaaaaattagtaacttgataataattattaatcaaaaacgttttgaaaaaagaaatatgtaatttgtagagaacttttaattatgtttagagaagaaaacgaaaagcttttaatttgttttaaaagcctcatttacgtgactttcaaaaagaaaaataaaggaaaaagaaaaaaaaaagctttaaaaacttccaaaaaaaataaagtgaaaaaagtctgattggcaaaaaaaatactacaaaggctttaaaatccatttgaagccgtgaaagcagtgaagccgtgaccctatgaggttatgtcaatgttgtgataatgttgcctattttctttctctataaagggatagttatcattagttgaagaatgctaggatgttatgtaaataagaaagttaagcaatgttttcagtaaatttcttttagcacaaatttactatttttaagtgatgtctaatccaatttctttccaagttcaattttctttctctgcccatatctttacaaaccattatttttcggggtgaaactagttttgagaacaagttcgaacaaatggttgaaacttgagttgctttacggtatagtcaaatcatttgaaaaaaccatgttattaatttggaattccgactttctagtcatacaaaaaaaacaataaatgaaatacgagaaaagtagtgagtgagaaaagtgaaaatataatattcatacctcttgtttcatataacgttctaccaatcctcttgttcctgcatattaaaagtaactcatatcagaggagacatgttgtatcaaacaacaagcaacaacagataaacatttatctttttttttagtttctttttttaaaaccaagttgactatgttttagagcatcttcaatggtgagtttttaatattaattaatcaaaaataataatagaaaaggcaagagaataagaatggttcttattttaaagtatataaaatcttatttaaaatcccaaataccacatatcttagtataatgtcttaatatgatttgttcatttttatttatcacttaaaatttagttaaataacaaaattatatttaaataatattataatattgataagagacacttggtgaatatttcaccattagagatgctctttcttgtttgttgttacaaaataatacacccatccccaactatccttgaaaaatcactgatgttctctaatgaacgttctcacaaaaaggtaaatcatccgtaaatggccaaaaactccacactgataatcattattgataaacttttgctccgttcaattctcttttctaaatatgttatattatatattagtatttatttattaggaggttttgtcggcaacaaaaaaatagacaactctcgtaaataacaaaaataagttttcttatcaaatttagcacacaatcttcaaacttccaaaaataacatgaaattaatattaaaaagactaatataagcatttgattgataattcacacgatttgtgatttaaaatcataattaattttatatatttagataaaaataaattagttattatgtaaaattactaatgctaattttggaaatttgtgaagtttgtgttataattgtccataataaattttttcatgttattttaaagtatttctctataaaaagtaaaggttgggccaggtaaatgtacttattggactcaataaacaactcaaagatgattaaattcatatattttactatgaaatatgttttactataaaaaacagctcaaaatgctacatttcattattcctttctccatttcatttttaaaattcatactactcataaaagttcatagtatgactataagtttatgactagtttaactttcaactatctagctttcatatgattccctagttcaaagttatactactcataaatttagatactcatactatgaaatttttatatagcaaaaaaaaaattacatctcagtttgatatcaataactaaacatacctatgtaaaaacttacatagtctactacccaaaatatcaataattattgtagctcccactacccaaaagacaatgtccattgacttcacaagcttcttagtcttctctatttctatgctctaaaatctccttatatacatagtccccatacttatcctcaaaactcaccacaaaatctcatcaactcaatggcttcaattctctcaattcttcttctcattctttcactttcaaatctccacttcacttcaaccaccggaaacaaccacattaacgacagaaaatccttagaaatcattatcggtggtggtaacgacaacaatcctccaccgtcaccttcaccggaaccagaaccagaacctgcagattgccctcctccccctcctcctcctccatgccctcctccaccttctccccctccatgccctcctccaccctctcctcctccaagccctcctcctccacagcttccacctcctccacagcttccgccgcctgcaccgcctaaaccccagccatcgccgccaacacctgatctaccgtttgcgagctcattattaaagaaagtctatccagttctccaaagatttaaggatctagtcgcagatgataaacttaagtcttgggaaggccccgacatttgcaacaaatacctcggactcaaatgcgccattttcccgaaaacaaagcatctcgcactcgcgagcgtccagtttaatgggttaaacttgagaggcaagataggcaagatcctcaagttagataacttcctcgacaagttagaagaagtcaccatcttccacgcaaactccaacggtttcacaggctctgtgcctgatttcagcaatttgaaattcttatacgagctcgatctaagcaacaacaaactcacaggagatttcccaactagtgtcttgaaaggaaacaatctcacgtttcttgatctcaggttcaattctttctcaggctctgttcctcctcaggtctttaatctcgacctcgacgtcttgttcatcaacaacaacaatcttgttcagaagcttccactcaatcttggatccatcactgctctttacctcaccttcgccaacaacaggttagtttctcaactagttgatctagtcagaggtgcaagaatagagagagtgtggttgaatgtgtgattattgagtagctagattattatttttaatatttgttgtgatgtgacttaggttcacgggtccaattcccgaaagcataggcaacatcaagtacctacaagaagtccttttcctgaataacaagttaaccggatgcttaccgtaccaaatcggaaacctaacccgagccactgttttcgatgttgggttcaaccaattaaccggtccaataccgtactctttcggttgcttagaaacgatggaacaactcaatttagccggaaacaagttctatggaaccataccggagattgtatgcgagattgcttgtctccaaaacgtttctctctcgaataattacttcactcaggttggtccgaaatgtagaaaactcatcaagagaaaaattatggacgttagtatgaattgtatacttgatcttccaaaccagaaaacgccatcggagtgtgctaagttcttcatgcggaaacagacttgtcctaattccaagtctttgtttactgtcccttgtgataagaatccaaaccggggtaaaccggatcaagaacgattggaggaggaaaaagctcaagtttctcatccggtaacttacaacacacttaacccggaccggcttcggaatctataaccttggccgttttttcttatcaagtaacgatatatatatatatatatatatagccaaagccaagttgtttataatttgaggtgtctaatgcaatataagtgaataaatgtattgtagttgtgtactttcggatcatcactatatgtattttcattgatgtataatccatccttctgttttttctttgtacatcttgctttgtgtgaatcactgtaaaattgttcatccaatggtggatatcatcgatcagatcatcgatcagaatgtatccactcttgcacgcaccattgactaatccaaaggtttggtatggcataaaataaacatcttctttttaaaaaaacttttaaaagcaatggacgacaatttcacccaatactctaaatttagaatttacaaacttggttaatatatacacagtagtccagccaaaaaaaaaaagggtgggagtgtaagtggagctaagcaaaaatagacatgacattaccaattgtcacaaaccatcaacatctaacatgaagctgtgtttttataatatgttttggagcttcttaaatggatctactcaagttatgtggttccttttgtgaccttgggtttgcaatgttgttatctctaatatttggcaactagtgtaaaaagaaatatggaaccatgtgtattattgtaaataaagggcacaacacttgacatcatttttcttttcatttgttcttttgtcattaaatacactttgttatttagagaaacaacaactaagtttatagttagtgtctataaaacaaaaaaaaacatataagtgtatagcattccgacttaccgttcgtttaattactctgaataaggagtctccttctccagcttgcacttcatagtgctctctactatatttggaaaagaagaaatgcgcggcgcaaattgatctgaatccgcctctcggagatcgtctgccataacaaatcgctaatatatatgttggttttgtactcgacggtgaaagagagagccatgacaatgtctcttcttctgttgtcatcctattattctccataccttcctaatcttttctaaattctaaaacaaggcaattgtagcaagtttttattggataattctacattccagaaaacagtactagaggaaacatggatatagtagaaacaagaaagagagtgggaaagaaggaaaaagaaaaatttgtattctccagtgagggtgagtgaaatatataaatgacttaatgtaacttttccagttgatttagtggactgactcttaaaagaagactatattacatgttttggtcctccacttgagctaatgaattaaattttagatgacacaaattctatcgcgtttaaatccgatggtgacatcggtacttacaaactatactacaaattttgtggtcaaataacataccatgtccctaatttagatttttagctattaaataactttgtgtttaacatttttagtcaccagtgttttcagtatatatagattattcggtgactagttcatatatgattaggaaatttagagtaatgaaactaaccagtacagtactaatctctaaataatctaaaacaaaaactaaccgttactacactagctaaaactttatggaaaagatgacacaaaggtgacaacaaacgcagaaagcctttggttatgggagttgcttctggtggctcagtctttcttactatccacatttgccgtcagcctgcagattatattgaaaattttaacaaactatatcgaaatttacataacgacttcaaattcaaaacaggtaaagaaaacgaccttgcacgctgcaaagttatcgcaaccgcatatcaaattgccattcgcaacatcaaccgcttgcggagctcctccaccatcgcttctctgaactcacacacacacacacaaaaattcaataagacaagatccagacaatcttcaaaaactagaaatatagatgtaccttgtagaaatcgactgctatgaagttaggccatcgctgtcccgcggcttggtaacatgtctttatggattcaagaagagaagctgagttttgcttacatgctactatcacatccgcagcatcagggaaatggttcacaagaacaagagattttgatttatcgctcattggcgctgattgagctctatttggacacactcctaccttcaaccctccatttccatctgcaatttttttcattcattaacaaaaaaataagatatgcatatatacaaatgtaaagataaaatggtttgcatcatatataggactcacattgattctcaaccatatacttccattgataggcgatcccttcggttgcttctttatgtgaatcggatgtaaaaactagcaaccgttggttttttcgcaccatgtcatcaagccttggccagtcccctccatttttgggcattctagatactggaaacatgaactttcgtaagccagccgcatcaaacacttttgtgagacctttaggcgatttcacataatcttcgatgataatcgttacaacttcctctttgttcttctctagaaacacttgaaactcccttaaaatgttaatagccggttgctaccacattgcacacaaaaacaaaaaaaaatcttcaacatttttggcggtggaccgaccttaatatacctcatacttacaacaaacatatattgtatcaaaacttacaaaagcggtgaaattgaaacatgttccatcgaaagaatggcaaagccagatatcgttttggaagtcatacatgtcgagcataaaccctcttacaccattctgcaataatccaacaaaaacattcaaacttatgaaaaaaatgttaaaagggtttactaaaaatttgaaactttgtttacattgagttggcttgtgattgaatcttgctggttagtaggagccaaaatagcagaaccggtccgtgatacttcccccaaacgagcaaaagagttgtgtgtggttaaccatgaatacttgttaaaaggcaacccctttgccttggtgatggggttgatgggttgggttctggagcatctaggtctaaaatcagtgttggctatacatgtttcgcagtgtaatccagcgtcacagttgctgtttgttatacatgtttttccttcctacgatccaaaaccaaataataaggaaagataggatattttaaatttcccaagaaacagaggatcttgattaaaacaagatttttagactaccaatttctatagtactcgatgattaattgtatgtttctgcaaaactaataaagatcctctgtcttttggtcggaacagaggacagacacaaatgtaaatgttgtaagatttgatgagatttggttaccttgagagcagaggaaatctctaaaaggaaagaagattggagcagaagagcaatgagaaggaagagtaataatctttgaaacatggctgtcttcaccaaaaagtaaaaaccccaaaatttaagaagaagaagaagaagaagcaagtagctacttcatcatcatgctagaatatagatttgttggtggtttgcatttgcgtgaaaaagattctaagaaacaaataaaataaagtaaatacaatgagaggattttaaggataaaaatagagtgaacggaagtgcgcgtgagtcggtgaagacatgatgataataaatgctgcaaaattagtgggtttgttgttgttttggtcgccacttttgtttttcatggtctctttttcaaaactcttattttttttggttttaatgctaagacctttttctgcctggaactttcttacacaacaacaattataagggaaagacatatcaacaacaataataaaatgtgagttatcttgtaattgttttttacataagaaaaaaaaaagacttaaacaaatatacagaattttatttttctttcattttactaatacagaaagatgaaacggctttgaagcttagacgatgttaaggcaaatatggcatgatagcaatagcccaaacacttagaaaagtttgcacgcaattgcataccttctttcctaacatagcttctcacgtcaatttttccatttaactagtttcacattccttctacaaaccattgatgatccattcagccggcccaatcatagcccactttgccaacaatatccttaaaccagttcacacatagtttgggtctgggataggtctgaaccaactcgaagttataaattacaaatcatggaaaattggcacaaggacgagaatttcaagaagtttttctttttcaaaatcttgtttttattgggtaggtagggacccaaatcgtcagctctaattcacactcacatttgtaaccactcgtgaaacattttttacatcccttcttatttgattcttttgccttttatgaatttgcaaactcaataacttgtgtaaccttttcgactatcatacaatctacacaatcattcatctagaaccagcttaagattagtaacaattacctaattattagtcattccttaattacaaaacggatcacaaatattgctttttataagatatctattccgtatccaacccctacatacagaaaaaaggttcgggccgaccctgcctacataagaccgaccatataaacgttttgtatatggcatggcattactggaatgttgtaggaaaaaattgcatacaataaatctaaacctttacaaaaatattgcagttgaggggtctgagatatgacagggtgttgcacatgtgagtgaccctaccaacgttatgtagaccatttccatttgggttcacattgctacttccatctcattttctcgtttttgaattcggtctagaatttatatccaaaactaaaactgggatgatttaggatcaatcccaaagcactcgagccattttatccttatgtcgctttcgcttcaccaaacacttcataaatgcttgtttgtttattttttaacaagcaatatatacctttcttcttctccaagataaagacaaaggtataattattcgttttatcacaaagtagaatatttgcttagaaactaattatgaattaacaattgttgttacaaattacaatcatacaacggttgtgtgtttttataatcttaaaaaaacgaataaaaacaaacaaaagttaataattaacgaaatggcatgagacatcatgatacaaacatgcgacctccattttaatttgttttcagttttaatcctactactaatcatgtatttttgttgtgttggtccaaatcatttcacaggaaagaaactaatctaatacaaatttctgaatatcaaatttttttatgtttccttcaacattcacaagtttagtgttggtatgttatgcataaaagaaacttgtaggttagaaaggagatgaaatgagaaagttaggggcttttctacaattgtcttcgtttatgatcacgaattgaatagttgacaagtctaaaatttgtctctttccttgtcacttgtcagtgagtatacaaaacaatacacagagcctcgcatgtcatattcacacagggaccttccgttaaactccttttttataatctcgttctctcttctctctttctctctctggttgctcttggccatggttgtgaatagtcaagctttcttgttggcattaattgcattacttgctacccaattgccttcactaatggctgcaggtttctctttatcgattttcctctgtttctttctcttttaaagcttcattatttaatcctgttcttgcctaaatcaggataagattatgaatgttggattttgagcttctggattttgcaaattttgttgctttctttgactagatttgagtttcgatggaaattcgcataattttggttcattagttgcttacatgcaaaaatactctctttttaaattgaaatcagatcttgagaaaccataaaaattcaaactttgtttgttcttttcaagctattgtggttagaaagttaaaagcttgaaacttgcggaccaatctttataggttaccagacactaatgctgcattgtcatgtgtgtttgcagattgtccattagatttcagtggatcaaatttcactctagtagctactgtgtgctccaacataaccaacagaggcaaatgttgccgctacatgaacgcttttgttgcggtgtccgtggctcgttacgcgaacttgtcaactaatcttggagtcacatcagatttatctgaaacctgcattgcttccatctctagagccatggagggctacggagtctcgagaaacgccactagtttctgcggtttgggaaccaagatccttgttaagtatgactgtgacggtcgaaccactgttacacaaatgcatcagtctccgggatttggacatgtttcaagaaactgcagactcccattttcgccgggacaccaatgcagaaagtgtttgaactctggcatcacttaccttcgtaatctcataggtgcagagactaataacattactctgtgtacttgtcgtgatgcgacttatgctacattagcaagccgaatagacgatacatcagctcttgaactccttagttgtttctttcaagtgacagagcttaacattccttcaggttagactcatgactgcaattttcttagtatctcatcagtttctttagtaactcattgtgtatcgacagagtcattttcaccagtggcaagtccagaaccttctccaagcacggttggtggtattagcccaagcaacagtgattctcaaatgactacaagtagaagcaccaatccatatcacttaacaatggttccaaccattgggattgttgttacagctgttgctcttacgatgcttgtagtcttggtaattcttatccgtagaaagaaccgggaactggatgaatctgagagcttggatagaaagtcaacaaaatcagttccttcttcccttcctgtattcaagattcatgaaggtgtgaaaatagagagttgagttctttgttttataatataagatacctaagaaatgacttgaaaacgcttttttctgcagatgattcttcctcagctttcagaaagttcagctacaaggaaatgacaaatgcaacaaatgatttcaacacggttatcggtcagggaggttttggtactgtttacaaagccgagttcaacgatggtctgattgcagcggtaaaaaagatgaacaaagtctctgaacaagctgaacaagatttttgtagagagatagggcttttagctaagctgcatcaccgtaacctcgttgctttgaaaggcttttgcatcaacaagaaagaaaggtgaagaaccatacattgctttttcgccttctgcatttatctaaaccataagtgttctcattttatattgtttcaatcattcaggttcttggtctacgactatatgaaaaatggcagcttaaaagatcacttacatggtatgtatatgcttcttctaccataagtgtacgagtcctgagtgttgaatacttttcttgtttcaattttttcctttgcagccattggaaagcctccacctagttggggaacaagaatgaaaattgcaattgatgtggcaaatgctttggtaaatattccaaagtctttcatctacattttctctgtaaactgatttgataatatatcttttacagtttttggttcttggctgcacgttgttctctcctccaggaatatcttcatttctactgtgatcctcctctctgtcatagagatattaaatcaagcaatatattactcgatgagaacttcgtcgctaaggtatgtagtactgcacatcttctgtgttagagaaccctttggtatttggataactaataatgttttcttggtgcagctttcagattttggccttgcacattcgtctagagatggctctgtttgctttgagcctgtgaataccgatatccgtggaactccaggtttgggagagatactgaacagaataacttgactacttttgatggaagctgagttttaaaaacttgaagttttttcaggttatgtagatccggaatatgtagtaacgcaagagttgacagagaagagtgatgtgtacagctacggagttgtgttgctggagctcataaccgggagaagagcagttgatgaaggtaggaaccttgtggaaatgtctcagcggtttttgttggcgaaatcaaaacacctcgagttggtagacccgagaatcaaagactctattaatgatgctggaggaaaacaacttgatgcagttgtgacggttgtgagattgtgtaccgagaaagaaggccggtctaggccatcaattaagcaagtcttgaggctgttgtgtgaaagctgtgatccggtgcatagcgcatttgctaaagcggttgaagaagagataggctgggatagtaggaagagaagcaatttgagaattcaaagaggtgattcccggatctttggtccatcgtctagtactacttccaggtcacattacagccggagtttacctcactctccaattaacggattttctttctgagttagtcacatcttctctatagctaaatctgaaagttttacatatgtttatgaaaattatgaattcatattgaaagctctcatactctacacagactgcactcttagttaaattcagctcaaaagatttctacattgtaagcgtctctgtaatttctcctgtacagtagcactatcttctattacatattactctcccagtgtcttccttttgagtggtcctgtattacattagcaggttcttcttgctttgacttcaccttcttaccacggaccggtaagggttcttctcaagcattgtcttttggccagcaatggaggctgcttcgaaaattcctttagctgcaaattcaagtactagtatcagtgaactgtgtgtcatcaaaatgacaatagagctacatttagacagacacaaaatgtctggtaatgtagagacaatgatggtgtatacatgaaatatacataagtagaggaaaaacgttattacctcactattatgggttttcattatttcagcctgcaacatagagagaccgcagttaaataactgagccagctagactctctatggagaagcaataaaaatggtagaagaaaaaaacctgtttcttctgcaaatcttgattcactagcttgagactttcaatctcagcttccagttccaaggtataagcctgaggtttagccaaaacatcaaaatgatttcaaagttcttgaaaagaaaacggtaatggcagtttggttagatgatattgatatcaaagtttttgagaacaaaacggtaactttacctgttttcgagcccttgatctagcagcggattcccgattcttgatcattctcttttgccttctctcaacaaccttctccaggcccgtattgcttcttcttccccgaccaaacacgtaaggaactggtgatgaccaagtattgttttctgcactgctcgtcccaggagaagtagctgtaacagtaccccctgctcctcccatattactgttggctggaccatctgcgctagtctcaaataaacccctgttgaccatatttacaggcgccgcaaatgttacattcgcttgttttggaaagatagttggaggcagtctctgatgtggctgctgcaactgctgctgatgtggctgctgctgctgctgcatggttccaccaactttgaggcctaaaccaggtgcttgattcatgatcatagaactattgttcccgttgaacgatatgctgttttgattcggctgaccaaatccaaactccaaaccagcagcaccgttgttagcataaaacccgctactactgttttcgttctgctgagtattatcttctttaacaacgccagcacggagtaagaaatcttccagagtcatttcccctaaagtctgttgcctctcaagcgcatccgttccagtattcccattactaccttctttcgaattcaggtatttccagacttcatcgacagtcttctgactaagcgttctaggcaaggtcaaggagccttgcctctgtaaaccatttcctcccggaacaaaaccactaggtcccggggctgcaaccgaagatgtagtagtcataaaggcttgagtatcctcagcagtccatatgttcttgagtaactcatccatattcatagacccaaaatctttccccggctcacctaatgtgctctgaagctcatcaaacgttaaggaatataacgaagactgcctcgccaatggctttgactcattccctctagaagtatcgccgcctaagttgttgatatcaatgtgagtacccatacttcttttctgtttcacaacggaatcacttccttccaaattcttcagtgaaaaaacaaacgaatcagacccttttagctttacctaagagagaacaagaccagaaaattgaaactggtttaggagtataacacaccacacaactatgtgtcacatagtgcttttaagtatacttgcataagagcaagcaaagaagaccaaaagcaaaaggcaggaacgttcatataaatgtcaaaactttataaagttttagccagaagcaatcaatcacaaacatatacatagaagtgtgtgatacagagagtataaattggatccttggattcagagagaaatataagattggatcaaaatccataactttgaccattcttgaatgtatctaaaagatagatctataaaagattctggagtaaaagcaagatcacacaaaccctcaagaagaaaaacaaaaaagtcttatcctttaatttctttaggaatagttacttcattactactactacttgatttagaacatagaaccaaaaaaaagacaaaacagatattatgaatcggacccaaaaaaaaaaaaagtataacacttcaggggatgtgataagacaaagacagattcgagaagaaaagaaaacgaaaacggataaacaaaaagaaggaagctttacctaatattataggcgattgctgaaaatagagaagagctgcgagagagagaagagacgacaagtgtgtttgtagtagcttcgacacgaactgccattttaaggggttaagctttttcctcttatggttttttattttatttattgtttagatattttgctttcattttttggtaataaactaataaatatcccgttttaatgattattaaacatagtcacttaatttagctgacaaccacgttcatttttaaccaataagaagctgtaacgtgtgagagctttagtcgctgattgtgtcctttgccttgtttgttttctttaaaaatgggattagatctgatacaaatatccatattaaccttgccatttagacattatttctgatcttaattaactaaccgaagaaagtttggataattatagtatttcaattttaattcgccaacagaaattttttaaatatcgaattctgtgttgtaaactgcacaattttacttcaattcgactccaagaaaattactaaaaaggaaattgattttttttttacttatgaaccgcagtaaatttttgtttgatttttagttggctaattttttttcaaaaccaaaattctaaaaaatcaaatcctaactcatctgaagtttatgaatgtctagtcatatattgttggtgtttaccgcgatcaaagagaaaatcaaaccacaacaatgttcgtagatggtggtaatctatgcacatgacaaaatactctatatacaatcgaacaaactactagactagaggtttttggttaaaattttattttgcatttaaataattttctatgcatataaaaaaataagaaatgaaatgggaataaaattatagtatagtatcatgtcggtcggaacaccaaatgattaaattatgtgccaaattaattttaatatcatattgttgttactcatgtaagatattttgtgtgcttgataaactgtgattattatacatgaatgatgttgaaacaacggcagaagtgggtagtgattctttttgggtcccatcatcccaatggtgtgcgaattttgacatcaagcaataatcattatatccaagcaacccaaaagaagaagacttttaagaagatttgcgtcgagtttaatacaattcacttccaaatttggaaattttgccctctcctcacttggtaaatggtatgttgatgatttctacttctttataatttgataacttatttaaaagaattgtctactttcgtgtcaccgttgggccagcgtatagaatgagcatcaaaccatgatagagttctccttcattctttctttttgtcatatatgtgatcattggtatttttttttttgtcaatattaatttagattcatacgagctaattccgggaaatattgtttacatatgtaatcattggtattgtaatgctaattttgtttctttttttttaaaaacttccgctttcttgtggagcaaaacatatcaattacccattcaacaactttctagtctctactaacaaacctcacgactttgttaatcaaaaaagaaaaattacctctactactagaagtaaaaataaatgaaaaggaagagttttctaatgggtaaaaatccaaaaaaaaaccttaactaatttttatttaaacgtttaatacccaattgttttttctaagaagaaaaatacatgaaaaatacatgaaataataaaactgtgcaatttaaatattcaaacaattaaatattgttattttcatactcacgatctgacaacaaaaataaaattttaattttacccttatcatctcaattaactattaattttttagattatatgacattaattttctaattttggataaaataattttattaacatattagtttatggtgtctaaaaatttcaaattttcatttttattataattattttattttaaaattatttagagaaaataaaatattttttaaagtgggcggaacaatctccgctcgaatttaaatctttcacgaataaaactatttttgaaaaaatctgaacccgaatctcatcgtttttctcaagatttttgacaaaactatttttgagattcgggttgtgttttttttcaaaaaaagtttatccataaactaaaatcctaatatttttctccatcaaaatcatagagtcaattcatcaacaatggcaagatacaaactaagtattgtaataatactattaatgtgaacgttttgaagtaattcgaaacataaattgtttttgtaattttgtcatattacttgatgttggttttttatgaaccaaatgcatgaaataataagcatttaactgataaatttatttgttttgaataattgtgtaaacttttatatggtttttattataaattatatttatattattttattttatcataataatataaaattttaatcaaatatgaaatatatatatatatatatattatatattcttttctataaatatgtttacaagtaaaagattcatatacttttctataaaaaaaaagatatataaaatgaaatatatattttactataatacgaattaatttatcatatatatatacgttctataatatatttacaagtaagagtatcatatactcttctatacataaaagatttataaaatcaaacagatctcctttctataaatccgtatgtgcaatgcatgacacacctctataaatctcctttctgtagtctcttaatttttcacgtttatctatattcactattcagtatacgagtaactaaatttaagagaaaagaaaagaaagaaaaaaaaatggccaaggcaacttcttcacttgtcgtccccatcatctttcttgtgatatttgctttaggtatgcatttatctttaatatattcatacagtaataagttggcatatgtatccaatattgtagacttgtcattcacgtaactctactgtcatttttagtttcggctacattcattggcaatatatcatatagtatatatcttagttcagtgtattgataactcctaaatcttaatatagcttttgttatctgagacgaaattaattaattttgtttgatatagttgagcagaatacgggatgtttcgattatgatgtttaccaaccgtgcgatcattgtcgagaaagatgcctcaaatattatccagttacaagaaaagccatttgtcggaaaaatcattgtgtttgcattggcccttgtccgaatgataaagcgattccaaatgttaaactcttcaaaaatgtaaaagaacaaatcctaagttgaatgtcaaaatcataatatatctaaaaaactattttcaattgaagctttgattataataaaatttatagaacacaaattttccagaaatatgtttgttattgatgtggcgagcccacattttttctctacatcatttatttatttaattctactactgtctgtattcttaatattctaaaataataaccaaacagagaattaaatcgactaatcataaatatatatttcaaaattttaaatattgtcttatatataaagaagtttatgtataaatgcattgaattcatctattggaatattggtctgtcatcaactagataaaaaagctaaaatttataaaatatatgacttacgcaatttatttaatctttctcctataagtgttctaaaaagcggtttagatgctcggtgctcaagctacacataaaaaaatatctattagtgtattatcccaatttttaaatatgttttattttcatagacatagttataaacatttatttatatttttaatataaattaagtaaatgatttctttagttttggtttacaattttatattgtaatttctaatcgatattttatgtattttttaaaaataaaaaattacaaaaaaatttagacattttagtttatagtgtgtaaaatgttcaaagtatcaattgtatgtatacttgttttattttgaaatttaaaatagaaattacagagaacaaaaaatattttaaaatggccggtaaaaaatctccgttcgaatttaaatgtttcacgaataaaactatttttgaaaaaaacaacaacccgaatctcaaaaatagttttgtcaaaaatcttgagataaacgataagaatcgggtttagaatttgtcaaaaatagttttattcgtgaaagattttaattcgaacggagattgtttaccggccattttaaaatattttttattttctctaaataattttaaaataaaataattataataaaattgaaattttgaaatttttagacaccataaactaaaatgttaatacaattattttttatccaaaattagaaacttaatgtcatataatctaaaaaattaatagttaattgagatgataagagtaaaattggaattttatttttgttgtgagtatgaaaataacaacatttaattgtttgagtatttaaattgtacagttttattatttcatgtatttttcttccaacaaaaaataattagctattaaacgtccaaataaaaattagttgaggtattttttgggtttttacccgttttctaatgttaacaaaaaaaagtttggccgctcattgtttatctttacaaagagttagaacttagaaacatagggaaaaaaaacggaggtaaaatattataataagaaataatacttataaatctttactcaattttgtacgaaaacataaaataaaaagaaataagttgaataacaattttcaaatttcaaatgagttgttaccatagtaacactagtttttgaaaaaaagacatataatccttttgaaactaaaaaataattaaaatgccatttagatttcctaccaaaaatataaaaataaattacaaatataatctaagagaattctcaatatctcagattcacaataattttttatgatcccttttttttgttttttcttttctttgatcatcagaaattacaaaacccttaactatcatcaatatctaccatttgtcgcttttctagattgcctctctagccacatgtatttatttttatgaccacaactgttcatcttgaataaaaaatattcatattttcatattacaaactttttaccaatctcgagtcttcatctatttcatcctacacaatgtattttttcttcgagggagttctttccatacatgattaattatattttaattaatttccaaaaaaaaactttttctaggtctttcactttaaaaataacaatttttctctcatagcaaaaaactttttctttaacctattttcagccgtttttttatccgtccttttctgatcggagattgacggtcagtgtcttccatagcaccaacgtcgatcatcttttagtcttaattttcatgtttacttcgttttttattatgaatttgttgcaagtttcttcttcaaagttttatcgatgattctctcaaccttcaaccaatcgaccaaactaccatcaacaatcgttcttgtagttggtgttacggtaaaggcggcttcttttaagcttcctccattctaatcaacatacatatatgggtgaggtctattgtttttttattccttcaaacttgatgcaatcgatttaatatcgccatcatcggcccaagcacttttcggcagttgcaattccctctataatttggtttcgtcttgtcattcttatgtagctcaagatctttcattttcgaagtctccaaaaaataagtgaagactataaaaccgaaagtttagatgatgtccgttttcggagatgcatgaaatagcttctgattttagaaaaaattggttaactgaagaagaaagaagcaagtgataataattgtagttttgatgtcatttgtaacctgattatttggataatcattttctgttaattagttttgattatttgtcatctcgagcaataccggctttgtgtaatttctgttttcagttataccattaaataaaaaggtcttccactttttaaacactcatactatgggggttcgaacttaagcggaagtgacatactaacataagagtattttaaaacctctagaccatcaacccaactataaatatacgtggccaattcatgggctccgtcgatgaccataaaataacttgtgcattgactttgaagctaagccttaaaaaatcaaaacatatgtgtacattattcacattcctaatctcttacctaaacttaataaagcctcgtactgagagatcaaaacaaaacaaaacaaaacccaaacacttaccaaatcaatcaattatcgagaatcttccttcctttaatcctcaaaaaaaacaaaaacctttcttcacctcctttccttgattcatcctctaggttaatgggtgttttctcgaatcttcgaggacccagagccggagctacccacgatgaatttccggcgaccaatggctctccttcgtcttcttcttctccatcttcatcaatcaagcgaaaattatcgaatttgttaccactctgcgttgctctggtagttatcgctgagatcgggtttctgggtcggctcgataaagtcgctttggttgatacgttgactgatttcttcacccagtctccgtcactctcgcagtctccaccggcgagatccgatcggaagaagatcggattatttactgataggagctgcgaggagtggttgatgagagaagattcagttacttactctagagattttactaaagatccaatttttatctctggtggtgaaaaggtaaaacattttgtgttctgtggaagatggttttgatcattccttttttgggctagatatagtagagtgattgattagtcagtagaataaaagaataatgatttcatttgcgttcacaattggttaggactttcaatggtgttctgtggattgtacatttggagatagttcagggaaaacaccagatgctgcgtttggattaggtcagaaacctggaactcttagtataatacgttccatggaatcagcacagtattatccagaaaatgatcttgcacaggcacgacggtgggtaagcacaatctcaacagttgctttaaacgtatttcacgacgtgtcttttggtggaatgtatatgaagtgtaatgtgttttcttgttcatcaggagaggttatgatatagtgatgaccactagtctatcatcagatgttcctgttggatatttttcgtgggcggagtatgatattatgtctccggtacagccaaaaactgagagagctattgcagctgcttttatttctaattgtggtgctcggaattttcgtctacaagcacttgaggcattgatgaaaactaacattaagattgattcttatggtggttgtcatcgaaaccgggatgggaaaggtaacataagtaaatcaggcaaattatacattggtagatcaacgagctgtctttttgatgtgatttgtttttattaatattcatgtagttgacaaggttgaagctcttaagcgatacaaattcagtttggcttttgagaatactaacgaggaagattatgtcaccgagaagttctttcaatccttagttgctggtatgttttagatttcatctgtctttgtgagcatatcttacaagttcttgtactttgttgtcagaagtatttcattaaaagtttatataaagctatgcaatttttcaacatatgatctcagggtccgtccccgtggtagttggtcctccaaatatagaagaatttgcgcctgcttcggactcattccttcacattaagactatggaagatgtagagccagttgcaaagagaatgaagtatctcgcagctaaccctgctgcttataatcagacactaaggtctgattttttatttccataaatgattataaatatgtgcgataacttcttcttgaaagcttcatgcttctgttttggttttagatggaaatacgagggtccttcagattctttcaaggcacttgttgatatggctgctgtacactcttcttgccgtctctgcattttcctggccacgagggtccgagaacaagaagaggaaagccctaatttcaagaaacgaccgtgcaaatgtagcaggggaggatcagacacagtttatcatgtttttgttagagaaagaggccggtttgaaatggaatcagtctttttgaggtaagaaagcttatcatttggttcaccactgaatcaaaacaatgattagtattgatttaaccggaatatcgtttcttgtccaatccaggggtaaaagtgtgactcaggaagctctagaatctgcagttctcgccaagttcaagtctttaaaacatgaggcagtgtggaagaaggaaaggcctggaaacttaaaaggagacaaagagcttaaaatacatcggatttacccgcttggcctaacgcaacgacaggctttgtacaacttcaaattcgagggaaattcgagtctaagtagtcacattcaaaacaacccttgtgctaaatttgaggttgtcttcgtctagtttcattcctctggatctgtcacaggtatcatctcagctaagaagacatttctctgtgctagaatcgcaaagtgctaaacaaaccgattagatgaaacaaaaggttaatagtcatgagattggtgaactcattttgtttaggcagtgtatctgtaaatcgttctgacattgcagacgatgtgttcttgatagctggatgcataaatgtttgaagatttagagcaatttgatagttttgaatctcttgagagtgtgttaattaatctttaaatttttcttgggttgttgatgcgtaaacacaattagtctcacaagaagattatcaagttctcttaataatattaccaacgaacaaaaatattacacagaatttgtttttttaaagatatgtaattaatttgtaaactttttaatagttcgttactttagaataaatacggttagagaattagatattcccaaaaaaatagatgacctatattcagccactacactaagacaatataatcgtaaggttgtgaaaaaatattttttatatatatgcgacaactatgggttaaattttaaccacagttagtgttttcgttagtaaagataataaccgttaattcggatatgtgattttatcaatttttattaaatgaaggttttaaaagcaaccaaaattaagttaagtatttttatttcaaatttaatactacaaatactaaatgtctaaattaaaaatggatgacggttctttcgggttttcccgcaaaaatattacacaaatatttttttttaaagatatgtaattaatttataaacattttaatagttcggtactttaaaataaatgcggttaagaaaaaagatattcacaaaaaaaaatctttaagattctgagaatcttttaatcgacctgaatattaaacaacagagttaaggaaactaaataataaattaaagctagctaaaattaaggaaacacgttaataaaaggttcccaactacttatttctctctcattcgcgcaatcttccgctttttaatgaaaaccctgagaccttgttcatcattattcatctgaaccaaaagctgcttcctctttttttttttgtgaaaacaatctctctttgttgagttatgagcagataccagtatattctgagaaccatagattatgtatgttagactttattcttttcccctaaaatatttaagaattcgtttctgtgttttgacttttcagaaacaataaaattcatgtgtttcaggtcaaggaaaaaatcgagaggaggtgtattcaaaagtacatgagtttggaagaaaccatgacttatatgtatgatcatgaccatattcctaaacatatcactgcaacaagtaagtaaaagaaaatcaatttgatttcggattgagaaacatataaactagaaaagcttttcttttatttttttttgttttcagtttgggaacatcttcaaagagagaacccaaatttctttaaagaatacaacaaacgatgcgaattggttcgtcaaatagttacactcaacgacttgcttgctcagcaaatagatctgatgcaaagacttagccaacttgatgttggtactactgcaccaggtacttaattagagataaacccttttgtgtatccttaagattattattactttaaatcagtttatgaagaagacattgtttttttgaatttatgtattgtgtagtaacaaagttgcaagaacctaatgatcatcatcatgatgaagtccaaactcttgaacagtggttggagactaatggttttgctaatatagaagatacattcctttgtttaagcgatctggttgatgcaccaggtacgtcgttaaagaaaaccactctctttctagttaagattagtctttaaaatgagaagatctcttcttttaattctgtttttttttttttgtagtaacagaggtgcagaaacctaaggataaagatcaaagttgtgatcagtggattaatgggtctaatgatttagcttctatagaagaaacagtttcttctttgatcaatccatcaccatttgctgaaacaccacaatcagaacctcctggtctacgatacgataccgattgtggtgactcgaatcttgaacaattcgctagagatttagaagatcaacaacaaaggatgcaacaaaaattccagagaggacaacaacctcaacatttaattaatcaaaagtgtacttgaagatcttttcacccaatgttttggtttcgtttctcagttcgatgaaatgttttggattcttcttcttctttttctcaatcttatatatttcattttgcttccaatgcaatttcagagatatgttactggcgtttgtgtaaacaataataaaaaagaatagccaataagatattttagataaatttcttgattgttttaaaaagtttgctaacaaaaatattagaagtgaaaaagcatcatgtattagagacactaaagtcccacatcggaaggaacaaacttttctctactctatatataagttcagcttgcattaccgcaacgtcgaacctagtaacgtgggtttatgatccgagtggagacaacaaggtgatggtacattgggtcggatctcaatgggccgggttcggcttgggctctttactggcctgcccattccaagtcgggagttgagatatcttctgagcgaaggttcggagccaatatctctttagagcggaggagaccgcgtgaggctggtttcacagagcagcgtccaccttccgttctcgacggtggaaggataacgggcccgttgtcttccgagcccactatgacccattaggccgactccaactgagccatcacttttttttggatcatcagggctacaaggtacacaatttacttactcttaagaggaaaaaatctataactcttgtatttacatattcgttttttcagcttggaagtcggaactactaggttatttggatatgaaatcagttaaagactcattgatgtactacgccttcaatacattgttaataatgctattagttttcacatatattggtggctcatttgtacgacaatcataagagagcttcaaaacagaggagaagtgggagaagagataagatcaggtaccaattttctttcaattgttgtttttaagattgaaagttttgcttataagggatcaatggttgctagaatctgttacataaacattgaactatcacgcatacgaatcgttaagtaacttgacttatgttatgtctttgagtgattcctttttataatttacatcaatggcagattcggaggatgatgactagggtttgctagaggtcatggtgaaaaatggttttcagatacctcagaattaatgacactttaagcattgctattactcagatatgtcttctcttttgctctaggttaatgagtaatatatagcaaagaaatctatttttattgtaaatgaaaattaaaccccttttgtatgggtaatgggttaatgtaatttagttgagagtccctgaaaaagaagattgtcttctgtgtgcgtgtgtgtgtttaaactcttttgtactttgagaagaagattaaccaaagtctgagtggattgatcaaaaaccatcaaaccacaataaaaaatcgattaaaccaaattgttgcttgagttgagagttacttttatagtgtctcacatatggcaaatctgaaaatggaaaaaaaaaaaaaaaaacaaagaaacgcgccaggtaggggtcgaacctacgaccttctgcttaggaaacagacgctctatccactgagctacaggcgcttttttgaacaatagttattgttgataatatttaatcgtatgcgactttaggcgcagttgagaaaataaagacataatgtgtgtcacacattcttttacactgtaaccaaattagtacaaagaaacgtattctgtagacaaaaaaaatggcgtggtgcgatattcttgtagtttttagtttgaccgtatcttacaagttcatgtagttttagactttaaaattaaggtaataataatttcattagttaaataacagcctagaaaaagaagataatcaaaaaacaaaaagaagaaaagaatcttctattagattttgggttggctgattttcgagtcataaattatttcgattctcagctttcacccccggacttttgggcccttaaatttccaccatcaattttcatattcctcaaaattacatcatctactttcgaattcatgcttaaacatacatttccaattgaaccattcatttaaccgggattaaccacaaatccgcgtttactgtaccgcgattgtgattaacccgactaatacccagacccgttaagaaaacgacgtcgttttcatttcgtttaactcatcaaaaagagaaagaaaacgacgtcgttttcattcttcttctttaactctcaaatcgatttggtagtcctcttcttttgactttcatctctgtctccatcgtcttctagattgacgtctccatcagacgctatgtcaccatcgtcttctctattctcctctccatcagaagctctgtctccatctatcccgacgtcgtctccctcgattctggtggcttcgtcctcctcgactccgctatcaccactatcacttccatcgtcggcttcaatgtcactctctggaggttcgaaatcggggtcatctggatcgctttggtaaatcaatccttcctcccaccaattcttcatttctccctattcgaaacccaaatcgagacccaaaaattcgaaccgaagaagaaaaccccaaatctccttttgtctttctctctcaagaaccctaatttcacagtgtcgagattaaagaagaacgactaaatcgatttgagagttaaagaagaagaatgaaaacgacgtcgttttctttctctttttgatgagttaaacgaaatgaaacgacgtcgttttcttaacgggtctgggtattagtcgggttaatcgcaatcgcggtacagtaaacgcggatttgtggttaatcccggttaaatgaatggttcaattggaaatgtatgtttaagcatgaatccgaaagtagatgatgtaattttgggaatatgaaagttgatggtggaaatttaagggcccaaaagtccgggggtgaaagctgagaatcgaaatagtttatggctcgaaaatcagccaacccttagattttatgtcgtaataaaagcattatttgaagaaaaaaatcatatcttttggtttttaaaccccttatatagttattagtatgcttctaaggtaagaattgattttttcctatccatcctagagtaagagttgatttcttgttcaatagctagccgttccgttaaaaacaatggaatgaccggtttgggtaaggactaaccgggtttggcaaaccaaatgccgtaattattgcagacgtgtcacaatggaacactcagtggcttcttgattatatttttcgagtttcgaggatcaaacaattcaatcatcatcttctacctctgctccaatttctctgaaaacaagaaaaccttaatcaatcgaaatctcagtgtaactaatcaatggagatcaagcctggtttatccgctctcgtcactggcggcgcctctgggatcggtaaaaaaaattcattttcaacaattcattttctgtttgttattcatgaaatctgctgctgggttattttcgtgtttagtaaattggattatttttccttagatttacgtatgaaactggtgtgtgtctgtttcttctttacccaaatttggatgatgtcatgatcttaaaattggtgaagctttttttaccatgatgaaagaagctcagtactttttgtttgggtattgaaaagcacgtcagtactattgtcactctctctttactaagtaatacaatgtgatatttttggtgatgagatggttcaattatgtgtaggtcgagctctctgcttagctcttgcagagaaaggagtttttgtaacagtcgctgatttttcggaggagaaaggacaagagactacttcgcttgttcgagaagcgaatgccaagtttcatcagggcttaagctttccttctgctatctttgtgaaatgtgatgtgactaatagaggttagttagtgtgttagtttagctttcatgatgaaacagaaaactttgtcttattgactgttgttattaatcctctggtttatggaaacaggagatctcctcgctgctttcgataagcatttagccacatttggaacacttgacatctgtatcaacaatgctgggattagcactcctttaagatttgataaagatgacactgatggatctaaatcatggaaacacaccattaatgtcgatctgattgcagtagttgaaggcacacaacttgcggtaagtctcgtattccttggcttgtaaagctctgatttttgttatctcggttttatctgattatttatgattttcaacttttgtgtagatcaaagctatgaaagcaaaacaaaagcctggagttatcattaacatgggatcagctgcgggtctttatccaatgcccgttgatcctatctatgctgcctctaaaggttttatgttacttgtgtcttattgtttctttcatttgttcattgaattatataaagatgtttaattctttttgcttatcccatatgttacatttctgcagccggtgtcgtattattcactagatcattagcatattacaggcgccaggggattcgcatcaatgtgctttgccctgaagtaagacaaatatctgaatattcaaaatgtttattaatgctctattgggggttttgagtggtacagtatgtttgataaataattggtagccactgacatgaaacttaaggtgtcatgcgtgaggcatatgggtttagattttcgttttcctctcatcaaaaatacttgttactttaaaaaaagctctgttatggttgtgtttgttacaattaaaatactttttagctgagtgttgtttaattttttgcttctgcacttttgatgtgcagtttatcaagacagacttagctgaagctattgatgcttcaatactagagtcaataggcggttacatgtctatggacatgttgattaaaggtgtgtatgcggattatatacttggagtcttgaacttggatgatatcttagggatcggctgacatatgtctgccggacatgttcaggctttctatttacgttttcatatcaaggaaataatattgttttacgttttttcgacatggctgattagtttagtagaatgttgagaattagtccgtgcagaaagatttggaacacatgaatgttcttacgttttcaactgtatatatctctgttgtatggattggtaaatgttctcacctctaacttctattgaaaagcattgcaagttgttccaaaatatgtgatcaaaccatttcgttcatgtgtttgccatatttttgctttaggtgcttttgagcttataaccgatgagaaaaaggcgggggcatgtctatggattaccaaacgcaggggtttggagtattggccaactccaatggaagagacaaagtacttggtgggttcaagttccaggaaaagaccttcttttaaagtttctacaaaaatagaatttcctcaaagcttcgagaaaatgtaagtttatatgggactatgtgtgacaatttttataggcatttgaattttgtatttctgtctcctcttaaactttacatactgctggcttattctctccttcaggattgtacacaccttgtctcacaaattccgcagtgctacccgcatagtccgtgcaccactacaattacccattggaccacaccaagttctcctgaaaatcatctatgctggtgttaacgcaagtgatgtaagatcatattatcgtctattgtgtgcaaaacgttttgttgtctcgcttatcgttgtacatttaactgtttttagattccctatcattatcagttattaggtaatacacccttgttgtgaaatgtactttttaattgatccttattttgtaccatgaacaggtaaacttcagctcaggtcgttactttactggtggctccccgaagcttccctttgatgctggatttgaggtatattttgttcaatttcaacttcaacagcttttgttcaattctaaatcgcttcaatgttttccagggagttggactaattgcagcagtgggagaatctgttaagaatttggaagttgggactccagctgctgttatgacgtttggagcatattctgaatacatgatagtatgagaactactaaaccatatgagcaacaagttgacatttttcaaggcttcagtgatcatgtgaacctgtctgttttggatttaggtatcttctaagcatgttcttcctgttccaagaccagatccagaagttgttgccatgcttacctcgggattaactgcattaatcgcccttgaaaaggtcgtgctaacgagtgtcattaactgtctgttttcatcgtttttcatttcagactctcaaattcctcatttttgtatgtattaatagctgtatgatattcttaagttgctagttcaattatctctgacattttctttatcttatgggaattcacaggcaggacaaatgaaatcaggtgaaactgtacttgtgactgctgctgcaggagggactggacaatttgcagtccaggtatatgtcctgaagttgtttaaagtattatccataggatacatatttctgtttcatttgtggaagtatttatgccagttgaaaatagattttaagagattctctatgcagcttgcaaagttatcaggaaataaagtgattgctacttgcgggggatcagagaaggccaagctattgaaagagcttggggtcgatcgagtcatagactacaaatccgagaatataaagacggtaggtcttgtgtagaaacttttattagtatatgtggctaagtgacaattattcatactggtctaatcttcataggtcttgaaaaaggagtttccgaagggtgtaaatatcatctatgaatctgtaggtggtcaaatgtttgacatgtgcttgaatgctcttgctgtttacggacgactcatcgtgattggaatgatctctcaggttccctatcatatcactctcgatacgtcttttatttgataaattaagtccattcacctgttctgttgtatttagcttttgaaactgctagacgtctgattccttttttacagtatcaaggagagaagggatgggaacctgcaaaatatccagggctctgcgagaaaattttagcaaaaagccaaaccgtggtatggggtctacttgacaatgttttttcaactcaaaaccgctaaatctaaaatgttgatctaggaaacgcatattccttaagttgattcaaactaaacaaacaccaatttgtttcaggctggtttctttctggtgcaatatagtcaactgtggaaacaaaatcttgacaagttgttcaatctttacgctctcggaaagctcaaggtaatgcatccttatcgttattttgaatttacgtgcttacattcagttttgttcaccaaattgtttcttcactaactattccaaacaccactttactttctatttttctcactttggcaggttgggattgatcagaaaaagtttataggtctaaatgctgtagcagatgctgttgaatatctgcattcgggtaaaagcaccggaaaggttagaaatagttttcttactaatcgaaaagtttgaataagaaccacgctcatttcctttggaacattaggactagaatctgtaattcttttacgtggagcgtataaaattggatgctatctgattcttgacgtgttaaagtgtgtacatttacagcttggtgttaaccagaatctattgtttattcaaaatttgtttttgcgtaggttgtcgtttgcattgatcccgcatttgagcagaaaacgtcgagactgtaaacaaaacatccacaaagcaaaatccagtttgggagtctatacatgagtggagcttttcctttcttcttcttcttcttctttggaggcaaaaaagggcttagtaagtagagagttctttaagcttatgtttacaataaacagaggagaaagttttctaaaatctaaagttaaacgtcaaagtaacatttacaccatcacaaaaataaaagaaacaactgaataataggttgcatcgtttaagcatcaaatattattgtgtatttctttgacaattaactaactaataacgcattatatgattttaatgtggaaaatgggtttttctttttattatttgtttattgttgccataaatttctgaagtcaggtataaaacaataacatgtaattttgtttacataaaaaaataaaaacaagtaaagtatataataaaagggtagtgtgatgtattaagagtttattgcaaataaggcatttgtcttagatatatattttattttaggcagatttaggcacttctttcctggggaaagtcgtttttacccttacagagagatgatgttgctctttctttgttgatgaacttttacgttttacattagaaatcaaaaatacttgcgaccaacaccaacaactttggagtcattgattacagagtgatgtcagcgacgattagaaattcagacgactaacaattggtcctcatgagatgtgaatgcgatctagatttttaacatcccacattttgagatctggaaaaaaaaaacaagaaacaaaaaagtcccacgatttggtattacgatttgcacgtttttttgttcagtgatttttgtgcaggttaaggaactcaagaagtgattgatactttgttgattgctcaattgatgttcataatcatgtctacaagtacattgatttttgttcatgttaatggtgtttgatgataatgaggatggttgtagtgttgtgttattgtgtgtatgtaagaattgtagactgtatatttgacggtttgggtttacaagtctaattctagggtatagcgtttaccattgacgccgttcgttacccctcgccgtcaaagccgtgaaccaccaccaaatctttgtgctaccgtcaaagcttcacgcctaccgtcaaagctgcaagtccactatctaagccatatatctctgaatgtcaaaagaaacttaaaattgaatcagagatggagatgcattttttagaagataaacgcattcttttcacctcattctcaactccagctcatagtttaagggcaaaaatgtccgtaacaataaaaattggagttattatatgcttttactgtttagagtgcctgttttgaaagaaatgttttcaaaatgcttgtttggaatataagctcatgtattaaactctatataaatgtttgaatgatgtactattggaaagaatttttcaaatgtgtttttccttgaaatagaatcctaaactagaagaatatttgatactctaaaaaggactagacaaaaaagatttggtcctttgaactttgaagataagttgtcaatatctgcccatattagctgttgtaacttgcaagtaatcaaaaccttacctaaagcatccatttgcttttctttttgtcattattcctttaattttacataccaaacaaaaaataaattaaaaaggaaaaaaaaaaaaaaaaaaccagaaaaaagctacgtggccactcttattgctacgcgtcgatgcaaagaacaattattttcatttaaatagcaattcactactaataattaaaaaggctcactccaactccaactccaactccaactaacaacactcttcttcattcttcttcaatcaatggaatctgaaatcgcctccgagtttcttcctttctgccggatttacaaagacggtcgtgtagaacgactcatcggcaccgataccatcccggcctctctagatccaacatacgacgtcgtttcaaaagacgttatatactcaccggagaataacctctccgttcgtctcttcctccctcacaaatcaacaaaactcaccgccggtaacaagctccctctacttatctacatccacggcggagcttggatcatcgagtcacctttctccccactctaccacaattacctcactgaagtagtcaaatccgctaactgcctcgctgtctctgttcagtatcgccgtgcaccggaagatcctgttccggcggcttatgaagatgtatggtccgcgattcagtggatttttgctcattctaatggatctggtcctgtagattggattaacaaacacgccgatttcggtaaagttttcctcggcggagatagcgcaggcggtaacatatcgcatcacatggcgatgaaagctggtaaagagaagaagctagatctcaaaatcaaaggtattgctgttgttcatccagctttctggggaacagatccggttgatgaatacgatgtgcaagataaagaaacgagaagcggaatcgcggaaatttgggagaagattgcgagtccgaatagtgttaatgggacggatgatccgttgtttaatgtaaacggatccgggtcggatttttctgggttgggatgtgataaggttttggttgcggtagctgggaaagatgtgtttgttaggcaaggattggcttatgcggcgaagctggagaagtgtgagtgggaaggtactgttgaggtggttgaggaagaaggtgaggaccatgtgtttcatttgcagaatcctaaatctgataaggctttgaaattcttgaagaagtttgtcgagtttattattggttgaaacttgaaagaatgttttttgtgtaaatgttcttcatgatcatgtaatcttgtttttaagaaataaaatacatgaatttcagactgtgtgagagttatatgaacctgttaaatgtgtgttattattttcttcaacatgagaaaaaaatatgtgtaaaatattaatttgtttttttttgtattcaaattcttattagatttttatcttgtcggtcggtttatctatcttcataaaaatccttatccaaaaaagtgcaacctctttcgccgtagaaaatattccgggaaccatgctccgaagaatcacttgttcttcttcacttgcttcaccctctctcttcctccgcttctttcgccaactccctcgctcttactcctcaccgaccaccatcgccgtctcaggccgcaacattcgccgactatcaactccaaccactcttcgttgcatttgttcacactcttcatctgaaatcatctccgagcatcctccgttcgtcagggtttacaaagacggtcgtatcgaacgtctttccggcaccgaaacagtcccggcttctctaaacccacgaaacgacgtcgtttcaaaagacgttgtctactcaccggggcataacctctccgttcgtctctttctccctcacaaatcaacacaactcgccgccggtaacaaactccctctacttatctacttccacggcggagcttggataaacgaatcccctttctccccaatctaccacaatttcctcacggaggtagttaaatccgctaactgcctcgccgtctcggttcaataccgccgtgcaccggaagatccggttccggctgcctatgaagatacatggtctgctattcaatggattttctcacattcctgtggatctggtgaagaagattggattaacaaatacgctgatttcgaaagagtttttctcgccggagatagtgccggtggtaatatatctcatcacatggctatgagagctggtaaagagaagcttaagcctagaatcaaagggactgtgattgtgcatccagcgatttgggggaaagatccggtcgatgagcacgatgtgcaagatagagagatcagagacggagttgcagaagtttgggagaaaattgtgagtccgaatagtgttgatggagcggatgatccgtggtttaatgtggttggatccgggtcgaatttttccgggatgggatgtgacaaggttttggttgaggtggctgggaaagatgtgttttggcggcaaggattagcttacgcggcgaagctaaagaagagtgggtggaaaggagaggtggaggtgattgaggaagaagatgaagagcattgcttccatctcttaaatccaagttctgaaaatgctcccagcttcatgaagagatttgtggagtttatcactggttaacattgttctttgtgtgacacgaataaattttgatgtaacctttgaatttgatttggttctctatataattatggttaaggaattaaatacaggaatgactcggttgtgactatatgagatttgtggtctaatattttattttattttttgttgctgacaaatagtaacacaatttagtttcaaatacgttttatgcatatacatgtatcataacaaacctcaaattgtcattgaattgggttcaaaggaatagatgtacagtttgacaaaaaaaaaaagaaaaggaatagatgtacaatgttattgatctaatttgtggctattagttattacaggctcagaatcaagaaggtaacgactggtgcatgcatatgtatacaagtactcacaagatggattgaggtcgggttattgtctggatacatttgtaataagagtttttggttatacaccatcgggtccacctctagtctgattaatatccaaatatggaaagcaatattggttaagcaacttgtgattttatcattttgctaaaaataactaatgatttgttagcaaaagtaacttatgatcatatcaaatttaaccaaaccagttcatatcaagctgtgtacttgtcagggtttgattggatgaatcagtgtatactcatacatatagtaaactcacatacatattactctgtttctgttcttcactctcttttccaaagaagatggaatctgatctaaccacagagcatcatctaccattcatccgaattcataagaacggccgagtcgagcggcttagcggcaacgacatcaaaccaacgtctttaaacccacaaaacgatgtcgtttcgaaagacgtcatgtactcatcggaccacaacctctccgtccgtatgtttctccccaacaaatctagaaaactcgacaccgccggtaacaaaatacctctactcatctactttcacggcggagcttacatcatacaatctcctttctctccggtttaccataactacctcacggaggttgttataaccgctaactgcctagccgtgtcggttcagtaccgtcttgcgccagagcatccggttccggcggcttacgacgattcatggtctgcgattcagtggatcttttctcattctgatgattggattaatgaatacgctgatttcgacagagtttttatcgccggagatagtgccggagccaatatatcgcatcacatgggaataagagctggtaaggagaagcttagccctacaatcaaagggattgttatggtgcatccaggtttttgggggaaagaaccgatcgacgaacacgatgtacaagacggagaagtcagaaacaagatcgcatatatttgggaaaatatcgttagcccgaatagtgttgatggagtgaatgatccgtggtttaatgttgttggatccggatcggatgtttccgagatgggatgtgaaaaggttttggttgcggttgccggaaaagatgtgttttggcggcaaggattggcttatgcggcgaagctggagaagagtcagtggaaaggaagtgttgaggtgattgaggaagaagaggaaggacactgcttccatctccataaccataattctcaaaatgcttcgaaattgatgcagaagtttttggagtttatcataagttgaatcttgatgctcaagtatggtattagatgacataatccttttatataatcatattgttaactttaataataatttatgattttaatcgtcaaatttcggagagttgaacatacaaataacttatgattttaatctctaattgctgtgaatttgtgtatcaaactcctgtatattcgataaatcattcgtataagattgttcggccatatcaataaccggttaggtccatacacatagatttcgaaatttgcacctccggtttaaattttcgaaccgaaccgctttaaaactcctcgcggtcggattaaactattcgcatccttaagcacagtctttgccggagaaaatattccggtagccatgctccggtcattaacttgttcctcgaccattacttcgacctctctcttcttccgctctttccgccagctccctcgctcttacttgtctccctcatcgtcaacgaccgtcgtcggtgcctccggccgcaacattcgccggctttctactctagaagctgctgggagacggctatttctacgacgaggcttgaaactactctccgccgcgagtcgtggtctcaatggacagttctctcgcttatctattcgcgccgtcgctacacaatccgcaccttcttcttatcccggtgagataatcaaactctttagctggaattgaatctgtactctttctctgtaaaatttcaaatgtttctattttccgagtagtttctagattcagagtgtttctcgttggtgaaatttgtgtttagttgatgttactttactccacaaacactctcttatagagaaatttccttgggcttttgatcaaattgacactatacctgcgttaggataaaatggaacattttcttctcatatttgatttatgtttttggttaaatagtgttctgatgagagtcaaatgtaggtcaagatgaggctgagaagcttggatttgagaaagtctctgaagagtttatctcagagtgtaaatctaaggctgttctcttcaaacacaagaaaactggttgcgaggtgatgtctgtttctaacgatgatgagaacaaggtgtttggcattgttttcaggactcctccgtaagtgtgttctagaacacatgaatctgtcctactagtttatctttagtataggtgacttggaaatttatgttcatctcggtgatttcttaacggtttgtaagaaatttgtggtatatgaggcttcgttcttggattatagtcgagtgagtgaaattgtagcatatcaaggtcaaaaattagccaatgttgaatagttttgcactttcagttggaataggtaccacgagctagcgaaaattgtaagtggaagtggttgacagtggtttgataaaagtttggttcttgatgcaggaaggattccactggcattcctcacatactggaacatagcgtattatgtgggtcaagaaagtacccgatgaaagaaccatttgtcgaattattaaagggaagtttgcatactttcctaaacgcattcacatatcctgataggacttgttacccagttgcttccacaaataaaaaggtaataatatataaatactcttttcttccccaaccactgtcatatattcaagtttggtctgatcacatttcatcactatctatgctaggatttctacaatcttgtcgatgtatacttggacgctgtattcttccccaagtgtgtggatgatgttcacacttttcagcaggagggttggcattatgagcttaacgatccttcagaggacatatcttacaaaggttctatttattacatatgcctagtttaaaagcttgtttgtttttatctttccgtttgttgaacctctaatctattaacttactctccctgtctcttttttgatgtttcacatatcaggcgttgtttttaatgagatgaaaggtgtctattcacagcctgataatatactagggcgggttactcaacaggcaagttttgattgttccttaattttcttgaattattcgtccacaatctatttctaagaatgaatttctgtaaatgttttgagtggatgtgcagtgtctaaaaatttagctttgttaatttttgatgttttatagcttatctgattaaatgtgtgtgtgtgtgtgtgtgtgtatagagatatttatctttgcatgtacgcgtctgcatttaatagtttgttggtttcgtattaataattgaagtttctcacaaaacaatacttcaacatctgctcctgaagtctttgttagataatctgctttcattattctttggtacagtgtggtgcttatggaacacacttgttttctcttctattttcttttaataggcattatgtccagaaaatacatacggtgttgacagtggaggtgatccaaaagatatccccaagcttacgttcgagaaatttaaggtttgttaagtacgtcatgtgatataattaaacgttgaaataatatgatattatcttgcgacaaaagcgtaatactctgtatgttatgatctccgatgcatatttattgttcttcatgtgaaaaattccaggagttccaccgtcagtattatcaccctagcaatgccaggatatggttctatggagatgacgatccagttcaccgccttcgcgtcttgagtggtaaagagccatatcttaaattgtactttctgttggggcatttccttttcttgatctatgttcgccattatgttattgttttacagattttgtctctattttactaatttgtgcagaatacttggacatgtttgatgcaagtccagctcgagatagttcaaaggttgaaccacaaaagcttttctctagacctcgtaggattgttgaaaaataccctgctggtgaagatggtgaccttaagaagaagcatatggtgtgccttaactggcttctctctgacaagccactggacttacaaactcaactcgcacttgggtttttggatcatctaatgcttgggactcctgcctccccattgagaaaaatcttattggaaagcggtttaggagaagctcttgttaatagtgggatggaagatgaacttctccagccccaattcagtataggtttgaaaggtgtttccgatgataatgtccaaaaagttgaagagttggtcatgaatactctgagaaagttggcagatgaggggtttgacactgatgctgttgaagcatccatgaataccattgagttttctctgagagaaaacaatacagggtcgtcccctcgtggtttatcacttatgcttcaatcaattgtgagtttatctgcctttttctttggtttgtcttatctaatatatttgtatagtttcttattttagtgttggatgtttaggcgaaatggatatacgacatggatccttttgagccattaaagtatgaggaaccattgaagtccctgaaagctagaatagctgagaaaggatccaagtctgtcttttctccgctgatagaggagtatattttgaacaaccctcattgtgttactatagagatgcaggtattttttgtctccgagtttctcattgctgtctaatgtttctataatcttatgcccaaaacacgtttgtcagcctgatccagaaaaagcttctctagaggaagcggaggagaaaagtattctagaaaaagttaaagcaagtatgacagaagaggatcttacagaactagcgcgtgccacagaggagttgagattgaagcaagagactcctgaccctcctgacgcactgaaatgcgttccaagtttaaatttgagtgacattccaaaagaacctatatatgttcccactgaggtgatgattatattagctctctgctgttgttggattccttttaatttctcagcttgatgctgatatggtgctttataggttggagatattaatggcgtgaaggtgttgcggaatgatctctttacaaataatatactctacactgaagtagtctttgatatgggctcagtaaagcatgagcttcttcaactgatacccctcttctggtaacttgttgacttctacatctgatgatttaaccgtaagactttatattctgcttttggttattcacctaatttttccagaaatgcaaatggtgaaaatatttaatgaagaatactgctacaaaaaaattccaagcattccctgttctcctgattgaatctctaaccaaatcacaatttcggatgtctgacgtagttttaagcatttagaataacatatagcttggtttttgtccgagggagtgtccatgtctattttactattcttgacttttacttaagtgttctcaacaacactcagttgaaatgctatgtcaaaaggcagctttcaagcctcctgctatagtgtcatgatctgttatactatttcttagttgcattttagttatagcagtatcaaggtcgatttccagttacatactcttactaacatttgcttccaatttcactgtcaattttcttagtagcttcattacacttttctcttgtctcacactagacattcgcatgctatgttcttaatcttccgtagatttgaccaacgattgtttccagttggggtttattactgagtatcctattcataatcttttccgtcagtataagccagtgggataccctatgctaaattcgttttaacttttaactcctatataatttctgttttgacagtcaatcattactagagatgggcacgcaagatttgacttttgtacaacttaatcagttaattggaagaaagacaggagggatatcagtttatccccttacatcctctgtgtatggtagggatgatccatgtagcaaaatcattgtgcgtggaaaatccatggttggacgcgctgaagaccttttcaatttggtaatttgctttaacttatcacatttagctggagataacatacgttgggatagttaatttagagttttctagctgacagatcaggttctgccttggttctcaagatgtagagtgcaagtttaaactttttgcctcatgtcctctaactatagccttgtggatagctcttctgtccatcggtttatcagaaagcaaaacctgtttctttcatttgtgtctgcgtctatgaagtatctcttctgtctcctgatctcttccctcttaacgcagaaatgctcactttttacctctccctatgctcatgtcatttgctgagcagtatcttatactatatttgtgtgttcaagttagagtacagaggtacactagccaatcgttcgctatttgaaaactgattctgttaattttagagctgaattttagtatgagcatattcaagaaataatcctaactttcgagtttaaagtacaaaaaatggagacatagaaattagctgtagtttgagattcttaaaattctagttaatttcctatagaagttgtagtttgattcttatgtttcattcacttttgccttgctgcagatgaactgtgtgctgcaagaggttcgatttaccgatcaacagcggtttaaacaattcgtttctcagagtagagcacgaatggaggtatgcagttccttcttccttttgcattcttaatagaaaacggtggtagtaatataacaccaactcgtattcattttagaaccgattgaggggaagtggtcaaggaattgctgctgcgaggatggatgcaatgttgaacgttgctggatggatgtctgaacagatgggtggtctcaggttggaacttgatcactctttctttcattgttagtttttaccatttgttttgacctcttgatttgattgcatctgtgggagaagaaacttaattcatattcttagtttgatcttatacttatagagcctaatagagttttgctttgatctttgttgtagttaccttgaatttctacacactcttgaacagaaggtggatcaagactgggaaggaatttcatcctcacttgaggaaatcagaagatctttcctttccaggaatggttgcatagttaatatgactgctgatgggaagtccctcacaaacacggaaaaatatgttggaaaatttcttgatttactccctgaaaatccgtctggtgaactcgtcacttgggatgctcgacttcctttgagaaatgaagctatagtaataccaacccaggtaaataaaatgaaaacccttctatatattttgtgtcctttggcgtgtatttctcttcacccgtcttctacttactccacaattctattcttgcctttttgacaggtgaactatgtgggaaaagcgggaaatatatacagcagtggctacaaacttgatgggagttcatatgttatatcaaagcatattagtaacacatggttatgggatcgtgttcgtgtaagtggtggtgcatatggaggttcctgtgattttgattcacattcgggtaaactgtttttcttttccattttgattttgatctgacagagtcttccccaagttgcaaattctgcgtcagacctgacctttggattttctcttgcacaggagtattttcgttcttatcttaccgtgatcccaacctattaaagactctagacatatatgatggaactggggatttcttacgtggcctcgatgtcgatgaagacacccttaccaaagcaattattgggacaattggcgatgtcgattcataccaactccctgatgccaaaggttataccaggtatgatgtttatttatgggttcttctctggtctttgttggctttttttcaaggaatgtaatgaatttcaatctaatttcccatctctatcaacagtttgttgaggcatttacttaatgtaaccgacgaagagaggcaaataaggcgtgaagagatattatctacaaggttaacagcattctctcatttttgctttagcgtatatacaaatcaatttatacaactttttcactttccacataatggtatgccgcggatatcctgtggggatttatgaaatccttggggacaatgttgtgatctgagttttgtagtgttaggagtttaacgacttctttgaatattaccaaatagccagttgcaattcttcgacatagttattatcaaacagataagaaaagtaacttccattttatcctttttcagtttgaaggacttcaaggaattcgcagaggcaatagactctgttagtgataaaggcgttgcagtggccgtggcatcacaagaagacattgatgcagcaaacagagaacgctcaaattttttcgaggtgaagaaagcagctctctgagtctgagaccctcttagaaagtagcttgtcacaatgaggaatgactcttcttaggttcacggtacgacgcatcaaatctctaagctcgtacttatttgtgttttacttcactgtgttttgtatagttatatatgccaacatcatgacttatcacagttgaaatttagcatttttacctgaaaacacaggctttagctactgttgcatttgagttgttacttttttggacaatttttctttcgttttagcctttgctctttaagaactaagaatcctagttctatttatattccattatcgtatcaagataagctctcgaggattttcctgtaccttttaggttataaaaccagtttcgtttgattcacattttgttgaaaatgatgagtcaaaatagacattatattcatcattggctgggatcggatcgaacagtgcctgttcttgttaaaacaaatggctctcagtcatacaaaagatgcatctattattcatcatgtgtcgtgatcttgttattgtcatactatctaatgtgactactcatgcttcatttgtttttgtttgtgtttttgaagtaggtcgtaggtcttaaacatttccaagtgaaattgaaacgcttattcttttaggacattggcatcaagatctctatgttacttttataagtgaattagtctttaaagttactttttattaacattgattcataaagataacttttgtaaattagcccataaacaaagatacttgtattgatgaatcttcttcgtctcatccttttaccattatccttgaaaattctgattacatcattattatggatgaaaattaacgaagagtcttcttttttttcttgtgataaattttaaaattattgaagaagcagaatcggacaattgaagcctagattattttttatttattttttgcaaaatgaagcctagattctaatatttcatattttcgatattgtacatgtgtaactttaaaaaaaaaaaaaaaaaaatcccaagtaaatgcttgttagcacaattattatgtaacggtcaattattgctcattatttcactgccaaaaaataacgaaaatggtcccattttattagaaggaaataaacatgttgtatgtgtaaaattcttaacccatttttggacatgtacagattccatgtaaaagctggattttaagttggttttttgttgttgtcatttaataagtactatttaattgattgtatttatagttctgtctccatgtgaagctgctcataagaaagtgaatgctttagactctaatctatgtgcctagttatatccttaagaagttgatatttagagcttatgatagaaattatgaatcagcaaccatcagaattattttttttgttttgacaaatgtatttacgtgtaaaagaatataagtttaagaaatctatagtagaaagtagattaattaacaaaaattactgtcacaactcacatttctacagcttataggacgacgttttagttttgggttgctttaaaaggaagctaaaaacggcaaaaaagacgcgtcgtttagaatcccgacggcgtctacgctccgtaacgacgccgttacctgcttccccgtgaacgggactcagtttaaaggaccccactcaaaaccggcacaacaacggcccatccgctataggcaaggcccaataattaaatctcagccgttgaattaatcaacggctctagatccttcatcttcctctcccccaaatacccaaaacccttcctctgtttttattaaccagagaaaccccaactttttcataaactctctccagagaaaactataatgagcttgagagaaatgagcgaaacaaaacccaagagagattctgagtacgaaggatcaaacatcaagaggatgagactcgatgatgatgatgacgttttacgctcaccgacgagaactctttcttcttcttcctcttcttctctggcttactcggtttcagattccggaggtttctgctccgtcgcgttatctgaagaagaagacgatcatctaagctcaagcatcagctctggttgttccagcagcgaaactaacgaaatcgctactcgtcttccattttcagatctggaggtgaaatttcgaaactcgagattacaaattttgaaatttctctgtttcacaataaatgctctctgagcaagatctgattacgtttttttggattaattaattttgtttccgttttcaggctcatgaaatctccgaaaccgaaatctcaacgttactcaccaacaatttcaggttaattactaaaaaagacgtttcaaagatttttcaatttcttcattgtttcgtctataaattcataatttttggaatttcacaggaaacagggaatttcatcaagcgagaatctgggagaaacagcagaaatggactcggcgacgacggagatgagagatcagagaaagacggagaagaagaagaagatggaaaaatcaccgacgcaggcagagcttgatgactttttctcggcggcggagagatacgaacagaaacgattcacagaaaagtgagtcttttttagacccacacacacgcgcatgatagcagagatccttaacttgcagttgtttaaaacatgtataggtacaactacgacatcgtcaatgatacgccgcttgaaggtcggtaccagtgggttagtctgaaaccttagaagccatggaagaacaaaaaaaaaaagaaaaagaagaagagacagtgctaaagttacacgtcctagtactgtgatttttgtcacagacagaagaatttttagagacatttcattgtacagtttttatctaattttaatttcatcattatcttcatctgttcttcgtaccaagagtttttttttttaactagaagtgttaacatatatttgagtttaattctctctgtctcggtgatattgttggattgttcaacaaaaaaagtggggttacaacaattaaaaattggaattattgtgtcagtaaagtttcactaatttttgtcagttttgttgtagtgaatttggtgttgtgcacattattagtattttcatgaaattgggaggatttacgtatttatgaatttggaaaactatttattgttttgattctcaccttggatgtttatagaaattgtttttttctcttctttttgttgcttgtactttatatgctattttataacttttttatttttcttgtttcgacaattgttttagtgaaacaataatggtaataggaagaagaaaataaatatagattttaaggaaaatgggtaaaattagaaaaccataacggtatatatatatcatacacttggtatgtactttctctatagttcgaatgaatattcctctaatttccttgaaataatttattttattattttatcaagaaaactttatgaacaaagttgaatgtttatttatcaaaaaaaaagaagcaaatttgaaagctttctcgatgattgacgtttttttttctttctgaaatttaattttcaaattataaatgagctttacggcaaaaaattaaaactttaaatggcaagaatacaaaaaaggaagagagagaagagaatagagaggatctcatcattacctgattccgttgggattatattccctttttttaattttcttttcttattttaatttcctacagcaggcaaaggcgcgtgactccacgtgctttctgttattttagtttttcttttcatttattcttttttcctttcccttatttatgtactttttttgcgaactgactgttattatattttacttaacaacacgaatttaaatttgaaaagaattgaagaaaataaaaatagtgcgattaaggaaaaaaactaaataataatgtacgtcataattaggttacctcttccaacaagccacgtgacgagggaagggtattttaggcattgtactcacaaagtagtgaaacatataatgttgtgacttggtgaccaggcaaatgtaagttttgctttctattctaactgttcctatcctgccaggtcaaatttttcacaatttttgtttaaaaaataacgaagaacaataaaactctagtgaatatatatatattagttagcaagtattatttcattaaaaacggatgttatttttattagttcgaatccttttccatattctactttcatgtctattttttcttttttcaaaaacattttaacttcagaaaaagtcatctttaacattatctctttggtcagcggaagtaatatgggatgtagaggaaagaatgggtaaaagatgaccgagtctttagttatgtaaaaattatgatttttgttttttgttgaagagagagcttctttatttgtgatcatcatttatcatttttaaaaagtttaagaacaaatggatatatatatatatatataagtactatatattgtgcttactctatatttcattgggtggtatagtatttgttttgtttcgagtaaggattgagaaaatgtacacaaagttcaaaatgggtgaaaacaaattactagcaataaatatgagaagtaaaagtgggggttaatattacaagactcactgcatgcacatgacttggatcttgtgaaactttctttcccatttcataaacatcagatccaatgcctacctataggctatagaatgttgaacctttcccactcacacaagttacccctacctacacgtgtgactggttggttatttatcgagttcattggcaatgttgtaaattatgctgagttatttacctggcttattttttattcttcaaatagcgtagcatttagtgtgttttaaataagtagtgtgttattttactcataaaacattgttaaaaataatattagctatttaaagtatacattatttaaatcaaaagtttggttgacaaaaagaaagaaggagaaagtacaagtacactatcagtatcagaattaaccaattatctaaatttgcaataaaaaaacataaatttagtaaaaggccgaaaactgtgagatatatgaacccaatacgaaggagaataactgtattgggtttagaggatttaatgggcttttataaatgcagtaataactgtattgggttttaatgggcttttataaacgcagtaatggggcatgattttataactcaaaaacctatctcataaacaccattacgatggcgctcgacggcgagaacagagacggtggctccgcctccgtgagagtcctcaagcattgcctcgaagatgtagactcaataagctctttgcctgatgtgatcctccaagaaaacctctccttaattccgaccaaattcgccataagaacatcggtcttgtccaaacgatggaggcatgtttggtccgaaacaccttccctcgacttcgatgattgctataaactagatgttgattttatagacaaaaccctagctctctacagggctcgcaagattatgacttttgacctctggatcaccaacggaatcaatcttccttacattgatggatggatcaagttcgccatgtcccgaaacgtggagaatctgtttctgagtttcgattttcggttatatgatgttcctgattacttgtacatcaattcctctgtcaagcaactcgtccttgggacagaatcttctgaattgaatcccagatgctctgtttcttggagttccctcacgaagctttctttatttctctgatgagtccattgctaagattctttctggttgtccgattatcgaaagcttaacattgcatttttgtgatcaactgatggttcttgatctcaccaaatcaccgagtttgaaaatattggaaatccatggtagcatttggggttcggggccaaagcacattgtggcaccgcatatccattctctcacattgaaaacctctcaattctttatctacttttgttgatatctcgtctttaaccgaagctaaagtagacatttgcttttgctcacttaaagagataaaggctaatttccttctcgacacggtgctcaagtgtctttacaagttgcagaatgtagacaagcttacctttggggcaaactttcttaaggtatgtttttcatgttttcaagtgtcatttttcttattgagatttgtttcaaaaaaaaactaattgtctgtactatttgtaagattttatctctggccgagggccgcggtcttccttttccgatgttcaaggctaaagctttgactctcgagacaacgatctctaaatacgttattcctggtatattaagagtgctacaaaattcacctgaactaaagaagctaaccctacacacaatggatcgcgaggctagaactatgtcctttcactttgagtttgtagaatctgagatattgacaatctgtttttacattaacgaaattcttttttgttctagtacagggtgagtatgatcccacgtacttgcgttgcatgaagctggatcattgctcgatctttgcaaagatttcccgtcggaatgtagagtcaaagcatgtggcttcgttcatggaacttatgattaaaaccacaaagaaattagagaagatggtcgtaaggttggaaagttatcttgatggaagaggtttcgaagaattgcttgagatggttccaatgctttctcaaaacaacaatgtctccattgtgcttagctcaaccaagccgagacagagtctttagtcttgaattttattggatattttacataatctcattttaaaacaatagtaggtaaaaacattcaggacatttcttggaaaaactttttttgtttgaattattttcttaaagttaattttaaacttaatatgaggaagaggtagttaagtaatattctagttattaatcctaatccatcaaatattaattcataaggtttgttttcaagtttcaacagatagtttgatatagcattaattatcgcttaacaatgaatgccattacaatatttttgataatcttattttgagtaagagtgtctctcaaattttatttgtttaatattctatctcattcttcaccttagttcctcaagacatgaaacttttcatagattttatgaaatatcaatgatattattttttacttaaaatctaacatttacctccggtgtaaatggttatccattagatgaatgttatgaaaataaattggaggaaaaaatagagatgaaaatgctatagagtggatgaaaacttttcttaaatttctcttctttgttcatcttattaaagatgaaagagattaatactaacagattttaaactttcaatccaaatggtaacattttagatgagtctttttttcatccagttttttcctcgtaatatgtctacaatttcaagaaagcttatcaaacgtttagaatttggcaataatataatttaataattattcctaaacttttcataacatttcttaaatgttgtttacagccaacaaagagtaccttttaaaggtgtcttatgttcatgtttcgggtagattgtatcccaacaaagcttcaaaattgatccgacaaagatggcatcaatttgtttctagccaactctccaaactatcacaaaaatttatagttttcacatctttttaccattgattccttttgcatttaaggatcattataacaccaatcacaaattgttttaatgaaaaaaacagtttatgtcacaagttcccctcttcatagaccacaatgcattgaaacatatggattcactagctaaaagtctcatcatcatatgtctctctattggtttcaatatccatttataatcccaagaaatttatttacccgatttgggaacttaaatcattcatcaactgtcaaaagttgatgtcaacccctaaaaatacggtcgaatcagaaccgtcggatctaaaagtacataacatggcttcacttacgtaactgggccccacgttcccaccacttctctctcagacctaaaagcgaaaccaaagaacaaaaaaaaaaaaaagccttaaaccctccgaatctacacaacacaacactactctcttctctctctctccgcctccatattatcctccaaagaaaccataaaccaaatctaatcctctctctctcggtctcctccattacctaaacaaaccctttccaacacatacatatcgagagagagagagaccgaagtttccgagtctcgtaaccagatcggatccgaaagttccatactttaaaaagatgcagacaccaaacaacaacggttcaacagattcagtgttaccaccaacatcagccggaacaacaccaccaccaccgttgcagcaatcaacaccaccaccgcagcagcaacaacaacaacagtggcaacaacaacaacaatggatggctgcgatgcagcaataccctgcagctgctatggctatgatgcaacaacaacagatgatgatgtatcctcaccctcaatacgctccttacaatcaagctgcttatcaacagcatcctcagtttcaatacgctgcttatcaacagcagcagcagcaacatcaccagagtcagcagcagccacgcggtggatctggtggtgatgatgtcaagactctttgggttggtgatcttcttcattggatggatgagacttatctccatacctgtttctctcacaccaatgaggtatctctttcttcttaattttttcttattgttgtattgattcttgatttgatgatatttgtaattcagatctttacttgttgttgtttcaattaagatgtttttagtgagtggaatcttttgttttttgtgttctgacatggaaagtgattgatgtatcactagtgtatagatccgtgacttttttttggttattggaaaagattcgttactgtgaattcaatgtaaatttggcaagttttgaactttttgattgggtttgagatctaaattgtgtagaagccaaaatgtttgacatttagggtaatggagaactatgttgacctgaaaaaggacatacttttaaagttcatttcataaggcaagaaaagtacattgccacgtttagagaacctttctggttataggaacaaaaagaactccaaacattgtcacaagatctgttctgttttatcataaatttgtgtttttattttcccttttagcttattctttcttgttttgttgttttgtgatgtgtaggtttcttctgtgaaagttatacgcaacaagcaaacttgtcaatctgaaggatatgggtttgttgagtttctttcacgttcagcagctgaggaagctcttcagagctttagcggtgttacaatgccgaacgcggaacagcctttccgtttaaactgggcatctttcagtactggtgagaaaagagcatcagagaatggtcctgacctatccatatttgttggagatttggctccagatgtgagtgatgctgtcttgcttgagacttttgctggtagatatccatctgtcaaaggtgctaaagttgtgattgattccaacactgggcgttccaaaggttacgggtttgttaggtttggtgatgagaatgagcgatcaagagctatgacagaaatgaatggtgctttctgttcaagcaggcaaatgcgtgttggtatcgcaaccccgaaaagggctgctgcttacggccaacaaaatggttcacaaggtaagtgatgagataatctttgtgacttaatgtagcattagtttcagtttattatcatttattatgtttttatttccatgttttctctctgttcagtgaatgcaagtggttttattttctgtttatgtcacttttagtaactatgaatatgaattttaaggtttaataacttgtcttgatgcgttaaacatagcatctgaagtgaattgtaatgttttcattggattagctcttacacttgctggtggacatggagggaatggttcaatgtctgatggagaatcaaataactcaacagtgagttctcttttagctattcctctgctaataacagtatacctcactgctcactgtcttttattacattgcagatatttgttggcggtcttgatgctgatgttactgaagaagacctcatgcaacctttttccgattttggggaggttgtttcagtgaagatcccagtagggaaaggatgtggctttgtccaatttgctaacaggtactaaacctgttctgtgcttgtcagctttgtcatccggtactgtggtgcttgttcaatatgatgagcgaatccgtaggggattattttaacagtgaagatgggtaaggtagttgcaatgtgtgacgtgcccttggttttgacaggcaaagtgctgaggaagccatcgggaacttgaacgggacagtcattgggaagaacactgtccgcctttcatggggaagaagccccaacaaacaggtacaagaaaattttagttggatttgtgtttttaaacattatatgcatttctattggtatggtcctatggtccaggtcaaacttagctttagagttcttttgggtctttatatttctgtcttcatggggtggataaagttatagaaatccttaaagccaaagtcagtggttgacaatggatagtagtaggtgtattgcgggccataaagacctagtggaatttaccaccttcccacggttttcgttgactatatctattggcaaatctaatgcatatcaccttggcccacttatcatctccctgaattatccaatctctgaaataatagtaatggttctgtgtttcttaggattgagaaaatttacagctattaagattcatgagctagttgaagcatgtactgatgttatcgtttatctttagaggttgtcgaagtttcaatgtttcatgtttgtcttaattctctattagtagttgtaatcagtggacaagctaaagtaatctctacaagaataaccaacttggtagtttttatccgtgatgttctattgaatgttttaatccatttactaatcttgttcaacttttaaatctaaaaatgacagtggagaagtgactctggcaaccaatggaatggaggatattcaagaggtcaaggatacaacaatggatatgccaatcaggactcaaacatgtacgctactgcagcggctgcagtcccgggagcttcttgaaagtgttggtatgtctctatcatcagaaaccctgtgagtcctggacttacgggtattgggataaaaacaaaccgttgggtgatcaaagtgatccatccgatgatagttgttggttcagaggttagctcgcaccatcgaaactaaaacctctagtgtccaaagagggttttgtatcctggatttgaatcttgcttatcttgctgtctcagtctctgtcaaaattttggggtcgtctgatacttgaattttttattttcagttttttttttgagttaatttgtctttgttactgagacttcctcaaagtcagagcttggtccacaataagtaatttcctaaatcgtttggatcatttattagtgtgcactttgcagtgctttgatagttttacttctttagagtagtgtttggtttcgatttattcccatcttaacaagtttatgcataatttcagaaactgattcatgaaagtcaaccaataaactttagaagaatagaccaaaaagaacttaattttctaaactttttttaagacgaacacaaaaaaaaagttgtgcaaagacctcgtaacttcatcaaaatgggtaaaatgtggacttccatcattctgactataaaattgaataggtgtgtacaacaaagaggaaactgatatgactggaacaacagttagaagaacacaagaccaatgctcccagaaataccagagagttttggaataaactgtcatgtaggaataactgaaataaccgccacaatgagatcaatcatcactcttctctgcttagcctctcccttttgcatataggatcaagccaatgatgcatcaaaagggtctattgtaaagaccaagcaatggtttttctctatcttcaactcgtttcctagcagcttctcttgccttcaatgcagctttctcttctgcagatactttcttcggtttctcatcttgcctctttctcttgttgttgccaagatcaacagatgaagccgctcctttcacagctcttttaggatttaaagaagctgtgacaagacggccaggtggtttccccacacttggtccagctcctgaagaagatacaggctttttcacgagaggtactttggttcctgatgatgttttaaccgcagcgtaggcctcgtcttgtgtcacccaatgtcctgtttcattacccgtgtaagcatacacacgacgaaattgtatacaatcatgtttgcaaggaaacaaataaaaaaaactcgatatatattacatacctattgagtcactgtaatagaatccagactgtgaatcatagtgcagaccattggtctggttgtaataatagcctgaagcactgtcgagcatccaatctgccataacaatatggttactacatggtatatgtataaatgaaaaaggctaagaaaaatggcaatcaaaatgatgaaagaacctgagagtgactcaaaagaagcaaccgtttcgctctttcgtgatgattctctatagggttataggcattaaaacttataagtcatttgcaaagatgtgtaatatgacaatcgaagaatcagacgctgcttggtttgttcatacttttggtcaatgaaagcaattcacaaatccaattcacacatactctacgacctcagtaatgttaagtctataacaaacagatccaaagctaagcaacaaccctgaatatagcagctataagtcgaagaacaaatactaatgacatcatagagagagatacttaccggatgtaccatcctctggtgcaccgtttgctttagctacttgctgagcagttgcaatatctttctgatagctacgagttgctttctgaaacaagttgagatataaacaatggaatcagaaataaatacgttagaataagtatcactggcaaaagaaacaagaatgattactcacagcttcgatctgttgaagcagtttttcgtttttcttgagctctttgtctttggctgcactcctctcacgcatatcagtgagcttcttatcaacacattctcggtgacgcttaccaaggtcatggtttctaatacttgttggattgttctgtatccatatcttacagaattcacaccatttgttcccttgacttacccaatactgaaataacacaaaaaacaaactcaagatcaatttcaattacgaaacaagacagaggtttcgtaattcaaagagatttggagagaaaagatgcgaattttgatttacctcagtcatggctgtggatcaaggagatgaagattgaatcgaaaattaaacccagaaaacgaagttaccggaactataagatcaacttttaatcagaatcaagaactaagtgaagaaaaatctcgagagaaagagagagagattagaaaccctaattccttaaactcgaatcccaaactcgagaggagaagcaaaatataaaattgggggagaagaaaatcggtttggtttgttttctaaattctaatttatttccatcactagaaccggttttcactggttacaccgactcagatctcacaaattaaagcacagtaacaaaccggaaataaccaagatttcgctgattccataatcattgggaagaaagagagacaaaaatcaaatctttttggaattttctttttcattttcttgacttcacatagagtatcaaagtatctgtggttactatattattacaacaatcttttttttagaattgctcttgtaagaaacttttcatttgttgtacagtctttgaccaactattacatttccaataccaatccaagatttagagtaaaggttttgacatcttcttttacgatttcgcttaggtcatgtttgttttcgttatcttcaccgggtagttttccccgaggctcgaacagagactccatgtaacagtttaacaaacccgaagaagctaagctttccatcagtgtgtctgatccaatcatgtagaactgaatgtaccggtatagatggtccaacaccaagttcctgcaattcaaaagcatgtcgttttagaggatctgtttttcgatatttttgtatttaagctgaagacagatgctttaacttacagaggcaagttcttcgatgacaatagctcggtttccattcttgtcgaaaagctcataagcatgtcgaatgctctgttcccaacaatcaagcgactcgtgctgatgaacgtttatagcagctgcacaaaactcttcaaaatccattcctctgtattgaagtccatttagctgtaaaaagccagtcaatgaaggatcattaacaccaaattgttaaagcatttatcaaaatccgagagaacacagtcatttaccaaagcaagaaactctgggatccgagattctttcattgcttctgttgcattgcttgcaagtgcctgtttaaacagaaacaaaaaatgcaatacagattagattactacggtgtttctctttttttctcaagaggaaggaatataaaagaagttatagtgtcacaaaccattctaatggtatccattgtgattaggccatctttgtttggtgcgagaagagaaaattgagttttcaggtaaagaatttcatccttgattaacgtcttcgatagcgcctgtgaaaagaaagcacataatagtgagaaagtaatcttcaatgctcttttcgacactttaaaagaatgcctaaaacataccctcaaagcagctttgcgtaatgaagaagatcgcaagtacgccttcatctgcctaaagatcaagatatcgaaagggatattcatgtccgtattataagctcggatccaaggatgcactgaaaaaagtaaataggaactgaatttggtgatttatgactaccaaaagacaggagacataaaactataaagagctgtgaaattaaaaatgactgactcaaggcttgggaggctgacattcttcgccggggatccttaaacaataaccgcttaacaaagtctttagcgtcagaagacaagaagggccaaggaggttcatcgaaactcgggtcagctttaagaacagctctaaaaattccggattcagttcttgcccaaaacggacggctaccacatagtagaatgtatgctatgactccgatgctccacacatccgcttctgttgtatatgatctgtgtagaacttcgggagctacatagtatgcacttcccactatatcgtttagtctctcatctttcaaaaaaaggggcacaaaataccatttttagtttactaaccagaagaaaaagaactggagaaatagtgacatagtaaaatgtgtgatgatgaacctggtctgacaaagtctgataagccaaagtctatcgctttaagctgagaattctcctccttggaagtgtacaagaagttctgatgatgaagcagcgatcagaaaacattctacacataaaagtaaaacataatcttctttccagttcaaaattgtgcctcacctctggtttaaggtctcgatgaacaactccttggaaatgacagaaagctaccacattcagaatttgtataatcactggttttgcgtcattctctgagtatttccctcccctgtagaaaaaaacgatgaatctttttataaaataagaacaatctctggccataagtatcgataactctttagtagcacacagacacacaccttgctagtattctgtcaagaagctcaccaccttcacatagcctgcaaattcaaactacttaaatccaattatgaaacaataggttctttttaccaaattcataactaaaacctaactaaattcaacatcaaacaaggaaatggttaaggttatgataaaataatgatcttactccattgcaatgtagacgtttgcattgtcctcaaatgcatcatagaattgtaccagattcttatgtccagataaagcctgtagaattttcacttcccttctcacatcttctatagcaattgcagttgtcatctgccaaaaaagaatcaaaacacattcaattctatcagctaacactacaatggagagtatgcaatcatcaagatcaagaaactaaactcaagttttgttaccttcgattttgggatgattttgacagcaaccacttgacctttgagctctcctttcttgaacttagcagagcaagtgtacccaaaatgtcctcgtccaatttcttcccctaactctactctactgtgaaactctttagaaaaaccaaatcttttgtcaagccctacttcctcttcctcctcacgctgcggtacctccgtcgttagctgcgtcaccccagataaagcagcttcctttttccctttcctccgccgtagcgccgcccgtatgtgtttcgccggagacggagggtgaaacgcacggcgtaattgacggagaggcgtgctagtcaaactcttgctctctcctcctccgccgacgtcgcggctcttattgcggcggtggcgagcagggctcggcgtgtaaaaggggaagaaaggagaggcctttgcggcggaaggagtaggaattggtgatttaccgggatggtcaggggcaaaatcgtcaatttgaggatagtcattaccgggagcgaaagggttaggtctgccggaggaagtggagggtttggaagtacagcctcccataatctccggcgaaaaaaaggagcttactttatgaggaaaatcacagtaatgccatcgaagttttggcttttagagaagaaagagagagcgagagagatcacatgagaaagagagcgagagagagagagagagaggagcaggggaagtgaaactgttagaattgaattttgaatctgaaaatggtggtagaaagaagaaggaagaagaagacgaagcaagtagatgtgtgcattggttagtaaattagttgcttccggccacgtattaatgaccttaatttattgcagtcttttaaatatatttccgatctgttatgtttgtcattcatgtcccatattttatttttgttatattttttaaatgaggtcattttttcaacggttgtgagatcattttttttttgtacaagtttgtgtaaattgaatttaatgaagtaacagaacctttacaaaatttaaataaagaaaattatagctgctgtaaaaaaaatagagtatgtatatatagttgacagttggtgggtacaattaaggataattaagtacatgtaaccttctagttgtaaaaaatactcctatgttttatcatgaaaattattgaatacatgtctacatatatatttatgtaagaaataattttgtatagatttggaattaaaaaatatcataatgaattgtagtttttagcctagtaattaggttctaaccaatatatactttattttatttatatgcttctagagtttacaagtttctttcgtaaaagttttttgcaaaaaatatgttaccacaaagaagaagaaatatctgttttatttacgaatatctttgatagaaaaaataaatcaaattcattttttttttcttgaaagtttggaacaaacaaaaattgacatactaaataactaagagtcaactaacgacaatccccaaactatgtttgcataatgttttaaaggtgagaagtgtcagaatctgagaaggagtgaattatgtggtgaatctttacgtcgattagacgtcaataatgtggtatgcttgagtctgtgttcgttcattcctttcctgttatattcggtcaactggaagtttggaaagatagttgaagaagaatgtatttgatattatcaaaagaagaagccgttagaaaatgagtgttatgccaatctcaatcgagagagttcaaagaataagttatcttatgtctcgtttagttatgcaaaaagaagacaagtttgagtgtgactctaaccacacatttgatcacttgagctagttcatcgtgaaacaccaaccgtccatgtgttgaaattctctttgaaactccttgcgagaaccagccaactcgactctatggtaccaccaaatcataagattgacaaacttggctccacgtatatatagaaagaggagtaggttggtttgaaattgtgcaaggcatgacatcagagataaacatcttggtcagcatcttcttttgagatcagaataactagcattcaaaattgtcttgacattaaattgaaaattatccaaacgttatatgaaaacacatcaacgagacaatgacgaatgctccaagaggtatgccccaaatttgcggtcgtctcggacatgtaacgttaattaattattacttatcatattagacaaaaaaatctttactgtgtttttactaatgttattaacacgaatattaagaaataaccagctataaaagaagaaaaaataaggttcattaactaattttcacacatatacgtttcgcttaaaactaaacctcgagttgttatatgtatatattttaaataaaaaattaatctcatttgtggaatagataatgtttagtttatttgcatgaattatatgatatttctctattggctgtttgtgttttgcatttaacatgatggtgtacgtaacctaactactattttgtatttagactatatatgtataatagattaaaatagcttatagtatgaagtatttctcattcttccactaactctaatcttgataatttcttgaagtcgttggagaaactttaatggtttaaaatttatgtcttccaatcagtaatcaacaaacacaatacctacaaagttggttgcttccatttggatttgatggatgtatatcatcattcaatgcttatttgcttctttttcgcaaaatttaaataaatgtatatatgttcaaacgtatttttctaattaacaaatatatgcatcaagtctgaatttaaagtggaaatatatgaaatggggtttgcttgtatttgggcttgatggatgtattttcatcatttctctttcaactatgtattttcatcattaagaattaagatcttcttttatttttttaaacaaaaagttagtgtatttaagaattgttgcaatttttaagactttaactatttcgaagatgttttcttttttcacgctaagatgtttgtttgttttgacttttgatagatagtgtatatttatgtagacttagtatattcaatactttaagaaaatgtatgttatatcaacaaaaagaaccatgattttcggaagaagatgtaaaattatgatcattagttaaaccccaatcaagaactaagaatatttatattcgttcaagtgagggagttcgacttaattttggaatataaaaatacaaagacaaatacattttccattacacacaaacgtaacacacatacaagtccaagtatttttgtttatgggatccatatatatatatattgatacataaggacgcttttacaccatatatataaaacatattttattcatagactttggtttatttgattcctcattaaagctagattagctctagatatataatagactgatttggattttgtgaagagtctatatataacttaacctggaaatccacattttcctcgaattactccatcacttccggtcataactccgatattccccattttaaccattgaaactgcgaaatccctcgagaacaagtacggattctcgctgtacgacttcaccaaggcggcagccgtaggatctgtcattagggtttgatcagaatccaacagtcctatgttgttcattaagttcacgtagtaagcattgtcaaacttgactgagctagctgcgtcaagagcagcgagcttagagtctgaggagtccacgttaggacacgtgtcctttagcttagagagaagtgctgaggaagcggctaggtttgggtcaggctggcctgagcccttgaagttgaagagtctatgcttgatcacgaaacattgagcaaatcctatagtatgtgctcctacatacacgtatagtcatatcgtagcataaattcatgtatatacatgcctaatgaagtactttactctatctaagtttgtttataataatcgattttgctacgtttgtttttattattttggttaattaacacaatagtcaatcgatattattatttttatctctataatttatcgttagttgaagtgaccaaacctgagaggacaacaacgtccttgaggtcgagtccaagggtcacgaacttggctgttatattctccaacgcctcaaacggagatggcagatttgtattcgccgcttgctcactcgccgttaatgagtcccttcgtcccaaaggcacgggccaaaacggtcctccagtctgcatggcatgagaagtcataactaagtaaccgatcgattatgttttgttttttcattaatattttgacatttcagattattaatgaatttgggttttaagatcacacgtacgaggacgacagcttctctagccgcgagagcaactatgtcagcgcatgaaactgttaagggacaagaactttcgatatcagatttaatgtcttcaatgacttcgaatccacggactgagtttcggtttggctgagcgttcttctctcctttgaaatcctctgaatcgttcagaagtatagatccatcacatccctacaacataaaggaaatattatatatttgatacacatatatagaccctgtagtctaggacatctactctaatatgtatttttttaatactaaataatacaaaaattgttataaattctgtagaatttgaatgattatttttataatacctatagagtatgtttgactagtgtgagtgatatataatccacaatcttatatatgcatgcgtaaatataaaaagaaaatgtcacgtaacttacaatattattaaacaaacaaaaataaacttacattgacaaaacaatcgtggaaatggagtcgaagaagagatgcagcgattcgagaatcatctttaaaagctctccaaactccggacttaacaatcgtttgaagacgcggacaagaccggtcatagaatcgatagttgagattgctagttagtccatgtccgtgaccattgttgtaaccattgttatatcccgaaggaaacgaggagacaaagcctttgaagaaaagagtaaagattgctaggtaagacacaaacaaatacattgacattttgtggtccatgatgatgaaatgaaagatatatgatcgtagattgatagtgtattgctatgatgattttagcttgtatttatacaccaaaaacaaggtgtatttttaaaaaatagatatttgccttaacaagggtgcgcctcggagatgcatgcataattaagaaagtgggaatgccactataaataagataatatagtgggataaattttgaggtttttgtaatattaggtttttgtcagatagttcagtcacttggcaaaataaatgatttgttattacccatgtgagcatgtgattttatctagaattaaaatgccatatattataccaagtcatacgaacttttccttgtaaacgtcatacaaacattcaaataaaaaccaaaacctagtaaatgttaaatgtatactcataagttttgaatagtgggagaattagtgcatgtaaataatctaaactaatcatctcatgcccttactttttcatttttattgataacgttgtgcgcatttggggtgtttagcgcagcctatgtacagcaaaaatgtaatccggtttataatgatctattggagaaaatatcggtctaaattccgccatcaatctccctttatctcttcaatggatgtaagttataaggtaattagcaagctttttaagttattaggtacgtaccaagctgatcaaagtcaatgtgaactagttctcatgcaagactcatcatttatagggggtggcttcggatcaatattcaaatcctaaataataaattatctacgggtttgttcaaatacaagtctagaatcctaaattagacgaactaaagaaatttttgtaaatatccaaagaaggaggaatgggatattagttactttaagtcttccagaaagtttagggaggttaaaagaaatttgcttatacgtagaaagtagaaacacttcaaaggccaaattaatagattatcagccaaatttgtctccaaaatagaaaagtaggctttgatgaaatttattgctctcgtctacatacatatgttaagtaatgtttccaacttcttcatagtataaacgaggatttcattagatggtccgttgcaaatatactttggaatttaactatatatcatatatgccaaacttgaaacggattctaaaggtcgataatatcgatcccaaagatggtatcaccttcttatggatggtggaatttataatttactcgaggtctaattgataaaagaaggagtattcaactgtgatcatgatactccgatccctctcgatttaaaatgatatttggattttgggggaaacctttagacaagcgctgccattatgctcggtagaacatttcatccaaaccacaaccaaatgatggaaaatgtaacttatacttacgatctaactcttgttcttgtatttgttctgtttgtcacataatatcgcacttgttcttagacttttcaaaacattcatttttccggataaaatttggagttttaagaaacatgtgtacgtaaattttaaattatttttgtccattatgtttatgacatcaagaggattgcgcaacatattccactacgtgcccatgttggaagcttactcggaagtgtactcgaagagttgagaagcaaagtctttgcttcctttggttggccaaaatttacataactttccagtttccacaaccaaagtggatatgtaatattttatgaacccacttgtagctgcatatccatcattgcgtctcatttattataaactagctagctagagtcacacccctgtttaaatttgtagtttagtaataagcttgtactatagtatcgtcgttgagttataacttaggtcaaagttagaaataattaattacaattagataacagtattgcggtagaaagtagcaaaacattttgtcgtttcaaaatttatatctataacaaaagtactgaaatttctataaatttttgtgaaccattactatgaatttgtagcaaacgatatacatgtgcagttgtttaaaaaaactgatgatacgaattgagacaagtctttttaattatgtggcaaaatattggtaaaattatcggaaaatgtcatgaagtttgtaaaaaaatcagatattttactgtccaagtccaaggtatctattttgtgtagtttcaaactaaaaactcattattaatctgttttccagttccaagattattcatttaagttgttttttaattttatatatattcacgatagtctcaaacctttcaaattcatttcaaaaataaaattgaaaatcatttgctttttttttttttttgtgcaaatgaaaatcatttgctatgcagggtttttcttgctcatatgtatcattgggctgaaaacatgaggtgggccggctgggtagcatgaggcatatatatatatatatacccaaaatgcccaaacttttctgcttgttgattttttttgttattataaattcacccaaaaaaaacataatttaaaataataccatatgtaatacgcatctgtcggtcaaagctaaagaccttttagtcaattgaacgaacgaccgaatgattaggtgagcgttgaagaacattatttcaaagcttatgaacaaaaaattcaaagcatctctactatgaatctgaataaatgaccaaacacatgcttatgtccctcctattattatgctctttttgtaaactaaacacacaaaattatgaaacaaaaacatcaaaattattacttgaatattggataatgcctcaagaaaaataaaaacccaaccaaaaaaagccgtttacaaaaacaaggctaagtataatctctgcaaataatttgaaccatcctcactctctctttttctctatatatatatctataaacctttctataattattgttctcattcactactaatagatatagtaatgaatccaaaataacaaaaccgtgatcaagagtttggtttcttgagatttatggtgatctcaatctctccagttgaaagctctcagacttagcatcttcaacatcttccatgctactatctccaccagttgttgttgttgtagacggtaactgcaaaggaccttgaggagaatctgattgcgcattgcttctcttcaatgattctcctccttcacatgtctcttcttcatcttgtgctgaagaattccacaagttaaaccctaaaacaactgctgattgtttctccgcattcgaatttggcttcctgatgtgtaacctgtatttctacatataacagagaaaatgagttcttagtaacattcactgtaagactcaaagatctcaactttttgtttctttttagttacctgtaaatgactcttgacttcatcattggttaagccttcttcttgcatatgttctctaatttgtttaggagttgccactgttattaacacaacaaaacatacaaagatattacaacacattctgtatcaggtaaccaaactcaagaacacaagaagaagatcttttatacctcccggtccacctagctgttgcaatgcatcgacaaatcggcgatgcaactctggattccaacaccttctttgcttccgtaaagcttgctgcttaagaaatgctggttgttgtggtactgctggtgttggtggttgtggcatagagttagaagtaaagccacatgaggcaacaatcccttttcttcttatcgaactcgaacttaaaccgaggcctaaaccagtttccacctttggaatcaacaacataggagatttctcctcatttctctgcaacatttagatcaagcaaagtagcaaactcagtcctttgttcttaattaatcacaaaacatatcatccaatctttccaaatgctgtctcaattccagagttttaattaccttaatctcaagcttgctcttgatcttactagtgtgatcatcattagctttccattgctgaaacttcttctccctcattagctcctctcttttcagcaattctattcctctttctccttgaataggtttattaacagaaatgaaatctttcaacaatggttgagtctccatctctgaacatctcttatccttcagatacaaaatcgctgcaaacaaaaaaaacaaaactttcagcaacccaaatgattaaaaacagaggaaacagaggagagatcaatcaaaaacaacgaaccatcgtttaaaatctgcaaagacagaggaagctcaagttgacaactttcgagctttctcttctcttcttcaagcttcttaacatgttcatcaactttctcaaccgccacaacattcatcgaaactcctctcccaaagatcgatcccaaactaagctcatcacctaaagaacccatttttattttttctcgattcgaattaaaaactcaaactttttccagaatttggcatgatctcaaacccactctcttgatatcacaacaataacaacaacaacagagtcaaatagtaagagaatcagagtgtgaagaagaaacaacttgagatgagatctgtgtgaagcgattttatattagagggagagagaacaatgtttgtggaatcttttggaagagagaaagagagaagattgattgaaggaagaggaaagctagaagattctgtcttgtggggttttaatcttttttagatatcacaaaactcttcgtttcgtcgcgtatctctcaaattccatttttacccatttgctctgtttttgaattttacagttttactcgcgagttgactcattctctaactcataccaaactcgtgatttttctcaatgttttcagctccgattttttttttccttagattggttggtaaacataaaagcgtacaatatttttcttaggagatagaaaaaacgatatgcgcggtttgaagattaaaccgataacagtacaaaaagctgagaataacacttttagtaacgcttttgacgtcgtttttatgatttgtaactgttgaaatggtatcatttgtactgttacggtttaaaattacaaatcaaagatatggatactttaaatttttacactctaatttttttaatagtagattaaagaaagctaattttacgtgaaattttaattactaataaaaaacaagaaaaatagatattgttttttatatagttaaattcgtttaaatcattttgttatttgaaacatcactttctactttctattgcatttaatgttggaccatttaaatatctaattttatgtgcaaatagatcctcaacaatttaaattctgttgatgaaaaatatcttagttgttaaaataaatgatgtaacgtaatttgtacggttgttaaaagataacataacttagaaaattgcccttttgattgagatatgtgcgatcgcaccatcgataggataccaaaactcattttagattacaaatgcagttagatttgaatacatatgtgacttgtttttctcatcataacattggatttgaagctttgctagttattacactcacctctcttctgtttcctaataaatggttggtccaataaaattaacaacgacgttgttagagttattaaatatctttattatgttgggttttgatttgtgactctagctagtttttttttttttaacgataacaagatagtggttcttgtcggttaaaagcttaattttaaagatgtgtggtgcgtcaaagtcaaagataccaaaaccatgggattagcggcacaaagaaatgtgattgttcctccttttttctactttccgatttcgagcttttgtgaagttgaagattttgtccaaagaataacttttgcaaatgctctctagctcaagcaccaacagatttccgacacgtgtcaattagagaatgacttaggattccaaagtcatcattcttctataccaagttatttcttggtaactaaaaaacatatgaattgaaaacattttagaatgtcaatttttttgtcttccctcgttgttttttctagtaacatctctacgcattatatatcaaacgttgaaaataatttatcttcttttgaatattaaaagttagaattccagttgaatactcatcaaatatttcgacaaaacacattaatttgcttgatttgattagtttaactttgaacttttctacgaaagtgatgcttttttcgtcaatagaataatgcatataattaagcatatcatgtgcagagaatagtttcctctgacaaaccaacatgaaatatattttgttgaaaaaagtgtcccaatatattcttcgaattaacgaatgcgagacaaatattttggaaaggccaatcgaatctctatatatttatatatttgatgctggttagattctcgcctctctcatagatataataagaattttgccaaccagtcgtcgaattataaactacatttttgagtatattatacacaaactttttgatgtcattatatatataaaccagtctcaaatactgctgaagtaaggaccttacgttagatcacatcgatttctctcatctccattcgttttgtcgggtagtcccagttaaaaattttactttgtatatttttggggattacttcaacatcaataacttagtacttatgccacttatattatgaaactaggggttcaactaaattagtgtaaatcgtaactatccagagatttgaatttaaatctagatagatgaccaaaaatattattcttaacgagttagttactgcatattttcttattttatagaataagttgaattcgatcgtacttattatctgtacgaactactggttttcgatgtaatgcagttgacaacaccataagagtataaaacctaaagctgtcaattgggcttgaccatgaccaaatggtcttgtccagttggacattttttttctcttcacaaaaatgaccaagcccaaagtgaccaagcccaaaagtgaccaagtccaagagtgaccaaaaccaattatatatgtccatggacataaaaaaaatgtttaacatcacaataataatctaaaatgaccatgacaaacattgtaattagacatcataaaaacattttaagacaacattcttaagactatccataaagttcaacatgaccatcattcttcaatcttctcttctttctccttctcgttctcctctttgttctcttctaaatctgcagttacaaccattaaacaagagagtaaacaaatctctaaagcttaaaacaactatacaaacaagaacttgtttcatttaccttaagcttcttctttctcttcttctttctcttcttctttctcttcttctacttcctcttcttctccctcttttggaaagcctcgcagccaattccttgtgcagattaatgcttggatattttcaggaagaagactactcctatatttactaaggactccgctgcctatgctaaatgacgactcagaagcaaccgttgttatcggaatggagagaacatcacaagccatgcttgataactccttaaagcgacaagagttatctttccaatatgctaggacattaaaatgtctaaaagcagccatatctaatgttggttcacctaaatatatgtccaattctgattttccactactaccaactttttgagagacaaatgcataaaatccctgagaaaaaattcacacaaatggagcatatgagatacaaagctgccagatagaagtctaaaaccaagcaatatataacacttcaagtctatcaagcttaaagcaaatcaagtgcaaaaacagattaaaactacaaaaacagtggctaagtaagaatttacttacactgtaacctgccggaatgtcttcttccaaagtttctacttgtgaagaggaggtgatgctacttggacgtttcttgtaagctttaaaaagcttatagatcttcgaacgcacatgagccaatctggacttactagttaatcgatctagagtactgaaacaatattccaaacatttcaacttaagtcttggatcgaatacagctgcaattgcgagaatgtcactatactcttcccagtatttttcaaacttaagagtcataatttccaccatttgacaaatagtctcatcaactgaaaactcatgagctctcaaccaacactctatcttccaaacttgcataaaatataagttggctgtaggataagaagaacccgaaatcagatttgtcatttcagaaaatggctttaagaattcacatatcaactctcctctactccaatgaccaactagtcaaacccgtttctgaccgtggatctatttaggcgtagtccattaaaaccatggtttagttgggctagaatttaattgtccacaacaatattggttgggctaagcccatggtccttttgaccaattgacagctctaataaaacctgtagataacaaaacaacacaagttttatatactataattaattgtcttctcaaagaacttaataggaagcaaaaaccatgtttgtttcatcccatttaaccaccttaaaatcgagatcaaacaattttacatatgcaagttcaacatacctccaaacatttagactcaagacgtctatccctacatacaaaatctccttgccctctttttttttgggtatgccaaaattttgaatatacgccaaactactttccaaatcgtttgcataacaaagatgaccataatctttttccttacgacgtttgtgaggtccactgtaatcatctggatcaagactctgatatagatatcttaaaccatatactatcgctaaaccatttagagtatcagtagtccatttattatttttaatggaccaaacacataaaattgagctgaaccgtatcaatccattaaaacttctgatatccaatattattataaataatactaaaaaactccttatgatactatatgaatatcacttatatacatgctcttatatggtgtgtagttttcatcccatccatgtagtcttctaaaggcgctgaccatgtcagtgatgacataagtccaacaaaggacatggttacgttggtctcgaatatactccgagacatctttgagcctttctctgatttcctcgtctagtagtagaaaattttctagtactcctgtctcctgatatcgtctaatatataataatatagttaaccttaaggcagtcaatcatcaatacgccatttatcctactaatttaactcatccaattggtgctacactattgacgtttgaaggttgggatgggtgtaacatatatcgcggacatgccttatccataaatacacttaaaattagtataaattttctgacttgccttacctgagtttgattattttcttagtaaagtattttgatattataatttggtagtaatataatcactataacatgcaagaactacaaaaccagaggtctctcaaatggacactcatttaattgttacgatagtaaatgtcacccatcaatgaaacctaagtcaattggatgatttgggcccaattggacctaattcggcccatttaatattccctcttttctaacctttgtttctcctcttgcttgctcacccttttccctgaatcttaagaattactaattcccggcgagttttcccggcggcggctagataatactggtttctgccagcaagatcgaaggagataaacttcgtaatcaaaaagtctccttctgataaaaagatgtcagaaaacacaaaagtcgaagcgaagagagtgttcataggagcaggatgcaacagagtcgtcaataacgtctcttggggagcttctggtcttgtctctttcggtgcccaaaacgccgttgctgttttctgccctaaggtctgtttgttccactcttgtctctctctttcaaaatcattccaaaagcaaagatgtgattttttttgggtgtgttttgtgtctttgtttaatgtttttttcagactgcccagattcttacaacgctcccaggtcataaagcttctgtgaattgcactcattggttacccacttccaagtttgccttcaaaggtaggacttaaagcttacttgctgtaattttgaatcctttggtttataggaacttcttttgctatctatttagagagttttaagtatgttgaatcgcttaggcattgctaaaggatgagacttttgatgttttataagatagagaacataggttgaagaatttgtgagtgatagcaaattgagaagatataggcattcaaattttctatttatagtctctatctacggtttggtgatttagttgctgtgaaaggttttatgtatttgtatctccctgaattttctatgatcgttcgcagccaagaaattggaccggcaatatctgctatcaggtgattcagatggtatcatcatcctctgggaactatctactcttaataacgatgtaaaattcccttactctcggtctgatcttagtttctttgcggtttctctattatctctgatccctagtatgttttctgtttgttttagcaacagtggagacatgtactacaactaccactgtctcacaagaaaggtgtaacttgtatcaccgcttatatggtttctgaaaccgatgcaatgtttgcttcagcttcttctgatggagttgtgaatgtctgggatgtttcttttccgtctcagcctagtggtaagcattaacgttgctgcagtatattaccggttaaacgaagtgaagtatgtcttctaagcagtatctacatctttttcttcctctgtgttatctgttgcagaggaatgtaaagtggtgtgtctggactctatctgtgttgacactaaagcaattgtaacgctttcattagcggaattgcctcaaaatcctggtcgatttgcccttgctttgggcggattggacaacaaaatcaaactttactctggagaaagaacaggaaaggtgcttcccgattcgcttttgtgccaaattattctcaactaaattcaattgtgagagtttttttggtttcatcctttttcagtttacttctgtttgtgagcttaaaggccacacggactggattcggagtttggacttctcattaccgttacacacaacagaagaaatacccaatagtattatgcttgtgagttcttcccaggacaaagttattcggatctggaaactagtgttagtcggtgatgttggctcgtggcgaagagaaatcactctagcttcttacattgaaggcccagttttcgtctcagggacatttacatatcagatttcagttgaatctgttctgattggacatgaagattgggtctattctgtggaatggcaacctccagtcatcgatttcattgatgggcggctagttaaccaccaaccgctgagcattttatcggcttcgatggacaaaacgatgatgatttggcggcctgagaagaaaacgggtgtgtgggtgaacgttgtctgtgttggagagctaagtcactgtgctcttggtttctacggtggtcattggagcccaaatagtctgtctattctggctcatggatatggcggagcttttcatctctggagaaatgttagtagcagcaaagagtctgagaattggcagatgcagaaagttccttcgggtcactttgctgctgtgactgatgtcacatgggctagaaccggcgagtacttgctatccgtgagccaagatcaggtcagggtttatggttgaggtgttaaaacgattcagtatattataatgcaaaaagtttcttttctgatatttcattctccaaatttgcgttttgcagaccactcgtgtgttctcagcatggaagaatgatgaggggaatgaagcagaggatgagcattggcatgaactggctcgtcctcaggttcacgggcatgatattaactgtgtggctatggttcaaggtaaaggcaaccaccgttttgttagtggagcagaggagaaagttgtgagagtgtttgaggctcctctgtcgttcttgaagactctgaaccacacttgtgcgggaggagaaggaagcttccctgaggatttacaagcagacgtgcaggttcttggagcgaatatgtctgctcttggattatcacagaaacctatctacttacactgtaagtgattttgattgatttaacaccattactagctttttaccaaaagcaatcttgagattcttaattttttttcgcagcttctagtgaaccactggagagaaatggcggaggcgaaggtttggatacatttgagacagttccagaggcggctccagcagagttgaaagagcctccaatcgaagatcagcttgcgtttcatactttatggccggaatctcataaactctatggtcatggtaatgaactattttctctctgctctgaccacaagggaaaccttgttgcttcatcgtgtaaggtaagttaatgcagttttcagaatttttttacacttcttcaatctcctagatttagattttagatctaactgagcaggattccattactaaattattatttttatatatgaaccacaaacttcttcaggctcaatctgcatccatggcagagatatggctatgggaggttgggacatggaaagctgttggtcgtttgcaatctcacagcttgacggtgacgcacttggagttctcttatgatgacactctgctcttgtctgtctcaagagatcgtcacttctccgttttctctatccaaaggacaggtaactcaagcggtttcaacttcaccgttctaaatcagattttctcaaaacatcgaaaaatgtctacgtttttagcgtctctaactcgtctgtttttttgcttctgttcagacaatggtgaggttagtcacaaactcatggcaaaggttgaagcacacaagaggatcatatgggcatgttcatggaacccgtttggccaccaatttgcaacttcatcaagggacaagactgtcaagatctggtcagttgagaacgacgctcgcattaaacagattcttgtcttgcctccgtttggaagcagtgtaacggccgtggcttggactggactagaccgcaacgagaagagtgggtgcgtggcagtggggatggaaagcgggctaatagagctgtcgaacgtaaagattatagaaacagaggaaggtacgactgcaacagcagctcttgctcttcggctcgaaccgttcatgtgtcatgtctcggctgtgaacaggttagcttggagaccaaccgagaagtgtgagtctaatcagagcttgcgatggttaacttcttgtggggatgataattgtgtgagagtttttaacttcaagttttgagtttacaacacaaaacatatcgttgtatttttaagattatggaccaaaaggtccaaaactctcttccatacaggaccattgtaatatttatgcaaattttggttagctaaatcgaaacatgtttaacaaaccacttttttcctcgtttaaaaggaaaaacaaacaaataactttctcgctttgcatctttgatgcttttcattgattattaagctatggtgcaacagtcagttttgtctcttgacaatataatcagcgagagacaacaaaggaaccaccttgtcagaatcaaacccctgaagatgttcctgcgcttctctgttcaacctctttgcatattctctcgcattgtccacacccatcaccttcggatacgtcagctttccggtgatcaaatctttaccggcagttttcccaagctcctcggaagacttggtctcatcgagtacatcatccatcacctgaaacatcagtccaacgcacctcgcgtagctcttaagcctctcaatctcttcatcagacccacctcccattatagctcccacaacagccgcagcttcaaccaaaaccgcggttttatgaacatgcatcaactcaagatatctcaattcgtcgtcttcgttcttaaaactcatcctttctccggccaaatccgctgcttggcctgccacaagtccctctgtcccaacagctctcgccatctcctgaacagcccgaagaaccctctctgaagtcacccccaatgaggtcgatgccaatgtctgcttgacggccaaagacctgagcgcattagaggccaagatggatgttttctcgccaaaaactttatggttggtgggttttccacggcggaggctgtcgtcatccatacaaggaaggtcgtctaggatgagcgacgctgcgtgaatcatctcaaccgcacaggctgctggcattgcggttgactcttggccacctacgagctcgcaagcgaccaaacagagcattggccttactcgttttccgcctgggagaagcgtgtacctcatagctttgtgaacctcgagtactggctcccaaagaggaacaaaattgttgcaaagaggaattgaattgtctagtgctttgttgatggacttagccttattcttcatgtatgaaatgaactcagagtcggagcttgcgatcgaacttagacggcggttggacggtcgtattagccgcattgcagacagaatcagactgtaacgcggccgcatgatgattatgttacagcgcaagtaaactttattgagttgtgtttatatctaatagtagcaccaaaataatgtaaagtttcttcattagcctctaatacaaaataaaaaaaggaaatatgcttgttaaaccattttaagttccatacttggtcctcaagacagatttaatgaaatatatgcatgaatctcagaagatttacggaagatacaaattttgttgatgttttgcgtaaacaccaatacattgaggcgttttaagatcatgaccaaactctactgtgtaagattgtaaagacagaggaaggttaacttcttgttgtaaagataactgagtcagagtgtttttgaattc

SEQ ID NO: 27 - DNA, 91720 bp, Arabidopsis thaliana
caatttaaatcttctgatctagtttagctgtctaaaacacgcattgagagtctacacttgtttatgaacttttatcgtagtctagcaagtcacactggacctaaatatttggaatgagacttcgtattgtaaacctggatattattaccagtagttgggagttggtcactgtccccatttgtatctatgctagagaattcttccagcaatcaaactggaattatgaattcatcctcatcctgtattggcttgtaaatggatcacagggtcgtattggggaagatttccacatctgatggtcaaaagagtgcttttaccgttattcctggcaggtgggttggtaagtcatctagtgtgaaaaatcgataaatgtcttgttgtttttaagtttaatctttcgtcccccaaagttgtttcctttttaaaattgcttcaacttcgaggggttggaaataccattggctgtccattgggtgaactggatgcaggattggccttctttttcctttttgagttcaagacttcaagtctcaaatttcttatatttctgacagctgatcagagatattagtacatatctagttgatattattacagaagtagtctgtcttttaaagtttatcctccttatctcatagtctggctttcctttagaattttttatcttttcgtttgttgatcttgtctgtttctatatgactacgtgctttgttattttaactgtgagtggtgtaagcttgtgaagaagttgacaactggtactagaactatgcactgtgaaaaacgtttgaggactatgaaagatgatcttgtaaatttcaggcgcttaaatatcttctatgatacgttggtctgatattatttgagtcgatggctgcttgttcttcctagtggtgttgatagtaattttctcataattatgatttttccaagtgagttcgatctgcctttccaaatcattggggattaggatttgaatagttcagatttagcattggatgtgagggaaatttctgttaaaatcattgccttccgatgtgttcgttggttcctctcagcatcatggtttttttagaaatgattcttccaatcaccgctatcgttttgctaattgatgaatgggattttgtttggttgtgaatatcatcatcacatactctttattcatgatattggtatttctaatgacagtatgccatctgtggtttttgtaattcgacttgcctgaaaatggggaataccattctctgtgcaccttttgcaacatatatcgaactcgaagagttcggagattttaaccggagtgtatacatactttcaggccattgtctagtggacaacgtggagaggtatatgaggtgattgggaaccgtgttgctgtcatattcgaatacggtgatgataaaacatcagagggaagtgagaaaaagccagcagagcagccccagatgttacccatccactggttagatggtataattgcttcataatattccgatcgttaatgtgtgatacttatgaatctagagaattacttgctatgtatgaagacgcttgacatcatatttaaatgtagctaagtaatatctattttattacgcagtgaaagacctgaagtacgatttggatatgcaggcagttgatggctacattgctatggaagctttaaatgaggtatatttggaagttacactgacttttcttgttggctttactcatttgtttgtttcagctatagatgtacatgtatatttaaatttccatgtttgagaagatgatgctccagcaatagcaaatgctcataactttttattttagtttgaatttattagttaatttaactgttaatatatctatatacaacaagacgttgtgctctgtttagccagtagccttatttaacattttcctatctatgggtccttttcattgggttttacttggtatgctgaaatgtgtgaccaagttctagcaccataacattgaaatttttaccaaatttttttaaagatcttgaatgttcttttattcctatactgtggatgcctgcaattctgcctctatttttatttctgaaacgtatgtctggattgttatctacacttagtcctttattttttctgtctttgtaggttttgcaatccattcaaccacttatagtctattttccagactcgacgcagtggttgtctagagctgtgcctaagacaagacgaaaggaatttgtagacaaagttaaggaaatgtttgataaactatcaggtccgattgttatgatctgtgggcagaacaagatagaaacaggctcaaaagaaagagagaaattcgtaagcctgtcattatgtctaactcacttgtcattggttattgttccgcctttgttcctgattagtgtgttaaaaaagttattttttcctgaaaacagacgatggtactcccaaaccttagccgagttgtgaagctggtaagataaacattaaagatgcattttactgatatatgtgacttttttttaaaaatcgtaaagcacttgtctttgcctgaggtgcggacattttcttcttatcccttggtcgtcccttgatgaaaaccgtcaaatgaggacttgcaagttattccacatcttgaacacccgtttttgcaacaagttaattgcgcagtaaattagtcacgtttttacatactttttgcaacatgtgcaggattgtaaatatggatttgaactttccattctccttgatatgactcttgcttggtttctcgatctgtgttttaaaatggcattccttgcgatgtcatgctcttcttgatactattaacttaataaaaaagtttcttgttgcctttgtatatttcagcctcttcccttgaagggcctaactgagggattcacgggaaggggaaaatcagaggagaatgagatatacaagcttttcactaatgttatgcgcctacatcctccgaaggtatgcctaatatctttgagaagttttcatcaaattaacaatgaacttattcctgtatgactttaaacaatgtctgaggagccgtagatgtattgttatacctaagtgagatacatagactagtctgattatgtatgtcgcttggacaatatctcttctcaaattctctttaagaggtacacatccatctgtggtccatgtatgcttttgcaaagcttctatgtcacgtgctatcctacttagcagaggagaagctacttatattagttgtttcttcgagtatacatgctaaaggtaggaggcatatacccatattgccaaaacagtactgattccttcctgtaaaatattgatgtaggaggaggataccctcagattattcaagaaacaactaggagaagataggagaattgtgatatcgcggagcaatataaatgagttgctaaaggtatgtagatctaaattatatgtcgaagagaaaaatttagttgaacgtgtaatgttttcactaatcgttgcatccttaatgtactctttcccaggcacttgaagaacatgagttattgtgcacagatttatatcaagtgaacaccgatggggttatattgacaaagcaaagtgcgtaactcaggatgaaaacacttgtttttttttgtatttatagttgctgattgagaatgcaagcacttctttgctctgtactggcaattcctctctatcatgtacaatggcagtcgttccaatgcctagctagaatcggggtgttaggatactaatgtgaaacatgtgagaataggggctacctataagtacacttagatccaaattctcaaacatttgattgttcactttttcttaaagaagtttggtaaatctcttgattatatttagttgagaatggatacagttccttgtggttgatgattttttccgctggtgcaaacatttgactttttcccttgctttttgagatgaaaatatatatgtgatgaagaagagacctcagaaacttgtggcttttgtttttgcagaagcagagaaagctattggctgggccaaaaatcactatttagcttcttgtccagtcccattggttaaaggaggtcgcttgtctctgcctcgtgaaaggtacatgtgattgtggcttgtggatctgtaatttttattttattttttaatcttactgcgtttttttttccccttttttcaagccttgagatatcaattgcgaggttaagaaaattagaagataactccctaaagccttcgcaaaacttgaaggttaatttcctgcccttggattctggtaaatggatcttgaatacttttgagtaactatgatgttaatagacaatgtattgcagaatattgcaaaggatgagtacgaaagaaattttgtctcggctgtggttgctcctggagaaattggcgtcaaatttgaagatattggggctctcgaagacgtgaaaaaagcattaaatgagctggttattcttcccatgagaaggccagagctttttgcccgtggaaatctcttgcgggtattgctttctgtttgggacatatcgttgttttcttggtcaggtatttccgttcaacttggctgatattcctgatgacatgacctttttcagccctgtaaaggaatattgctttttggtcctcctggaacgggtaagacgctcctagctaaggcgcttgcaacagaagctggggcaaacttcattagcataactggctcaacacttacatcaaaggtaactggattatgttgtatgacagtgttttgtgtctccttgttgtatgtgtctatttgtatgcatgttttaatcaatcaagaagaatagttaaccttaataaatatgcttcagtcttcactggcctgtattgatacacttgtcttagcgaatatgtaatttcttagcttacacttctataaatgatttatgatactccccattattattctgatctgactctgtcttgtctttattccttgtttggcatagtggttcggagatgcagagaagctcactaaggctctcttttcctttgccaccaagctagcacctgtaattatttttgttgatgaggtgagaattttgtacctaaaactaaaattcatttctttattatgtccatagttctatcttagttattgatgctcttagtaaatatttgatgatgggtaaatgtgactgaacgggatttttgtttgtttggtagatcgacagtctgctaggtgctcgtggtggctcttccgagcacgaagctaccagaagaatgagaaatgagttcatggcagcttgggacgggctcaggtcaaaagacagccaaaggatcctcattcttggtgccaccaaccgtccctttgatcttgatgatgctgtcattcgtcgtctaccaaggcggtaacacctgatttgacttttatttacctttttgaaaattgctagtttgtatttctagtattggtaaactgtgtacctttgaattctaggatatatgtcgacttaccagatgccgaaaaccggttaaagatactgaaaatatttctaactcctgaaaatctggaatctgatttccagttcgagaaacttgcaaaggaaactgaaggttattccggtagcgatctgaaggttggtatttgttttctcatccctagctcatgacggcacttgtaagttctttatttaatcttttttgtttcttttgtgggcttacatttgcagaatctatgcattgctgctgcgtacaggcctgttcaagaactgttacaagaagaacaaaaggtacagaatccagattttgcagtgaaacatagactgctcacttacatagctttttttgcttgatgattttgcgttgtttgaatctttagggtgcaagagcagaagcatctcctggtctacggtcgctaagtttggatgacttcattcagtctaaagctaaggtaatttagttgcatcaatgccaggaaacaagatgtatcttgattttgttgcgttttgcattgtcgatgattgatataaaccacaaagatgtgattattgttatcatatgtatgggtgatgtgattctgcaggtgagcccatctgtggcgtacgatgcgactacgatgaatgagctgagaaaatggaacgagcaatatggtgaaggaggcagcaggacaaagtctccttttggcttctgatgaatttttttttgttttggtagatcaaagtgttttcatctgtcttttactttgtgatcatagtgtaactctcagtgctatagcctttttagtatcattttatttgatgtaaactatatataatggaacacgaaacactgtacgaccacatacaaaattcttcactataacataatgatttcttgtattcatataaattctcagagagtgagtgttgaatttgtctctatgtggcacaaaattgcaacattagtcacgtgaaaacaaaaacaagcatctgtttaaaagatttcaaacgtacaatgtcaacactctttaagcaagtgtttcgccattatcatatataactttcatgaagatatgcagagagatgattcggtgtgggcacagaactattagatcggagggggcacacttgtgctggagcagtagagagttcaaattagttgacaataaacaaaaaaaagtatccatgctgcttctattaggaagcaattgtaatgaaataactagcttttacctggtcacaaagatggcggttggattgcccggagatggaggattcttcttcagcagtgaagcatgtggaccagcttttgaaacatcatcagggtcacttgcagaatatacttcaactcttcaagaccaagttgccgcttgatcaagtccatgttactcttaaggacttcaatctctccaaaaggcagcctcaaatttagagcctgaatgccaatagatattgcctccttcttcttgaatttaacgaaaggcatgtaaatgttttctgcttgtccatccttctgtaatatctcctttagttctgcaattatctctgcatcaggggcaaaacgataggtttgctggtcaaatttgctttgcaggaacttgaggcagtgagctctccatcaatcaaattgctcattcacatatactaggcctattaactttcccgctggcgctgctgttacttgagcacctttcttagcagccttcttggaacctaagagctttctcattaagacaatagaatcttgcaaatatttgttagcactcttgagaaccaaatctggctcatttgatgtaggccagcctgctgttaccacagaaccttccttcttcaaaagtttcctccatacatattctgcaaactggggacagattggttcaatgaggcgtgtttgcacatccatgaagttcagtatcaagtcatggttcatattttcgtcactgccacaagagtttctatactcatctcgagcagcttgtaagtcgtaaaccccattcttaagtgcctccctaaacaaacattctttgtacgctttttcagtcaatctgatagcaatgttaatgtcattctcaaacactttatcagcatatgtagatggaggccccgttctcaaagaggattcagcagccagtttttcttccatccattcgagctgtttcaccagccgcaaaattgcagcatttgcagtttcaaatacaaaatttgcatcgtcaacgccatcaccagcatcagccaaagaaaaccttgtagcagtggcagagaattcttcgatagcctggcgcagggttctgaaatttccagttgactttgacattttctcagaattgagcataatgtgccattacatctgataccccgtggccagttacgcttctccattagtgcagtgtggttatagatgaaaaatgtcaaatgattctgaataagatcctttccggaaactcgaagatctagcgggtaccagtagtcaaattcctgcttcatcttacttaaaacagctgatggaatatcagttgattttggatacggaccatcacagaagagatactcccaaacttcatcattcatctgctgaggacggatcaaagacttgcttcctttatacatgtctccgtcgtgaaagatatgggcaactgtataataggccatataaagagatgaatcagataaggattccacaaggaaccgttcattatcccaaggaatacgagttcctagaccaaaagaccgtgagcaagcccactgaatgagccagctcaaagtgtgctcaaagccatgccttgtttcctcagagtagagattcatttttgataagcattcttcagccattttccgccattctgattcgccgtacgttggtgacgataccagtacctttgttggttagaatcgttgacatgggcagagcatagatgatctcgttcactgacagaggagacttcagagggagtccaatcagatcataaccggtcaactcgaccaagcaagatggtttcttagggttctttgagaagttctggtaggcacggttgagtgcagatctctcagtaaggatgaagacatcagtttcactgatttcataagctccatatttcccatcaggtagtacccaagcgtttgtttgtccatacatggtctcaggcctcaaagtagctgcagccaaaaacactctttttccttccaaaggactcagtttcagaggaaatggcttcactacttccatctttatgagagtatactcctgaggctgaacaccttcaccagtagcacggtcgtgatcagcacaaggctggcgatctagaggtgagaatattgtgtacctacagtctttgacaatctttcccagagctttcaacttcctcatctgccacctcacaaaggcatcgaaaaaaggattaacatcagtagtcacaaatgaccgtctccagtcacagcccaatccatatgccttgagatcttcaacagccaaagggggaaagtaatacaaccattcatctggatcccgaaatcttgcaatctcactgtcagtaagaccaaaactgcgcataatctgccactgataaacctgtccaccagatttcgcagccaccttagacttctttcccttgaactgacccgttaaagccggtgtatcactgccctcctcgtgaacttgaggagctaggttatcttgagcagggaagacaggagggtctccaaactgtaggatctcacgagaaagcttatccgcggaagccttaataggcataccagtacagtggaaaccaaaaggaagaagcacattggcacctcttagtctatggtaagcagaagcaaaatcaaccttggagagtgagaaagcatgcccaatgtgtagataaccattcatatagggaaaagggaaagtggagaagaacttttctcctggctttggaagatgatcacgagattcagccctgaaaacatcctcatcctcccaccactttcgaactgctacctcaatctcgagaagacgatctcttttcgcaaagctattggattcagatgccattaggtgacagtacctgcccagacctaaacaaacaatcaccgtacgcgagagagatagggagagagaagcttagtgcaaggagagaaaaatggagcgcagagacgatagggtttttttctttttcttttccctctcaatgttgtattaatatagaacaagtaaagacatctagggttttttccaattttccaacttttctattaataattttttttttttttttttttggtaggattaagattttgagatttggatttatcatcagtttctcttacccatttttctacaattttgtttatcaaaagttactttatgtgcccaaaactgatgaaactgatttaagtaacgcttatataagaaacagtttgtgattaaagatttaagatcttttatcataggacaccaaaaagaaaaataaatctgctctctatagtctaataaactagtaattaaaaactaaacaaaataggtttgtggtatatatatttcccttgaaaagttatttttaaatgatcaaaagaaaaacaaattattgcatgaggtgagctagacagagaccagaaactgtatctttcaccaaaaacaaatttagctacgaatccaagacggctccaaaccaaaaagcttatctccacggttttgagcacctgatgtccgaggcggcggtgcatgtacagtaatcggaagaacccattcgcttttttccctttccggtactaacaatggatgttcgtacctgtaaattaccacaaaacagaaccagaaactgacttcaacaacttgagcacttcaaaagactcaaccagagaatggatcgtttgagtattgggagtaatacctgcttaagtccacactcttaggagtagttaggaactcaaaccgaagaatccattgcacagaaacacggggcgtagaaaacgacattggaccatccgtcggaattgaaaatagaaagctggtttgaataaggtctgccaccacctcatggtgatcgctttggaccttttgacgaaaaacatatggggtagtaagattacaattgtagagacatagcatccagcggaaaaagcaaagtaacaatatccatagccaaattataatccgctgcatccataccttagtaagtgttggagaatttctccttgatggatgaacaaatctcctgtttattgtctctaaagtttctagagtaaccgagacctggaaacagatatggatcatcagtaccaatggccctcgatatagcaaaatgtacaccagaagttttgtcttgtctggatttacctcgaggcatcttctggttccttcttcatggaagaatgtaagagttccacctatctgcaaaaaaaaattaccattcgtggaaacagttgtcagatgcaggcaatgttttagaagaatgtgagaagagatgaaacagccaattacagtatcgctgaagtaataagtagaatcggcattcttgggggaaaacctaagaaggacttggtcatccattctaatgttgtatgatcttcctcttgtaaatccttctgctgcaagaaatgattgcatctggataagtaggtacttgcagaatctatatacaagcaaagactagaaatgacgagtagtttacatggaactggttctcttgctcctgctccaggcgacatagatgctcctgcaccatttgtttgcttgggctgttggctcgggaccacagaatttgatgatttatgaggggaagatacatctaaaaggaaaaaaaaaaaaagtattcttcagtaatcttttcctcacgaatattatagagctgataaacaaaacagatgatgaggtctttttttatttagcatctttccatcaattatttattggtatttgagaacagtactgtgtttagcattagttcgaaaccagccttcaccaaaaaacagagaggctacatgagctggtgctattctcagtgaccccattaaaatactgttttaggtatgtactcgcacataaatcactaaccagttccggaatcataagacaccacggcagctgataactgagaaagcatcatctttggagatgatcccacacgttcttcaacatatgacgtgtctttcattgacaatcgcggtccagaattcaaggacaatgaactgccaaatgttctgtttaaattgcttttgttgggataggaagaaacagatgagatctcgtcacgtgaactgtcatatccatcctcaccactatcatatgcgtcatttgctctagtctgcattaagcgcatttttgttcagtgttctgagtagtatgcaaatgcaacccatacgtataaaacaactgcaatcaaaagaaaaaggataaacagtagaattccacagttttgagcatgccatacccattctgagtccccatccatctctttccaatatatttctgtctgaatggtactggttggaacaatacctgtaagaaaattggagagccccatcaggttgcaccactaatgtcatccaaaaaaaaggagggaaaacaactttccgacgtcctgtaacttgttgtcttgtaaacaaacagagtttgacttctgacttaaaattcccaatcaaaattttagaaaaaagcttaccatcgatttgatcttcctctaatagcagcccattgttcttctgaattacccatacttgtaatggtattcgagtctcctgttggtaaataacaagattacaggagtcaaatttatgccaacagcaaactataaaatacaagtggaaaagggaaaaatatattatatttcagaaaaattaagaggcttatcacaaaatacatttacttagtattttctatcaagcatcaggccataggaggtatgtaattagaccttcagttatgacatattaccatgattaaatcgtagaccaactccagaatcaaggcatccaatttcaggggaacaagattattttgatgacagaaagtatcaaattatacttgattagaaagatgttataatcaactgactgaactactaaactcactgcagtgacaaattggccaaagaaaactaactacatgtaacactgaaaagttttccaagaagatctagactaagctacgctttaaacctcatgcttcaacttcatagtttgcatataaaccctggtgcatctccattgcatcgccacagagaaacaataagctagatgatctaagaatgttgaatgactcatacaaagttgtgtgattctattatcaattaggcatcaagcagactaaaaaccaaggatacagcctgacttagcactatagtaagaaccatgagacgtgtttcaacacaacagagctacattgtttgtgtttatcccagtttatatattttccacaccggtgaatagaaaacaaattgcgttcaagcaaccaaagtaaccgaaacacaatgttttacacatataacacctacagaaaacacggaaagtcaagtaaactaaccacttcaatgaaatcttgtgttgagtctttgtaaaattgactgttttctaatgccatccatcttccgcataatgtgctcttaatgtagtaaaggtaacgtaaagtagcacctttataagaaggtggtataatctgtgggagtatagctcgaaccattactgtagatgaaaattacaaacaaagaagcctgtcagcttaaaggttgacattgtaaagcctagccgttagtatatgtgccgtcggcatcaagcaagtgtacgttattattgttctttgttcatacagtattagagaaggagttaggcaagattacatgtcatcttagcaccaggggataggatttgatttgaaatcaaagatggtgttgaactgtctaggaagatgtgttcacctgaaaatctccaagagatatatatatggttaacgcacatcaatagaaaattacaagtagatggtaaagtgagcatgacgtgttggaagaaacatgaaaggctgacagaagatatataacagttgcagtaaaaagcttgttaaaatacctcttcgtcctttgcttcctggtgaaggtttttgagtagaaaaccactgaatgtccaatttctctagacctttaacctcaaaactaagcttttcaaccaaaatggagggattagaggcgttgtcatgagaattagcaacctcaatagttacaaaaatggaatctccaggcctatacacatctttatccgtttgaacacttagagatggtttgatcttgcttccagaaacacccacggagtcattgacttcactggaactgccgatccccaaaaaggaaaaccttgatgatagcatcgcttcaatggctgtgtttcttaaccaatacaacaatgccttccatgaatcgcttcaatggtgctaattacaaggacgacgagacttggatggagttgaatcattcaagggttccagagagaggacaaacataaaaaattggcagacagtagctaacgaatggcaatcaattacttcagatccagagagaagacgacgcgaatcgcgcagatcatagaaccaatttgtgagatttcgttccgaacaaaaggcaaatgtttcgttcacagagagtgagcttctaccttggttccttgagaatgacgagcagaaatgtgaagacggtgccgccgggagaagtcttcgtgataagagagccgagatcacaaatgaagagaattgagcaaggattctggaagagagtttagagggagatgaagaaattagggagataagcaattttctgagatccttgtttgatgacttctattctcctctgcaggagaagcttacaattactttagaaagcttagcttaacttaatctctacgtcttatttcagcccaacatgagcccaacatttcttatattctgcaatcatatttttgatccatttgattagttcgtttcgaagttctttaggatcatacaaatcctttctacatgtatctaattcaataaatcattggctcatcatatttttgtacatatgatgattcgttaaaaaacacctaatttacaaagaagtaattatattttcatattcaattttagcatcttttcgacatcttaaaaatgtgtactcggctaattagaaatactatacagtagtagttccttaaacattcaatttagtgtgttttggattatgtatcatggattttaaagtaggctagactttttgtctttctatcttaagtatttacttgcattcactgattgtcttttacatgaacataaaactatctaggtgtcttgattcttagcaaaatgttgttcctattgtcttttgcaaaacattgaaactgtaattgaacaatatagtttgaagttgtctaattttgcgagttagtttatctataatcacacgaaaccaaatcatataaaatccataaaatttggtcatttacatcacggattgctttggtaagagctagttcattatttatggccacctcttctgaatcagtaacaaatgcaaaactaggcaacaatactccttaggattctatcaagattactcaaaacgattttttgctcatgagtagtccatggaagacaaatcatatcagttacgaagcttgtttagaatctaaaacaaacaaaaaaaaaaatgataaagggaaagcaaaacatatttatcgtggtagcaaacatgttgttgacttgagctttgttggcataaatgtgactgtagtaaaaaagcgaatcaactggaactaaatctctgaactttgtcgtcggattaattggtgaaccattgaatttaacaaagtgagtgattgcccaacaattcattgcaacttgaatcttactccattttcacccgataaattttgtaacttcttttttatattttaatttttagtaatagatatattttattattaaaaatgaaataaaaactaaaaatttatcattttggaaaaaaatagtccggttgtaaaggttctgattatcctgattataaagaaaaaaaaaatagtacaatgtatcggtatcaataatatgtaaatgttttcggtactatgaaactgcattgcactatatggtttactctccattcggagtctcggtgcaatgtattggtactaatgaattaaagacaccttttctcaacaaagaacggccactttagcttaataaaaaaagtctttagccatcccatcaaccttcgtataaaaagaaaaatagttgaagattctacaatttattagtatattcccatcaacaaattctttaaaagaaaaaagtggagaaggaatcaaaagggtttgtttgttgtcagtcacactataaaaagacgctcctgaaaccacgtgaccactacacgcctctcttcttctgcttcacttcactactgctttctctatttctccatagatggctccttcttcatcacctcttcgtactacaaggtataaaaaggtctcatctttttatgataaatgagaagaaaaaaaaaaggacagatttatagttattagaatcccctgatctggggttatctcgtgtttgttcatttaaattcattttactcattttctgttttcttttggtgggcatgcattgaaatcaaatcagtgaaacagatgaaaaatatgcgaatgtcaaatgggaagagcttggattcgctctgactccaatagattatatgtatgtagccaaatgcagacaaggagagagctttacacaagggaagattgttccttatggcgacatttcaattagcccttgttctccgattctcaattacggccaggtaggttttgaggaccattatggctcttacttcatcaaattagtgctaatttgctttctctggttgtataagccttaccaaatctcactgattgtaggaacttcggtatttatcagaaacattattaagaaatttgaagcctttaatcaatgattgtttgaattgactgtaaaagtcagcaactttagcgtctataccttttgatattggtttggctttgtagggactatttgaaggtctcaaagcttacagaacagaagacgaccggattaggattttccggcctgaccaaaacgctcttcgcatgcaaactggtgcggagaggctttgtatgacacctcctactctagaacaatttgtcgaggcagttaagcaaactgtgcttgccaacaagaaatgggtatggactattggaccattgtacctctagttccttctgatgtggttctctatcgtaggttactctcatctttagtagttgctgctaaagagtagtgtaatggtttttcggttttaggttcctcctccgggtaaaggaactctgtatataaggcctctgctactagggagtggtgctacccttggagtagctccagcacctgaatacacttttctcatatatgcatctcccgtaggagattaccataaggtgattttgtatgtttttgtttcatatactctgccttaagactctttaaagttgagacagctaattggtttgtctgtcttgtaggtaagctcaggcttgaacctcaaagttgatcataagtatcaccgagcccattcaggtggaacggggggtgtcaagagctgcacaaactattctccagtaagtaaagagatactaggaaatataattttatcttccatggaaacaggttaatgaaatatcttgttctctgatttcctcttttataatttttgaaaggttgtgaaatcgttactcgaagcaaagtcagcgggtttctctgatgtcctgttcctggatgcagcaactggtagaaacatcgaagagcttactgcttgtaacatcttcattgtcaaggtaaagagtttcaacattatatagaaagttccaaccttttaaattcctatgcgtaaactcattagaaatcattcattttttagggaaacattgtatccaccccaccaacttcaggaaccattttacctggagtcacgaggaaaagcataagtgagctggctcatgatattggctaccaggttccacctcctctttcatatatagacattctcatgaaatcaagattagcagattgtgagtgacaattaatgttatcacaggtcgaagaacgcgatgtatctgtggatgagctactagaggcagaagaagttttctgcacagggactgcagtggtcgttaaagctgttgaaactgtgaccttccatgacaaaaagtgattaacttttataaaaccataataaatcaaagaccctttcatctgattctcgaatgttgattttgggtcatatctatcttttgactacagggtaaaatacaggacaggagaagcagcattgtctacgaagcttcactcgatgttgaccaatattcagatgggagttgttgaagataagaaaggttggatggtggacattgatccttgtcaaggttgaaagaagaagtttagaaagctgatgattctatgtactcaaacgtgtatcttttcttctcatgtgttggtttttattaggattcttctttttttatcatgggacttgtaataaataatgggtaactcttaagatacaagaggcggcagtatgttcaaaggtttaaggtccaatacgacatcgttcattaagggagacaaaatgaaaataaattaaaaacattagatgacagctgtgggatttgaacccacgccctttcggaccagagcctaaatctggcgccttagaccactcggccaaactatcatttgttgaacatacacgtacattgttatctaataatgcttacagttatctttttccacatcgcttccgtgtgacgcaagtcctcgtgtacgttgataaaaatacgagcttccacgtttgcttttaaaatagttggtttacacagatggaaccatattattttcatattcctttcggtaaattgcatatggaaaataattcatatctgtagtttaaagcaaaattttgtagttctttagcatcctaatcttgatttagattcggtataatattctttatatctccatatgaatcaataatacaatttcctaaactctttaacgtgtacataaacacctaacaccttgtaactgaagcttgtagacttgtcacatatatattaagagacttggctgcaactttaatcatttggtcttaaattagtactagaatttatttaatatcccatttgcattactcaattattttgtatcccatttgccgtatatttagttttaagaatagctgactttggtagataaacttaaatcgataaaagctgcatgtgatgggcagatcgatactatataactagctatgcatgtatatataaactttttttctttctttcgtccaacattattttaattaaataaccggaaaaaaactatcttttagatagagttattcaggaccaacgtgcttacataaaaatagactacagtaaacacatgttttacacataaactaattaaagatcggctttttggttaaaagtaaatataaaacacacaaacttaccttaaagtaaaatcacaaacgtgtgtttttgcaaattccacataacgcacccgcatctaattcattgcatcttaatggtaagccttttaatttgggtctttaatatgtttgtcaagtatggcttttagtctttgaaaatattatactagtttaaagattctaaattaataaaaaaaagacccatggattgtgccgaaacaaaaggaaatgaccactggaattcgaagggtttgtttgttgttgtctctataaaagcaagtgtttagtcgtgttcttaagccttaaattaactactttcttgctctctgtcttatttctctatccaatggctccttctgtgcacccttcttcatcacctctttttacaaggtgcaaaaatatcatcttttcataaacatgactttttttaaacgttcctttctctgtttattcaaaacggccaaactcttttactaactaattatgtatgtgtgtgtttttttgttttcttttgtgacatgcaataaaacagtaaagccgatgaaaagtatgcgaatgtaaaatgggatgagctcggattcgcactggttccaacagattatatgtatgtggcgaaatgcaaacaaggagagagcttttcaacaggagagattgttccttatggggatatttctataagcccttgtgctgggattctcaattatggccaggttttgttctctcttcattttttccccactcacttataaatttttgttcaatactggtgtttggtttttgaacgttttgtcatattggatttggatcggtttataatctagatcgtatactcttaagcaaaagcttgtaagagagtttgagagaaaatcatttgatattggcttgggggtttgtagggactatttgaaggtctcaaggcttacaggacagaagacggtcggatcacactcttccgacctgaccaaaacgctattcgtatgcaaacaggtgcagataggctttgtatgacacctccttccccggagcaattcgttgaagcagttaagcaaactgtgcttgccaacaacaaatgggtactatatggtgtctctaataacatgtgatcagtactttttaatctttattataagtagctaaagatttttctcttctttttttttaggtacctcctccggggaaaggagctttgtatattaggcctctactcataggtactggtgctgtccttggagtagcttcagctcctgaatatacgttcctcatttacacatctcccgtgggaaattatcacaaggtgagcttgtttgttattcaaatacttggtgatcaagtaaactcggtctaatattttaaatagtgatcaaatctctatgtgaaaggaaaaaaaatatgggctctaaaactttttaaataatgcatggtatcctttttgtagaccatgttcactagcacttctgacacttgctaaaatatggccatatgctgcctaaagattccttaaaatttaagactctttactggtttgtcttaatttcttgtaggcaagctcaggcttgaacctcaaagttgatcataaccatcgccgagcccacttcggtggaacagggggtgtgaagagctgcacaaattattctccagtaagtaattaataaagagacaccagagatatatagatggccaggttaatgatcatatctaaatcatggttttttattgtataaaatttggaaggttgtaaaatcgttgatcgaagcaaagtcttcgggtttctctgatgtcttgttcctggatgcggcaactggtaaaaacatcgaagaggtttctacttgtaacatcttcattctaaaggtaaagaacatagaaaaaattataatataaagtttcatccttaagattgcatttgcaagaactcattagtatatatatccttcattttctagggaaacattgtatccactcccccaacttcaggaaccattttaccaggaatcacaaggaagagcatatgtgagctagcccgtgacattggctatgaggttccaactttatctaatgatacccttttgtatatagacatttcatgaatgttttcaagattctatgtgtttcacaatgtatcacaggttcaagaacgtgatctttctgtggatgagctattagaggcagaggaagttttttgcacggggacggcagtggtcattaaagctgttgaaaccgtgacattccatgacaaaaggtgatgaatttaacataaataaaaacttaaaagaccatttcttaaaatctttagtctttcctcgggttacctaacgttgattttgggtcatatctatctttctttgaccacagggtaaaatatagaacaggagaagaagcattctctacgaagcttcacttgatattaactaatattcaaatgggagttgtcgaagataagaagggttggatgatggagatcgatcatttggttggaacagattcgtttcctgatgaaacataagaagaaataaatttctaagcaaaaactaagaacaatgaaaagcgagaaaaaagaggaataaaaattgttatccttttaaacaaaaaaaaaaaaaattgttatcttttgtttaaagaactattactccatacatatagttcttgttattcaactttaaagcaccaataagatctaccaacaaataaaatagtggtttaagagcgactcctgtaattgaaagctaacatgttgtcatggttgaaacttctatttttctatttatatttcatggttaaaacttgaaatgatttttttttttttttttggaaagctgattcaaattttattaattactcaatgagacatataatggagaaatctgaagatgcaaaagacagagagagtgattgcaatttcacagacagaagagagtgatttcaattgtgttttgctgtgtatgtttgctagcttcatcaggaagttagctgcccagtccacgatttacaatctttggaagcaaaggaacaatgtggttcacaaccaagtctcgatcccagctcctacaatcttcaagcttatcgatagagaaatcagaaacattatcaccgcaagacgcaagcgcaaacgttaccgtaacctgatgcaaatctggttaacttgatctcactgtaactttcaaatcttttgtctccttgttttttattcttttttgccaaggattcaaatcagttggctcctattttgtaaagccgaacctttcatttctatgatattaacagtttagcaaaaaaaatgtttgctagcttctgagtttctcttattattatttgttctataccactagtttaatcaaacaacgatttttttttttttctttttgatcaaaatcaaacaacgatttagatgaaaattttgtgaatatgaagttggtcgatttaaatttgtacatgtaatgaagaactattacgacgatacaatatgattaatacggtttcaagttcatatacaacatcctttcggacaagaattagagactcagggggtgttattcgtttatgattttaaaaaagttttagtgatttaaactgtcatgtaaaatctattgttattcaatcaagattttttaaaagtatgttaaatttttgtgttattcatttaagatttgtaaaaagtaatctaaaattttcataaattttggtttattagattcatactcttataaagccattaaaagttttgtgttattcaattaaaacaaaagaatctttgattgttaatgattgttaatgatttaaattattatgttattggttcatgactttctacatttttcttcacaaaataaagtcatggaaagtcatgaaaagtattatcaaaataaagagattgttagagaaactttacaagattatgaaaaactaatcaacaagattataaaatactctctaacaatcgtttaaaatctttcatttctttactttctaggatttgattgaaatcatcaaaattcgttgtaaatttggaaccaataacaccccctaaaagtttgttgaccaaagaaaaaacaaaacaaaattatttgatgacagctgtgggatttgaacccacgccctttcggaccagagcctaaatctggcgccttagaccactcggccaaactatcatttttaataactgttaacttgtaatatgatttatcacaaaaacaaccattgcataaaggccttaaaagaaagcctttttctaataaatgatttgggtaaaaaatttggaatttctacttgttcggttgaaaaaactcttcctgatttaatgaaacaaaactaaatattataattaccaaaatggtcctctctaagtttaatacagtttggattaaaaacaaatttttggaactaataatttactacactgaagttgaattaaattcggtttccctgcaatttcgatatgattacagtgtaaaaatgtatatgaaatttataaccaagtttatgagtagaacaaactttttcactatataaacaagaataaaaacaacgtttgattaattgtaaaagaaggcaaagcttacaacctctttatgtgaagatcataaattattacatcttgagattaaaacaaaagatttataatttcatatgcagtaattcaaattagttttattcataaatcatatttattgtcttaggtaatacagtattagtgatcaggatcagtaagggtactctccgacccaattaccgggtgagttatagttacaactcacgaaccaccaagtattggtgcattgaaccctagcacaccctatcttcactgaatctctccacaccacttgcgtgtaatgcaagcattgttttccacctgtagttttcaaattcaacaagctttgtcaaatctctattaattacatacactcgatttaatttttcgtgtgcgtttatgttacattaaaattgttgtgttcattttcagataaaaccatagttatatatacgttaatacgtacgtcgtactttagttaacaaaaaaaaatcaagtaaaaggcaaatgatatggattgattgtatatatatacagtaaaacctctataaattaataatgtcgggaccgagaaaatttattaatttagagaggtattaatttatcgataaattaataattattaatttatggagagattttacaaattttgtaattttttacaaaaatgtgatctaaacggtagtttttctatacaatcaataattttcctaaaaatcattacaagtagaaaaccattattaggtttaaaaaccaaaaaaaaaacttttttatatgtagtaaattattagaattgaattttacaaagaattaatataaattaaaaaaaaacaatactaaaatcatattttactaagttttacataaatataaatatatatattcataaatttatacaattattaatttataatattgatgggaccatatatttacataggattttcaaaaaaaatattatcttattaatttatcgatttgtatcaaattttacactagtcccaactcggaaccagaaaaatttattaatttatagaagttattattttatcgattattaatttatagaggttatattgtataagatattagatacctgtgcaattattgtatgcgtagctgtagtaaggtttctcgtcgacccaaagtttgacggccgagatggccgagaacgaggaactacttcccttggctaggttttctccatatggtccgttggagtgaacaaggttgcagtcggcttttctaaaatttgaatagttcaatgcgtaggccgcgagagttgtgtcccacaccacgttcggtactccaacctgcgcacgagcggtgttgtgagagttaaggtagtcttgtggagtgttttgagcattggttgcaacaacaagaaagctaatcgcaacgatgacgagaaaaggggttttgaaagtattcattgtcgtatttatatctttagtgatgattatttttaagaagatggagatatatagttaatgttgtgagtctgaaagaatgctttgccttctttatataggctatgtgtgattttttaggttcagtggttttgggaaactttaacattggggagttgacttatctttttataaatattatatttatttttaaagtgaagtaaaatgatcaaaaagtgttatcatgcctttaattatcattattaccgcattgcgtgatctgaagctagatctaatggtctcctaagagaaaataaaataagctatagtagtatataacaaaaatcgtactgctagagcaaagtggccgcaaatgaataaaaacgacaaactaatctatttgtttttttccgaatagatgaaagtttttttttcacagaacagaacaggtcttgtcttatcatcctcttcactaaaacacacccaaataaaccagacggttcttcgtaatacaaatcatttgcaaaaattgtctgataatcaagttactatgtcttcgtttatcatctgttaatcgtaacaacggaattttacaaagagataaggttattattgttttagaatttgactttattatttccaaatgtttctattgaaattttaatctttgaaattttatgtttgaacagagatcttggacattgattgtcaagaacccaattttatataggtaagtattgttaattttatatctaaattatgataatcaacacttgaaaggatattttgagatcggttagttttaacataaatctcttatattttaaaattggatagtgtatagtttaacagtaaatttattatatgaaaagagttataattaactttgtttccaatatatttcagttttgtctcaacgtgattatgttggcaaaaagaaaattattttcccagttaagtttcaacgtgactataagtaatatattcttttccaataaaaaaaaaacagagttaaacaatttgacaaaatatatccaactttaataagattgccgtatacataccaatttgacccaaaaaggctttgtactctttacataacaaaaaaggtcaaatagggaaaacgatgggactttataaacccaagtcactcattaccgacctcataaatctaaacctaagcggctaagcctgacgtcatttaacaaaaagagtaaacatgagcgccgtcaagctctgcaactacgatctgtaactccatcttaacacaaaagttgagataggttcttagatcaggttccgctgttaaatcgagtcatggtcttgtctcatagaaaggtactttcttttacttctcttgagtagcttctatagctagattgagattgaggttttgagatattaggttcgatgtcccggtctatttgtcaccagccatgtgtcagtttcgaccagtcccgtgctctctgtatttggttttatcggaatacggagatctattttcaggaggagacaactttgttttcttgtgatttttctcaacaagcgaatgagtcattcatcggtatctaaccattcaccatattatcagagtagttatgattgataggatggtagaagaatattctaagtccaacatagcatattctaagtccaacatagcgtaaaaaattgggagatatccggaatgatattatacgtaaaaaaaaatgggagatgtccggaatgatatttgtaatatttttatgttaacgaaacatattttaggatatgcaaaaaaaagtagatgttggtattcttgttttgcaagatttgtaatgggagttgtgtagtctttttatgatgtgtcatgaagtctaccgccaattacatacatcattcactttgtaattaaattgtcttcaagtttgtaattttatttttgttttatgtaccaaaatctaaattcagttgtttacaacttgataacaaaaaaaaagttatacattacttatgttttcacactcaatgattcaagttttttctatatccattcgaaagcttcttattaatcatcatacatggatttttactgctttgtatatttgtagtttacaactgtagtggattaatatcattcatttagcaacaacaacactcgttaagtttgctcacttgtcataattataaaccaacgcatgcatcacatatataagtaaatgcaaaacctatgcagctattatcaaagtcttcacttctcaaacgtgcttcaatcacttcaccctcagctgcactgaccaaccaaccgtaaacgcaactttcactttttcgtcactgagccatctctccttttcaaatcaaagttgaacagagcctaccagtggcaagtgaagggcttttctgaaacttatttctcaactgaccacaagcagcactcgctccaagtcctcttgtttgccttacgcttgctgttatcttacgcgacttcaatgcagctgcaaacgctaggacctgtacaattggttaataaaagcgattatttatttattgagcttttgaatccaaaaccaaaccagaaccgaatgcctggaattaatggttattaacataccgatttcttgcaaggtcgctcccgattaatttcaatgtcttacgtaagagaaaaggatactgtcagtgagtgctctgtcttattgttttaacatgcaattaaaattttgtgcagagaaataactctatacagtatatttatacgccatagtattactataactacaatcatagttggtcatcgaataagctttaagtataaagattatccattccaccataaattttttaagggtgtgtttgcaaaatagtcattttttcaaacttaattaggaaagtagtcactttactattcataatttgcaaaatagtcacttttcactgtttgattcgtacacttggattgtacatcacttttagtgtacaaatgtaaaatgtacgctgtgtatttttatatatatttgtacactaaaagtgatgtacaatccaagtgtacgaatcaaacagtgaaaagtgactattttgcaaattatgaatagtaaagtgactactttccaattaagttttaaaaagtgactaaatagcaacttaagccattttttaactagtttcgattcggatttggaatctcataattaattaaagaagttaacaaaaaagatagtatgtctttacatttttttccaaccaaaatttcacaactgatccacattaccgtgaacacatctgtttagaaaacaaaagaaaaggaggtttcattaatttctagatgattaagatgctaggaaatttaaattcttagatatttttcttttgtctctgtaaatataaaattacagagtgatggaatctcacatagtttataagggttacatttgtttaaaaccgataaacctaaaaggctaaaaaatcgaattaacgttgtttatttttgtgtcttattgaggtgatggtgttgcgaatttcacgatctatagatatgaaaacaatatgtggagagatagacttcgcttgtgaagaacggtgtttctttgtgtccgtctatgatacactaacgcgcctgagctacaaatttccttacgttataaggggcctaaggactaaaaagtcgaatcaaaatcgaaccaccgtaaaacttgttaaattgtttttttttttggtgaacagaaatcttgttaaactatattgggatagtgatttctttagtttttctgttttgttttgtttttgtttcattttgtgtatgttaatgtccagtaatctttttagattgtatatgcgttcgactcaaatatacaaggtttccaaaaaaaaaagcctggactggacattgacataattggatcggtttgggtcaaaaattgggaattcgatatgtttggttcaaaggactgtcaccgaaattggaccaattaatgtaagtttggtacaatttggggtgacatttttcaaactaatactgaaattgaattacaaattcagtttttcttttctgcaaattttaatacaagtgtaaatataattttacgtgtagcagtagaacaaactttctcactatataaaccagaagcaaaagaacaacatttgattaaaagaaggtaaaccttacaactcctctttacttgaaaacgatagaatattacatgttgagatcaaacgagatattttattttcttaatctaattaagatttattgatgattaattaatagtttaggttataatataggtgatgatcatgattagtaagggtactgtccggcctgattaccagatgcatcatagttacaacccacgaaatacccgccattgttgcatagaaccctagcacaccctatcttcaccgagttactccacaccacttgcgtgtaatgtttgcattgttgtgcacctgtagttttcaaattcaacaatcttatttagtaaaatttctattaatccctaacatgtgaaacctgctgttttgtttgtttcaaaatatcctttaaagaattgcaatgaatacgtttcttatacatatgacaaattaatatttcaatgtgtgaagaaatcagaattatttccatcgtaaaaacagtgagctactgagctaaaccacaaatttttaaaagcataaagttaaacataatagttggtaaatacttgtattatatatgaactgtttgtgttagttatacctatgcatgcattggcagtgtagttgtagtaaggtttctcgttaacccaaagattcacggcggctacacctgtgaacaaggcattatttccattggctaggttttctccataagatcctccagttgagggcgtgaggctgcagtcgacttttctagcattcgcatagtttgttgcgtaggccgctacgactgtgtcccacacaacattcgctactccaacctgcgcacgggcggtgttgtgagtgttaaggtagtcttgttgagcgttttgagcgttggttgcaagaaccagaaagctaatcgcaacgatgatgagaaatggggttttgaaagtattcattatcgtatttagtgatgattctaggaagagggtgatatattgtttatgctgtgagtttgagtaatactttggtcttgtttatataggcaagtacatgcttagggtcagtggttttgggagacttttacaatggggaaatggtgacttttctttgtatatagattaattaagtcatgaattcatcattaattaagcaatcttaagctaaatcaaatggtttcaaaacagaaataaaataagcagtgtatatgtatttaaagtatacttctagagagaatagttagcgcaaatgaaacaaaaggataaaatctaataaaatgcattttgtaatttgcgaactattttttattataatttagaattttagattaaactagtgagattaaattataagaatatatatatatacatatatatatatatatatttttaaaactggtttccttcaaaagaggatcctcaatatgattactatttcgaagatgacaacagtaataatactcatgaaattattttaaattaaaatcttaattcctgaatacagatttttaatttcttatagatcaccaaaccgtaattatctacatatttagcattatccattgaagaagaaagttgaatagagatttgcatggtcttgcactcttctatattttgttttctggataggtcatatatatctagatctgtttgtaattttcgaacaatttttcttttaatttagaattgtaaaataaactggtgagtttaaattataatattttaaaacggattttcttcaaaagaggatcctgaatattatcactttatcgaaaatgacaatagtaataatattcatgaaattatgttaaattacaatattaattcctgaaaacaaaacgatatattcatgaatagagattttttatcttctggataggtcatatatacatgtatttaagctttgaagatgtgtacttttaatatcaatgtttatttatttacatatgatggcatgtgaaaggccgtgatcctccgccggttgcaacgttaatgggacagtactcatagtgttaatatagaacttagtttagataacaaactctatctacttgtaccattctccaaccacatcaaacgttaaatatcagtagatagagtgtaaagaagacgacgtaaacatttgacataaaaaaaagagaggaaaacgacgtacataaatagtaaaaaaaataaggaagataccaagtggatcaagatagtagaccataaattaacctatcgtgggttgaacgctaaaggattcattacatatatacatgcgagcaaggtaaagatacattcggattcgaactaaaagataaaagaacgcgtaatagtttaatggatcaaagaggtggtggtctagctagcagctaatataatggtggttttgcgttgtcggttcaatctttttttagtgttaaagttttttaaaaaaaaaaaaaattggaatagttaaaagtcgtattcatatatacgtagagatcatatcatcgacattgcaattacaatttaattaggtacctttcaaaaattaatatttttaatactttcatgataacagatcaacgccaataatttataaaattgtcaaaactcgatcaccacaataattaaaccgatcaacgctatatgaaacactattgagatagtaatattagattattaatatatagatagttttttatgtactctattggttgattcggtaaaaaatatcaaattatattgcatgtaatcttagacaattttattttggttttgtatatttccattgggaatgattcacagttaattccaacctctctttttttgtctctaaatattgagaatcagaactgatatatataactatctctaagaggttccatgatgatcacaaaagagagggccgtttcgctttacacagaggtaaaactacaatccaagtggaacaaaaaaaaatcaaccaaatatacaaaactaaaacttgggacacctgaagccaggtatgattgtcttcgatccaagatagctcccatagtttttcactccttttttcgtgaattacttttcgcaaggaaatatgggccagtaaggataaaattttatgccagtggaattgaactattaatgaacttattatgcttagttgcttcccaaagcccaaagcctgttaattcaaaactcgaaagtccaaactttgacataaaattcaaaaagacttttccactttactcaaatttccccaatttccctcactagaaacaaaaaaaaaactagcgagtggaagacaactgacaattctatctcatgtatcaaaacgacaaagcaataaacgtcaaacgatatcaacacgacttggctgtctcagctcatttcttagcttctgagagaagagcctacaagcatccatgcttagatccaccgccgctgctagtgccacgtgcgccgccgcatcctccgtacaagtcacgtgcttcacacctacctccaccttaggcttgctctgtttctccactccttgcaccctcgtcgacatcacaaaccccaagttttgttgcgcttgagacagtgagaacctgaaatccgaccccgatcctgaatcagttcttgatgatctgatgcttgaccacgaagaaagatcgaaacttccttcagagctactccaagaagcagtcgtagtcgtagaagtggatccatcaatgatgaaactcccgccaagttttgtgctgatcgacgaggaagcagagactgcaacagcgataccgtctttataaagctcgaaacggtaacctagaacatcggagacgcctggttcacgccatgcctgaaggcgaacccatggcttccaggtgtagccatcaggtctgaggattagccaagctccaggactagaccgagagacgcggttggaaccaggagatggtacgaaaggtgtgaccattgaagccatagctactggtgaaccagagagatcatggatcgttatcgaccaaccttttctctcttttgaaaactgttcctttccacttgtcaccgatgataagctgcagaatttaaacaccaaaccatttttagatatcatcattaggaatacctaaatcgtgcatagatccaaattccaagaaaactaaacataaatagcaatgctgcaaggttaaaaatctataattggtactaatcagaaccctaaagtaaaaaaaaagcaaaagctctgtttctaataagcaacttatctgataatttactgacctgagactaagattccgatcaccggagtttctgaacccgaacttgcaagtgaaaacagcttgttttgcgtttccttggacttgaaaaacctgaggactacactcgggctcgccgtcgaattgaaacacaaacctcgtgtcgggttcaacccgtacgctaacgtggagctcaggatccgacccggacttcttattattcttcgatttagtgcccaaatcaacccagccgttgtgtgccaaacacgtctttgactccgccgccttcaaatcaagcgtaacctgaaaccgaccaatcagcttctcaccggaagcagcgacaaatccacacgacgcactacggcgagagtaaacctcgacggagagaacactccatttagccttcttaagagacgtctcaatctgagacttacttagactaaagcaagcagcgacggttgagacgttaccggaacaacaccgagactctgattccgattcggttcgcaacagaacgggaacagaaacaatctggcgtgggaaactcttgaacttgattttacaatagcaattaccagaggatacatccgaaacagacggtccagatgaagaagaagacgacgatgatgacgacggtgatctcggaaacctaaccgccaaattcccgacgatgatgcgtacgaaagagcaaggatccattgtgaattgaagattgaattatcggtaaatgttaattagtcagagctacgaagaaaggaactttaacactactaaccctaactagtttagggtttaagagagaattggagtggaagaagaagggattttggagaagagctataaaaatggaagattgatgagaattaaacaggctggaatatagctgtgatttttttgttgagaaaaacaaatggaaattaggtgaaagattttgtggggtcaaaactccaaaaaaccaaactatcgcctgtcaatttccagatgtgtaaattgaaataatattattctttcttttattttatttttttattttttggtaaataaaagtttttttttagtttaagtatgtattgattcttaaccttgaaatttctagtgttctaaatagatttatttctttactcctttatatgatttttttagttaaatgtttttgtcttttacaattttgatataatttctggaatcgttattgaggtttatatggtagatttttttcttttatacaggaaacatatcaagagattaaatagtaacgtgtatatatatttttgctggtcttgaattctttttaatgtatgtacattttgttgttgttttattgacatttcacacgttttattaaatatatttctacttagataacgattgaaaataggaatacgtcgtatactgtaatttgtaagattttaatgtagctttttttggcactgatacttgattacttctaaaaactgaaagatcttgtaaaatgcagtttttttaatggaagagagaaataatggaacagtggataaaaaaaagccaaagacctttttgatttgaaatgatttagcttttaaattttgaaataagctgatggaaaatagttagaagtggataatttatctatctgtttatcacttaggttagatgaattggtcccaaaagttggagcacgcatgtatatagttggcatcattatcctttgctaataatataaaacttaagaagctaataaattaatattgacaaaaaagtctaaactaataataaaattcttctttttttttgatgaggttatttatcctatatggaaatgtatatgttattatttaaattctatacgtataatgcgttaatgatataaaaaattgagttattttgtgtcattttaactcttttttaaatagtactcttagttgtagtttattaatttggagagaaaagaacaccaatattttcaccgacattcttgtcacgttatgggattgcgcaacgttaacacttggaccctgtctattcaccatccttgatgtgtacgatgaaaccaagcgatgctatagcctcccacaagccacaactcttttgaaattttatgttggatgtgcttcgtttaattttcgaatgtaatgcttattttgtcatacacaatcattgtgattattttcgttgtaacaacggagaaacacgaactatattttggaggagccatttctttagtttttcctatacatatgaatatgaatactacttaacatacaagcaaaacaaaaatttaccattggagaataaataatgatttctatgatttagaatttttatgaatagaaaaacaaagtttcatcacatctaacaattcaaatccactccataccaaaaaaaagaaaaacaattcaaattaactgaatgatatgattcacatttcatcaatttttcaatatatgatatatcgattaccatacaactattttacaattctactattatttgacattttttattcaaaatttgactaatattcgatatttttttgtatagatattattcctcttatttatttaatttgttgacaaacttaaccatatgcattcaattgaattttttcattttccccattatttttgttcgtaatgactactaattacaacaaaactatagtttattattttcctacaatttaatgatcattttaaaaactccttatctgcttaaaagcataattggaaataataataataaagtgaaatgacaataaaagaaaacttattcaagaaactacaaagttattccttgacaaaaaaagttattctattgtccagtgaacaaatatgagtttttgactattttttttttcacaagtaattttttttctttgacaagtgtatattaaacattctaaacattacatagcccaaacaaagaccctttcagggttttaagtaattaatcagtgacaaaaaaaaatgaaaatattgtatttataagtttttgatagacaaacataagttttacaattttccaaggaaaaagtcatattttcctagtaaaaacctttcgggttttccaatttatttaccaaagataattggtctctgaaagaacaaagcaaaacctaagaaagctaaaaagacactcagcgaattgaatttgtaaaaaaataagagaaaaaatcttgatttcttctgcgatcttcggttctcgacgcatcatgtgttgaagattcttctatcttcctctgtacatactctctctctgcccaagtgttgttgaaccaaaaaggggtcagatttagggtttttggaagatttttgtggctggactggccctgcagcgatgtctacctcgtcgcaatcttttgtggctggacggcctgcatccatggcttccccttcgcaatcgcaccgcttttgtggtccctcagccaccgcttctggtggcggaagctttgacactttgaatcgtgtcatcgctgacctttgcagccgtggtaatcctaaggtaatgaagaacattgtaaagtattctccctttttatgctttagtagaaacccatataacccttttgcttttattgcttatctgacggaatctctctgttctggttaatggaaaattcgaagttttagttcttataggtctggcaatttgtgggttttgatctattgttgttggtttccatcaagtatgcgactttgtttatgatttttggttgttgtattaggagggagctcctttagcgtttaggaaacacgtagaggaagcagttcgtgatcttagtggtgaagcttcctctaggttcatggagcaattatatgacaggattgctaatttaattgagagcactgatgtggcggaaaacatgggtgcactcagagccattgatgagttgacggagattggatttggtgagaatgctactaaggtttctagatttgcgggttacatgaggactgtgttcgagttgaagcgtgatcctgaaatcttggtgcttgctagtagagttttggggcaccttgctcgggcaggtggagcaatgacttctgatgaagtggagtttcaggtaagattgtttgtttccctccccttcctatcactgtctcggctcatagttgctcaattcttgatctcgttttcacagatgaaaacagcttttgattggcttcgcgtagacagggtggaatatcgtcgtttcgccgccgttttaatattaaaggtatcctgatttcagctgcccgatcctttagataagcagatcattttttcttttagttactcagaaagaaacttctgaactaataaattggattatagatgtttgaaaaatgatagtgatgataactttccaatcctaagttaatacggatatggatgttttcttgcaacattgcaggagatggccgaaaatgcttctactgtctttaacgttcatgtccctgaatttgtggatgctatctgggttgcacttagggacccccagttgcaagtgcgagaacgagctgttgaagctttgcgtgcatgccttcgtgttattgagaaaagggagactcgatggcgagtgcagtggtaagtattctcttatccttgaaaatgataatgtctgaaatgttttccttaggttatgtatttggtatgatatttttgatgcaaggcttttctttgtgttgttgcaatactttcatttgcaatcaccctcatttaagtactactttgtatattttattgtgtaaatgcaacttatattagctttttatgctgtggtcccccccccccccccaaaatggatgatattcgaatatatattcttcccatggtgatacgttttgcagactttctactgcatttatatatatcattgccaatgcaatgtttcaaattatcaataggggtttccatctttattaactgatcttctctcaatttggcttttacaggtactatcgaatgtttgaagctacacaggatgggttgggcagaaatgctccggttcacagtattcatggttctttacttgccgtgggggagctgttgaggtaaatgcagaagtggttatctattttgaaagcatccctttcttttagtcagacactcaagtttgattctggaatatttccgtagaacaacttgtttgtccccatgatgctcgggttgttttgttagtttgtcttcgtattgtagtttacatcattaaaaaagtaggcaattcatgtatattcctccactctcagtgtatacctgaacaaaagactcttgacgacgaaaattacgttgttttctgttataagcagattgatttcatggcatattgggtgttagagtttacagcttaatgctagagttcgtttgcaggaatacaggtgagttcatgatgtctaggtatagagaagttgccgaaattgtcctcagataccttgaacatcgtgatcgccttgttcgccttagcatcacctcgttactgcctcgcattgctcactttctccgtgaccggtttgtgacaaactatttaacggtaagtgactgagagattcttaaaaccaaaaaatttctggaaacgtgacacgaattactttcttgcagatatgcatgaatcatattcttactgtgttaagaataccggctgaaagagccagtgggttcatcgcccttggggaaatggctggtgctttggatggtgagcttatccattatttgccgacaattatgtctcatctgcgggatgcggtgggtcaaattttatttatttatttatttattttgtaattacgttttactacttttgtgtcaaagtattatattgggttttagttttgaaaactgaactagacaagtggctttgttcgactatgttgtccctgtagattgctccacgtaaaggcagacctttgcttgaagctgtggcttgtgttggtaacatcgcaaaggcaatgggatccacagtggaaactcatgttcgagatcttttagatgttatgttttcatctagtctctcttccacacttgttgacgctcttgaccagataaccatcaggtaaagttgaacgaaagaagtttgttattacatacattgatgtgtatacgtttaatgctgacaattctttgtatctcagcattccttctttgctgccaacagtacaagatcggcttctagattgcatttcgttggttctttcaaaatcccattattctcaagcaaagcctcctgttaccattgtccgaggtagtacagtgggcatggcaccacagtcttctgaccctagttgttcagctcaagttcaactagccctgcagactcttgctcgtttcaatttcaaggttggcgctctttgcggataacattttctaaagaatatgaaatttctgtctttgagcttctgatttctggcagggacatgatcttcttgaatttgctcgggagtcagttgttgtttatttggatgatgaggatgcagccacaagaaaagatgctgctttgtgttgttgcagactaattgcaaattctctttctggcatcacacaatttggctcgagcaggtcaacacgagcaggggggagacgcaggcgccttgtggaagaggttttatatcatactgaaagcccattacatttttttcttattatgtcttttaatttcactgtttctcattacaaaaggtttctttttattattttccaaatctgaacttaagtatgttaaacatgcttcgtgatggcatttataattgcaataccagtggcggttccaattttctgcttgctgagaaatgatgtttgggttctgcagattgtggaaaagcttctcaggacagccgttgcagatgctgatgtaactgttcgcaaatctatattcgttgctttatttggcaaccaatgtttcgatgattatctagcacaggctgatagtttgactgccatttttgcttccttaaatgatgaggtatgattgtgttatttgtttgaataaaatagcagcttagatgtcatactgcagtcctaatttgttaccgatcttttatttgtctctcttgggtgaattattgtaattgtattgctctttgagattcaatttcatgggttcatgaagttggtatttaattactccccctaatatcaaaatttggataccaagacgtagctgggcttttagtctatgaattagcttctattgtgtcacaaaacagtgttacttattaagttgtactggaaaagtgcagctgagataacttaattggatgatttgtggatggaatgaatgccttttgttggtggatgcatcatgtgataccctgttaacttgatagaatgtttggcttatgtttcacactttcactccacctggctacagtatctggcctagtcaatggaaccatttcaattcatatattacaatatctctgtttaacaggaccttgatgttcgagaatatgccatctcagttgctggaaggttatcggaaaaaaatccagcatacgtacttccagcacttcgtcgccatcttatacagttgttgacctatcttgagctgaggtaactacaaattttttagttcatatgggaagattcatttcctatgattatgtatctgttgcattgacttcaattgtaatgtcagcagtgcagataacaagtgcagggaagagagtgcaaagctccttggttgtttagttcgaaattgtgaacggctcattcttccatacgtagcccctgtccaaaaggtttaatttcttttcatttcttagatagtatggctattattgttgttcacggggttgtaactcttgttttctaggcacttgttgcgagacttagtgaaggaactggagtgaatgctaacaataatattgtcactggagttctcgtaactgttggggatcttgcaagagtggtaagttgaaatataattggcaagttttagattctatattaagtgtcgattcaaacataactgcgtttttgctgcgcgttaaagttgcagtctgatttttgactatttctatctgtgttctaagtctgtgttggctaagcgtatttcaaatttcaatgccctggccggcatctaatattgtattttttgttgtctctaagttaacagaatgttggtacttttatttcctttcctgtcctgttatttattgtgtttggctaagatattcccttcctggttttcttttgcgttgcttgctcagggtggcttggcaatgagacaatatattccggagctgatgcctttaattgttgaagctttaatggatggagctgctgtagcaaaacgtgaggtggctgtttctactcttggtcaagttgttcaaagtacagggtatgagatattgaccttcttttacgactttcttcttgttttatatgataatgctactaggcaattttgaacatgctaattttcttgtaaactaagacaatgctactatcttgattggcgaaagcctggttggactagatgaaaatactggattctaagtgaattttttgacacaaacggggcctccatctcttcttattagctaggtagaagcctgagctatccttaggctgtttatgtgttaatgtatacatatgtgttatgtttatcctttaacctactaaaagtgagaaaattctatatgaaatgacaatattgttatccctagctagttcttctatctgcggtagatctttgtgatggttttttttccgtctctcctgagatggctcattattccggagaaagaatattgcctttctgtgtccggacttgtcatgagttgtattctctgtttgtcgtgcgaaaggattgatttaccaatacctaggatattatgctgcctagatttaatcaactgtatcactggtgtttatgaagttgtagacatttgtagacagtgcggtgatcaacttgcatgttactgtttagtagcttgggacatgtgctaattattgtgcacataactagtacaaaatgaagggagttccagaagtttacaatcctccctgcatgttatttacggctctaatttcattatgaacgtaggtatgttgtgactccatacaaggaatacccattgttgcttgggttactcttgaaattgctgaagggtgacttagtgtggtctaccagacgagaagtgctcaaggtagtttctagagaattgttttactctagactattctagaagatatttttgtgataaacgtggttatatctacaggttcttggaattatgggcgctttggatcctcatgtgcataaacgtaaccaacaaagtttatcaggatcacatggtgaagttcctcgcggcactggtgattctggtcaacctattccatcaattgatgagttacctgtcgaactccggccgtcatttgctacatctgaggattattactcaacggtagttcttaatttgtgtgaatatatttcatttgtagtctgaattgtgctcaattactttccttattgttataggttgctatcaactcgcttatgcgaattcttagagatgcatcacttcttagttaccacaaaagggttgttagatctctgatgatcattttcaaggtaactaaaaccatcttgactgttttttaaaataaacttgtgttggaactgcaatgaggaggttacaactttatcactactttgtttttgcgaggttagtcaatgggattgggatgcgtgccttacttgccgaaggtaggtgtaaataatattgtatctccggcagcttttcgataaatgctctctctgttttacgttgtggtaatttgttgggttggttccacctctgaatttgaaggttttacctgagctttttcacactgttcgaacatctgatgagaacctgaaggacttcattacgtggggtcttgggactcttgtttccattgttcgccaggtatatccaccttaatattttcagttatggtcaaaatacgaccgactttgtgtaaactcatagcttatgttatctgtgtacagcacatacgcaagtatctgccagagctgctttcattagtctctgaactatggtcatccttcaccttgcccggtcccatacgcccatcacgtggtcttccggtaagttgtatgctgcctagagtatgctatgtttcttattgattaaggacagatatcttatggggagtacttcgcctctcttactgataatcaggttctgcatctactggaacatctttgcttggcacttaatgatgaattcagaacttatcttccagtcatccttccatgtttcatccaagtattaggtgacgccgagcggtttaatgattacacctatgttcctgatattctccacacactcgaagtgtttggcggtcagtaatacttatcttgttttgacatcctcatagtcattttatattacttgggtatgcgagttctagtaattaacgtatgcagttcttttacaagaatgtaaagaggttccacattattagattgtgtagtgtaagatgatacaagtagtttcgttattatatgcatatttgtttcttatctattaaatccaattttttttcggtatataggttctttgaatagtcagattgtttactcctgtagtttccattttctcaccatggccagatttcactctgatggttgacccttagagtccttatgtgcaggaactcttgatgagcacatgcatttactccttccggcacttattcgattgtttaaagtagatgctcctgtagctataagacgcgatgccatcaaaactttgacaagagtaatcccgtgtgttcaggttaggagctttggttatttattttgattttttttttccctttgctgatccagaaaaaattccatattaagcttcttgtaatacttttaattatccgtatatatcctcaggttactggtcatatctccgctctcgtgcatcacttgaagctagtattagatgggtgagttatactgattgtcactatctgaaaaacagtatattggttactttttcctaagggttttcttacaatacttcttcaaaacttaggcattgtgtcactatctggttttctcttaaatggttgacaatgcattatcaaaaaggatggaattattattatctcattaactttcaatccgtcattgttactgttacaaatctgttttccataagttgtttgtattgcttagttacaattttttctggccacatgtatttgttattagaactccgcagatgttagttacatttcttaatatcatgggattttatctgccattattgatgggacccaattgttttctagtggattttcatttcacgtttttctaaaccttactcgtgatttcagtttcgtacgtataaatattcttatggggtatatcttctgtaatcgcaggaagaatgatgagttgcggaaagatgctgtcgatgcactatgctgtttggctcatgcacttggagaggacttcaccatattcattgaatcaattcacaagcttttattgaagcatcgattgcgggtcttgcattttactatcttttaaataaaaatagcagcaaaaatttatctgtcatgtattataaatgtcatttgtgaacttctgtctgtaaaatctcactgtacaacattttttcagcataaagaatttgaggaaattcatgctcgctggcggagacgtgaaccattgattgtagctacaactgcaacccaacaattaagtaggcgactgccagttgaggttatcagggatcctgtaattgagaatgagatcgatcctttcgaagaaggaactgacagaaaccatcaggtactcttttctgtgtcgtatataatcacatatagattcttaatgtgtgaaaattttgttatcaagtttcaagttaaaatcatgattttactctaacattgtacaaaatttctggtcggcatagtcattattagtatgacttcattgaggcaaacatggggtgtattgtagggttccttagctgaataaggcggatctttttttctttctttttcctatctaaatgatgggtaggtttatctatagcaacgttcattcattgaagcttagtcttggtcctgagccatttgcttcaatgagtttgtaaatatgtcctctatatttcctcttctccatggacattcagcttttaaaaacaaataaaactatatatgggcttgatttaacatgatcctctagtaaagtttatttggttctttcttagttttgaaagagctaaaactttcactcatggctttgatgatctgctgaacaggttaatgatggtagactacggacagctggagaagcttctcaacgcagcaccaaagaagattgggaggaatggatgagacattttagtattgaattacttaaggagtctccctctccagcattaagaacttgtgcaaaacttgctcagttgcaggtgtttcatctatgctctttcttttcctctctcaaaagggtgcattttaatgattgtgttttgcagccatttgtcgggagagagttgtttgctgctggctttgtcagttgctgggcacagctaaacgagtctagccaaaagcagttagttaggagcttggaaatggccttttcatctccaaatatccctccagaaattttagctacactactcaatttggtatgttcgttgttacattacaagaaaacttaaacatgataaagacctttgattgagtcactggctataacgaacagcaaatttgtttcctgtggctatgcttgtgcttattgagtgcttgtgttttagcttaggcgattgttatgagttgactacattttccaagactggaaacaaaaacttcttaggtcaccatttctttagcggttgcacctgttaatctttctatgtaaaacacgttttttgttgctaaaaccatcaacaaaacgatctgtgagtgtacatggaaacatgacgtgtaatttttatttaatctaatattaacactataatccaaatatctgcttatacttcgtttaatctatattacgtttaggttggataaacaatcataagttcagaatcaatatcaacctacctttatgtgtgatcctgttgcttggtcctgtcacttgtgcttgattttattatttctcttcttaggcagagtttatggaacatgatgagaagcctcttcccattgatattcgtcttctgggggctcttgctgaaaaggtttgcgttatgtatttgctagttaaattagatttggtacttttttcatttgcgtatcaagaattcatctgattttcttggtaatgtgcaatattccaactttgtagtgccgtgtttttgccaaagctctgcattataaagagatggaatttgaaggtccacgatccaagaggatggatgccaacccagttgctgttgtcgaggctcttatacacataaataatcagttacaccagcatgaggtacactgtattttgtatcctatttcgaccatctttgatatttgttattattgattggttggaattctttgtataggctgctgtcggtatactaacctatgctcaacaacatcttgatgtgcaattaaaagaatcatggtaacatggcttttctgaatcatgatgcacttattttcagttctgtttgataggcattccgtcacaagattgtgtgtggttccattctttgatcctaatcagtggaaaagcactaacagtgtttgtttctaggtatgagaagctgcagcgctgggacgatgcactcaaggcgtacactttgaaagcatctcaaacaacaaatcctcatcttgtattagaagccacattaggtttgtggtaaccaagactaatattgggaggatttagtgggtttttttcttcgataatgtttttttctaagttctgttggcatttttttgtcggtattctgttagtagttcatagagaactgtgggttcataacattcttacaagttagcagaacaacagatcaacgcatttttttccagtctaaaattcatatgatgcttctcttttcttttcatgaaatggcctgattctattgcttatttaccacgttgtaggacaaatgagatgtcttgctgcacttgcacgatgggaagagctcaacaatctctgcaaagagtactggagtcctgctgagccatctgcgcgtctggaaatggcaccaatggttggtaacttctacttatgctacattcggtgatatagctacatggttacataatgtctttttgcaaccatactaggctgcacaagctgcatggaacatgggagagtgggatcaaatggccgaatatgtgtctcggctagatgatggtgatgaaacaaagcttcggggtttagcaagcccggtttctagtggcgatgggagcagtaatggcacattcttcagggctgttctgttagttcgaagggcaaaggtacacttggacctatattttcgtactataaatcttatcaggcttacttataatctatttgcagacactaatttctgcgtatgtgtgcctgtggatatttttctttcctttttagtacgacgaggcacgcgaatatgtggaaagagctagaaaatgtcttgccacagaacttgcagcgctggtaggtttcatttctggtagtattttcattataaacttttgtgaaaaatatctatgaatcatctgttgtgaataaagggaacagatgtatatcagcaaagatatttgtaactggtctcagccttttccattatgttcttgaaactatttgagtacgccttgtggtgttggaagtaggattatacattcctgacatcttagttacatatttagctctatttaaataacattttgtgcatgctatcgttggttcctttcaatagaagcatcatgtaatcaccatgttaccttcttagttgctcacgcatactgaaaaacttgtaattgtctatttgcgccttctacaggttttggagagctatgagcgtgcgtacagcaatatggttcgtgttcagcagctgtcagaactagaggaggttagatctcaattatccaagatcccttctcctggacaccctccctaacacccctccatatacatgattaatctttctatttttttcccctgttgtatcgatactaggtaattgaatattatacgctgcctgtgggaaatactattgccgaagaacggagagctctaattcgtaatatgtggactcagcggattcagggatctaagcgtaatgtggaggtatattatttttaatgttatcatgttagttgagccactagtgaatgacaaggcatttggtattttaagcatcaaatattgcagtatggtgactttattaaatgaatcttcgctaggatcaaattgattttttccatattaggtttgctttatttagtttccgtctgttgatttataaagtaaagtagcttcttaccaaactgttagtcagagcttgtatcctacgtagataaaaaaacaaatccaaataagaaaactcattaaaattttattgagtgatctcaggttttttgtataatagtgtgctttttaatactttgcattcccaatactactcaggtgtggcaagcacttttggctgtccgggcacttgtgctacctcctacagaagatgtggaaacttggctcaagtttgcctcgctttgtcgaaagagtgggaggatcagtcaggcgaaatctactctactcaagctcttaccggtcttgaacttttaccttttgattgttgaattttctctgccaagagtgtatctttattctgttatgtctaacttgggcccttattttgcagtttgatccagaagtatcaccagaaaacatgcaatatcacggacctccacaagtgatgcttggatacttaaaataccaatggtcacttggagaggaacgtaagcgcaaagaggcatttaccaagctgcaggtatgtcatataccagttgctacttgcattgtctgggcttattctctttttcacattttcccatatcttgcttgaacggccatgttatagcttccctcgatctaaattttaattgtttctagattctaacgagagagctctcaagtgtgccacattctcaatctgacatactggctagcatggtatctagcaagggcgcaaatgttccacttcttgcacgtgtaaatctcaaactgggaacgtggcagtgggcactttcttccggtttgaatgatgggtctattcaaggtgaattgtagttgcttttaaatgtgtaagtgtaatcaaactacgtctgaccttaacactttggtgaccaaatatactcttttccagaaattcgtgatgcgtttgacaaatctacttgctatgctcctaaatgggctaaagcatggcacacatgggcattattcaatacagcagtgatgtcgcattacatttcaagaggtcaaattgcttcccagtacgttgtttctgcagtcactggatatttttattctatagcatgtgcagcaaatgccaaaggagttgatgatagtttacaggtaaagcgtgcatgcatccatggcttttccatgttacacaaacgaaaacgtgtctttcttttcttttccatgttgctacttttcttatacttgttgaaatgaggtgttgttttaccatactggtggtctgttaaattattttcctctgctgtctcatttccataggacatactgcgtcttctgacattgtggttcaaccatggagctacagctgatgtccaaaccgcattgaagacaggattcagtcatgtcaacattaacacatggcttgttgtgctacctcaaatcattgctaggatacattctaataatcgtgctgtcagggaactgattcagtctcttctcatccgcataggcgaaaaccacccacaggtttgcagccttctagaaattttataaatcttcatcagtattacaattctatggtgggaattaagacatacataaagttttactctgccattttgattgcatatgtacttcgattttggatgcataatttctccttgactatttatttttcaaatgttttcaggctctgatgtatccccttctcgttgcatgtaaatcaataagcaatcttcggagagctgcggctcaagaggtggttgataaagttcgccagcacagtggtgcactcgtggatcaggttaaaagtcatctcttgtgtttgtcgattttattgaattatatatttttacctgagctaattagtgacccccttcctctacacccataacaacaaaaaaacaggcgcaacttgtatcacatgaacttatcagggttgccatactttggcatgaaatgtggcatgaagcactagaagaagctagtcgcttgtattttggtgaacataacattgaaggcatgctgaaagtacttgaacccttacatgacatgctcgacgaaggtgtaaaaaaggacagtacgaccatacaggaaagagcatttatagaggttggaaatttcaatcccggatttttggtatttgggtgtgtgtgatcacgttatttataattacatctttatctagcacaggggtgtacagcattgcagtatctaggtttatttgctatgtaacttgtagtcatttttcctcttcgcgattttaaagtattaaaataaaccagttgcccttgatagaatcagattactaatgttactgtatggagtgtttcttgtcgcatatgtttcagtaactgttatatgtgaactttacaatgttctttaatgtcagcaacttaagttagtgtaatgttgatgcaggcataccgtcacgaactaaaagaggcacatgaatgctgttgcaattacaagataactgggaaagatgctgaacttacacaggtgatcagaaattttgaacaaaatttcagatgagtgtttgctgtcttcttattaaagggacgggaattgacataatttttcttttcaattctctatcttcttaggcttgggatctttactatcacgttttcaaacggattgacaaacagctagccagtctcacgacattggatttggaagtaataagattctctttttctttggttctctcgctccttttgagttctaatctgactggcatgttacttgttgtatagtctgtttctcctgagttgctgctgtgccgtgacttggagctagcagttcctggaacatatcgtgcaggtaacaacatattgaactgcttaagtttgcctgagctgatttattttattaacccagacttcattgcttacatacatacttcgtttttcttcttattagatgcccccgtcgtgactatatcatctttttcacgccaacttgttgttataacctctaaacaaagaccaaggaaattgactattcacggaaatgacggtgaggactacgccttcttgttgaagggacatgaagatttaaggcaagatgagcgtgttatgcaggtgattctcaaaaaaatcagttatgcattgttctgatgaattcttgttggagaatacgtaattgaagttttcagtttacacttcacaaatatacagttttcagctacaaaatcacatctatccctttcctcttatttgtgtttcagctttttggtttggtgaacactttgcttgagaattccagaaaaacagccgaaaaagatctttccattcaacgctattctgtaataccactatctcccaatagtggactcatcggatgggttccgaactgcgatacccttcaccatcttattcgagagcacagagatgcaagaaaggtttgtcttgtattcactaaggttttcagtcctgaaactatctgcggtttacgttaattcttacacatgcctgtctgaattcatagatcattcttaatcaagaaaataagcatatgttgagttttgctccagactatgacaatctaccgcttatagcaaaggttgaagtatttgagtatgctctagaaaacacagagggaaatgatctatccagggtactcaattcattctggtaactctatttattttgggtaaagtacctaatctggaatactaagttgcttctattcttctccttcttattaggttctctggttaaaaagtcgctcgtcagaagtttggctagaaagaagaacaaactatactagaagtttagcagttatgagtatggtatgtagttgatctcatcctttgttctccacttgtgtagcatcaaataaaaagtttctggtgtttaactcgccaataaaatgaacttcatgcgttactttgtgtcaggttggttatattcttgggttaggtgatcgacacccaagtaaccttatgcttcatagatacaggtacataaaactgaaataaggtttacattacattttcaaccttgggttctatttctttatcaatggttttaattgtgcagtggaaagatcttgcatattgattttggagattgttttgaggcttctatgaatagagagaagtttcctgaaaaggtattaattttaatgtttccctcgtatatacttgtttgtgggtatcaaagaacaattttgtgaggattgcttaaataatgttaggttccattccgcctgacaagaatgcttgtcaaagcaatggaagtcagtggcattgaaggaaacttccgctcaacctgcgaaaacgttatgcaagttctcagaaccaataaagatagtgtaatggcaatgatggaagcgtttgtacatgatcctttaatcaattggcgtcttttcaatttcaatgaagtcccccaattagcactgctcggtaacaacaaccccaatgctcctgctgatgttgagcctgacgaagaagatgaagatcccgctgatatagatcttcctcagcctcaaaggagtactcgagagaaggagattcttcaggtttcttttgaaaatcttattatgtttttttcttctcaaagggggatttttttatatttaaatttgatttttggattatttcaggctgtaaatatgcttggagatgctaatgaagttttaaatgagcgtgccgtagttgttatggcacgtatgagtcataagcttacagggcgtgatttttcttcgtctgcaattccgagcaatcccattgctgatcataataacttgctcggaggagattctcatgaagtcgaacatggtttgtctgtgaaagttcaggttcaaaaactaatcaatcaagccacttcccatgagaatctctgtcaaaactatgttgggtatgttcctctacacttctacactcctaaaccccgattgctttagttcatttaaaattgaacatgcatatttcttgtgtttgttcttttattacaggtggtgccctttctggtgagatgggtcatctgtacatttttaatgtaaataggctttttaattttcaactaatttgcatttatgtttgactaattcgataataaactatgttctttttaatgtaaataatttattagtttcatagtcatgtattaatacatgatgtagcgtggatgaataaatgggcaggtcaccttttttacttttctgaaatatacattctcatatcctcaaggtattttaatggaattgcgacaaaagaagaagaagaagaagatggtgtacaatgtacatgttttatgaactatataaagcaattggaatatgcatgttctttttaatgaaacatgtttccggagtttaagatggatttcataaaaatcaacataattttgttaatagtccaaataatataatttttttattttttttttgttaaagcaaatttgtcacatttttttatataaaatttgtgatgtcaaaagagaagacaaatgtaaaattgtgttgtgggttgttacagtatgtagttggtatctttattaaacctaccaaaacgagacaatttgtaacattgagggagcatgtgatagtacattgggtattatactattaagctaacatgagtaatgatgtttttttgttttttttttctcttctatgtattttgtttttgtaccaatattattaatacagaatggggacaaaaaggagacgtggagtctcgcgttacgttaccactctctcaaatgcggcaatttggcagccacacacacatggacagcgttagcgtactgtagataaataatccgtactcgtgctaacgtacgcttcaaatagttaaaggtgataactttcaccgttgtctcggcaccacttgctcgaatattgacacctttttcttccccagaaaaaatccaaacaaatagaattttgccgtctgaaattcctaaaactataaaacacagcttccttcttctcctatatattcatcggcgacgccttgatcatgattctttccggaaactgataagaggaacaaaaatggcttcttcttctctggagattgttaaattgtgtggctctcctgtatcgtttccccgccataaatctcccataaaattggaatgtagaaaaagggttttcagattacccaattctaggagttggcatcgtcttagggtttcttcatctgctctcaatggtggtgataatcagtccaaaggtcagtttttttttttttttttttgttgcttaactctctaaaagaagtaattagagttgattttgattataactgatatttgattagtcaatagattataaagatgtgattttgattctttccccttttagatagaatttgttgtcattagttctctaatagtatcattagttctccaatcttgtttcttgaatctcttttcataagtcaaaaaggggttttaatatacaagttatccattttacttggactctttcttcttgtaatggtgtgtattcattacttagattttcctctacctgaatttggagtttgatttgtatgagttgtgtaggtgaagaacctccagaatctttatttatgaaagaattgaagagacgtggtatgactcctacttccttgcttcaagactatgaagtggatcaggatgagatcaaaaccggtaaagaaaccggaaacagctctaaaacgactgcaactactccggccttcgataaaagcttgttaaatcagagagagagatctttggctttaaacagcgaagggcttgaggtcagattatcactagtaccctctaattattatagtttctcatagtcagttattgtagggcttgaaattatgtttcattgccttcttttgtatccggatagttcttagcagcttatgtagttatgataaaggttgattttaggagtttgttttgttaaatttggaaaggaactgcttattgttgtttcaggggttgattccgcgtgctaggatcttgctgacaattggagggactttcttcttgggcttttggccattgatagtcttaactctcggcgccttctctgctctttaccttgtaagtatttaataagatcaaggagtgtacttttcttcattctagtccttgaatactaagaaagtggcaaatgtattttggagactgtaaagagacctcttagctcttccaaccaaccacctagttaagaccctcaactctgatccaacccaagtcctattcacatttatgcttatcagtattcttccacgttcttctcgcacgccgtagaaagtgttttggaatgagtttttaaggttcctttcttctatggatttgataaggtttcttaccataaactgatttttcttgttgaaatgatagtactttggagcagatttcattcatgatggaagtagaactccggtttcaccaccaccttacatcgatccatatgctctgttggaggatgagaggatatcagggatggatcctcgtctaaattagcaggcaacaagttgttctttattgcataactagtgtagagcatatatttgctctaagtatatatttttatttacagcctttccttttatttattttccttacggttgtaaaaagaatcgttgcttctctattgcttctctgttccaaaaatttcaatctttcaccactcaaataacaatttgacgtttctatttgtttagattttggacaatcgatttaaaccaaacccagcttaaattcagttcttggagatgaaaatattatcagaaacaaacgaactagaacaaatggctaccgccacaagcaagagatagaaatatggtttttgaaaacacaagtacgactcgtaagagtttcgagcctattcacacaaacacgagataatagaaatcccacataaaaccgacaaccttcttagtactcctctccttcatcatcctcatcgtcaccaccttcagcaccaacctcttcgtaatccttctccaatgctgcaagatcctcacgagcctctgaaaattctccttcttccataccctcacccacataccagtgaacgaaagcacgttttgcgtacataagatcaaacttgtgatcaatacgggagaacacctcagcaacactggtggagtttgagatcatacacacagctctctggactttagcaagatcacctcctggaacaacagttggtggctggtagttgattccacacttgaatccagtaggacaccagtccacaaactgaatagtacgcttggtcttgatggtgccaacagctgcgttcacatccttggggacgacatcaccacggtacatcaaacagcaagccatgtactttccgtgacgagggtcacactttgccatcatggatgctggctcaaaagcactgtttgtgatctcagcaaccgagagctgctcatggaaggccttctctgcggagatgactggggcataggaggaaagcatgaagtggattcttgggtatgggaccaagttggtttggaactcagtcacatcaacattcaaggcaccatcgaacctcagagaagcagtcaaggatgagataacctgaaaccatcaagagagagttaaacataagaaacgaaacagcaaaaagactgactgatgtaaatgattgaagctggctctatacctgagagacgagacggttgaggttggtgtaggtgggtctctcaatgcttagggaacgtctgcagatgtcatagatagcttcattgtcgaggaggatagagacatcagtgtgttccaagagtgagtgagtggagaggacactgttgtaaggctcaacaacagaggtggagacctgtggagatgggtaaactgtgaaacccaacttggactttttcccgtagtcaacagaaagtctctcaaggaggagagatccaagaccagatccagtccctccaccaacagcgttgaagacgaggaatccttggagaccagtacagttatcagcgagctttctgatacggtccaagcacagatcaacaatctctttcccaactgaaataagatttcaaaagtaaatcagtgaatgaacagtaaattcaacaagatatggttgatgatgaagaaacaagggaaggagtaacttactggtgtaatgcccacgggcgaaattgttagctgcgtcttctttaccgctgatgagttgctcagggtggaaaagctgacggtaagtaccagtcctgacctcatcgatcacagttggctcaagatcaacaaagacagcacgtgggacgtgcttccctgcaccggtctcactgaagaaggtgttgaaagcatcgtcacctccgccaacagtcttgtcactcggcatctggccatcaggctgtaacattccacatccaagacaacacatcaatacaaagagacatataaaacgaaaagatctacacatatagaagcaacgatgaaaagagaaaatcacaacgagatgcttcaactatatcgcaaatatcaatcgccatctctttaagcaaataaagcaaagttttccttcacccaatattataaaacaaatacggatatggcatcagcaaaagcaatctgacatgaaatccaattcaaacacagatctatccaggttcatcgaataatttagaaatgagaaacggatttcgcatcaaccacagaaatttcataagacgtcgaaatcaaacacagatctaaacgattacgtaaaatagatctacgaggtcaatgctgcgcaaaaatatctcagatttgatcttttaaaatacgaaaaatatgaagaaaaacacagatcaagatagaagaggaagagacgaacctgaatgccatgttcaagacagtaaagctcccagcaagcatttccgacctggataccggcctgaccaatgtggatcgaaatgcactctctcattttcgtttcgcggaagaaagaaaagatctagaaactagatttgcagggaagaagacgaagaagaagaagggcgtttatgaagacgctcttcttttagatctagatctgattttttcgatttctaggtttttacagagctgtttgatgctatatttataagcgaaagtatccatctgtatgtaacggcacgtatgatacacgtgtagtgatgtaattgggttgtcgttaaaaccacgatttgttgatatcctcgtgagttgcgtattttctaattttgaattttgattccttagattctgtttggcaatcgctttctgaccgtttctctttatttttgaaatagcaaaattccttgaattgcgtggaaatgaaccggaatttaattagaattgaaccggatcagaccaatatttaaagtaaaccgaaacgataagaaactagtattaaccaaaatcttcgaaatggtaaccaaaaattcaaagctttgagtaaatgatgagagcgctagcggcggcttcacggccactgttttccgatttgccgagtctcgttcgttcatggcttccgacttctagcttcaaatcgtttgctactgtatcttcgtctcctccgtcggatttgaatctccggaatcaatctcgcggtggccttcctcgattcttttccgatgatcttccatctcgcaaggcacacaccctatctatctctatctttatctcatataatttttgttccctttaaatctgtgtaagaatccaatcgaaatgagagtgagggtaatcactgagaagtttagaaattactgtaattcactgtaatctctaagaaatttctggtaaaatcatggtgaaatgataatattaaatgttcttgttgtttgaaatgataagctcctctttgtgtaaatcgttttatgattgtttatagggtggagttgttcgtgttcaaggctctgagttttggcatatggctaaagttcttagactgaaacaggaggacaggtaattactacattcatatatgttattgtcattttccagtgttgcattcatgaaaggcccttttaaaaattgatttgttcattttttgtttgcttgtatccatgttgctaaaagttttatcctatctgaatgatgtttgtaatgtatctggatccatcctttcatttttatgcatctttatcatgaggaattcagttgtttaagtaatgatagcatcaaaagtaaccctgaggtgagaggaggccaaccttttctttagtttaagatcactaaaccttaagtgaatgtaagtaatgacttgcaccccttttctttgcaagggtagaactctttaatggcaaagggggtctagtagaaggctgtatacaaagcatagacaaaactggagttgattttatcgcacaagaagatcagaaggtgattcttcctcagggcatgcagtggcaggtgtttgcagcttttggtatgaaataggacttcaacctaactttacgatatcgccggatgttatagtctctggctcagcttgagtcatgatttctttgaaaatgtcttgtcaggaactttgaagggtggtcgagcggattggctaattgagaaatgtacagtatgtatctacttttagtatgtaactgtctaaatcacctgtgaatattgtgtcactgaatatgtgtatatgctcgtcttaggaactcggagcgagcagtgtcacaccacttttaacggaaagatcacccataatctctgaaaaccgggtcgatagattggaacgcgttagttttgctgcagctaagcaatgtaagtagcaatagtgaaagaaaacaattggttggttaatcttgctcttctttttccttcgcattatagttgtatgatcagaaactatttgccttatctttcactgtcacaggccaaagacttcatcaaatggtactgaaccctccaatcaaatttggtaccctcttggatcatgtatgtttgaacatttttctacgcaaactctaagatccttggtttataaaatttctgactttttgttcttctaaacttgttttgacaccttttggggttttctagattttgaagtcaaagttatgtttggttgctacagccgaagctaaacctcttcttaatgcagtaaactcctcagcaaaagaatccagcggactattaatcgttggaccagaaggcggtaagaaatcttctcttcaatacatttctgatgtagttctcttttaaaatttctactgacttgctacactttcacattgtcgaaaatgaaatcatgggttaatgctcgagtagacacaaaatgaacagtagcttatggctcttgttaatatgacttgtctcagtgatataaaaaatatgtttgttatctaacggtcaacaatgaaattgaagcagactttacgaagaaagaggtggagatgatgttggaagcaggcggcacagcagttggactggggccacaccggttgcgagttgagaccgcaaccattgctcttttggcaactctagtgatgtggtctgactctcaagagatgatctaaaagcttgttaggctttagtttttggtgcctttaggctttgtcttgtgttcagagattttgcttagttgagtctggacatcattgataagaaaacaaagaggatgtttgaatattaaagcctcatgataaacaaggaatcaaggatacataaaaatacataaacaccgaagaacaagcttcccgaagaaggataatcaatttggcggtcggggtaccgagtccatccaagatgggagcacaaactgggataacataaggactccatcgcatctctcttccatgtacccctcagtacccgacgtgtttacgcgacaacaatcaccttcactactactcccattctctgactcttgatgaacaataaactcttgtgcctgcaagtaacccgataccaaacaaccgtgttgacgatcccacagatagacgatataagtatcaaacggattcattgccaggggaaaacagttgacatcagatatgaaagacggcatgacgacttcccaaatcagttgccacctttcactctctttgttatgcagcctccatgctttcaatattcgatgtattacttcaatgaagataacatcttctcctgaagtagtcaagcatctccgaacatgttcatgttcatcatcatgttcatgttcatgttcatcattcgcgccagggagaggtataacctgacattgatcatcagctccataaaagtcatgagctacaaggacaccaggtccatttgaaaacatatacctatcccacatataaagaaccccgttgagattcaccggagaatcaactctaccaccgtggacgggtcgagatgagaaaacttgcttgaaagtccataaacctgtctcagaagaatatacacaaactctccataaatacattccttcatctctacgatcaatcagttccatttggactgtcctaaccatcttgaaacttgaaacgacgccgttctcaacgcgtgttaccattccaacgccgctatatggactcgggtaccaagggtgtttatcttgaacccatggattaggaggttgagggatctcaacccattcttgtaaaactggattaccaacgaaagatttataactataaaccttgttcttgatgcgagaaacaagcacatcgatccaaatcaatccattggaagaagctatatagtagtattcagaggtagggagattcggatattcttgaaatggcatgatatatgaaactagagatttgggaagatcccatgttttgcatccatggaagcctatggcttgtgtcatctcacgaagatactctgttctgaacatgatcgaccatgaggtagaggagcttcggtgaaaagatccgaagagacgtcggaagtagtccgattctattactgatttccatcttttgcatactgatttgaacctcgcaatgcttctcaacggtaatcttgcaagtatctccacctctgggattgttcttcttcttccagtctccattagagtcttttttggtctctctgttttcttcttaaatagttctttttcttttggagatggttggacgtgaatcgctcttttattatcatcaactttatggactcatgaatcaatcaatatttatagagtgattaaaatgtgacaatatgataatgtttttcaccagaagtacaaacgaagcaaaacaacatattctaaccatattaaagatttgataaagaaaaagcttttgcaataagcaattgaaaagtgaatttaaccaagatgatatgatactgatagggagctctagtgaatagtgtcctcattagtcattacactaaagaaaaagattttgctaagcaattgaagttaccaattctttaagaaggacaatcaatttggtggagaagtacagagtccatccactgtggaagcacaaattgggataatatgaggatagatttattgtgattagcatcttccatataccccttagaattgctaatcaaattaaataaaagttcaagcttcaagatggaaattaagacagaaagatatgtctatataaatataattcttgtcagaaatcatatggtgtagataaacataatttacatatctacaagtaattaagaatgtgatttgaggaaaactttggaccatttaaaaagaagatgatggatattagcatccatgcgagtaccaactccgccccacactaacatgtcagccatgtctccaattgacgacccactcacttcattcacctcttcgaacccaattcttctgtaaaacctaaccagctgatacatgaaaattcagttcgggtcagtatgtgtttgtttggtaaagcgagatcggaattcaatcggtttggtccgatcatatgatgaggtttctataatttcattgaaaaactataaccagaaaaagccaaaccaaaccaaatcgaaacgtaatcaacccgaactaaaatttgtttacagactaattggttttattattctaacacccccgctaaagcaaaaccaaagccaaaccgtaaccaatttaaatgtcacaaaactaaaccgaataaaccaaaattcatggtacctgtaatcaaatcacctcttagattcggtccggttcggtaataataaccaaacaaaaattctcaatttcaatttcgatagaaagagttatggagtgagagagaaaccttggaatggtagagatcggagtcgtagatagcaagaagctgagcagtacggcaaccacagtcgtagccatggcgaatcgctacagctccgacgtataaaccaactccaagaacagacttatccatagccactgtctctttcgtcagtcttatcgtatccaaatgcagaaccaaaccgcgtccgaaccatggacgcaccactccctctgctcttcccacctcaccgcccgtgtctgcgttcttccctgtcactctgaaaaacggtcctaaagtctggatctttaagtctagctttcgagcttttgatgacgtcaggatgtctgacatcgacggtagggaattggaatcgccgagggaattggacggtgagagaatgagtttcggtgggctcagagccatcttcatttcctctgggtttcgttactgaaagagggttcagataaaatactaaatacaatgatgagataatataggtaacatagatgacacgtggcatccattcagagagtcgaacattactaaaactatggacaacatgaacaaggctcacgagttttgattgctttttgtgaagaatgcgtgtattgggatgtgtttgctactgtccttttgatctggtttctgcttctttggcttcgaatttaccttttcctttccgagaatcctaacaagtgtttggttatgaaactttcagtgagaagcagagacttgtaagaaacataacggaaaatggagtaggctttaaaatgttactgtcagctgaccttcgttttgaaggtgttgtggaagaactagagccagtttcttcgttttgaagtctctgagcgagatgaaaatcagagtgttcttgtcgttcctctacaaaagatggtggtaactctatcccacacaagacgcatttgtagccgtcaatccaatataacggctccgtttgtggaaatactgaaactgcttcggttgcattagaattatcattcatcgagtgactagtatctggtttgcactccttgtattttttgagcagtgaatctccttccaatatttgcagcctttcttcttttttcatacactcttgatttggaattacctttccggaatctatttgggaccgttcttcatattcgacaacatccttcagatgggcagagcttgtctcatgagaaccaaaggatacattcccgctctcgtcattgcttaagcaatttttattagcatccaagtcaaatgagtcattgtcatccagatcttgtgcttgtcttgaggaatccttttgaacgatgaacttagtaatagttccctgtgaaggatcagaattgcggatttcttcaacgaactgcgacatgcgcaaacctgcatatacatagatcgagttctggaattttagtagatgggctaatatatttaatattatgtttctaacgaaagaagaatgacgaacactatagagccgcacctatcaaccttacggaaacaggaagttctgccttcaacagctttgtagcatgctttagtatatcatcgcttgaacacgtgtacctctgcaggctaacagctctgctcctgatctgagcatagcagattgtcacagtttcagcacatagatggatttccaaacagggagaaataaaatgaaatttagatgagcacctcaaaggaggcagttttcagtttaagtgtcaacgttcttgctgttaggccctcctttttcatgtcatgagatagcatttctgcaagttcatctgcccagaacagcagagataacaattcaagtgaattatgtcaaagcaaatcttttatgtcaaatatagattcgttaagtctaaaaggcaaacaggttgatgtaagattactcagtatcccaggaacaaactatgatttcaagtagtctcattaaacaatcctttactgtgttaaattttaaagatccttttgtttgcctttgattattgagttatgtacgtcttatgagagaaaaaaacacgaatgcgcaaactactcacccaacttggaatatagcaatctttcatctcctgtcgcagcaaatgtcctctcactgctaatacttttacgagacctaacctgaggggtgtttgttcctccaagccccagtccaaccgacaaaaaaaagtctacaaaattttgtcgagcaatcaccaaagcatgatatgatccattaaagatatcatgtgaaacttgacttcacaagtaatgcctacaaacaaacgaatcttttacaggaaaggaacagtaaaacaagaaggaggagatgctgctacctgctgatgactgagagaagagagcgtagagaagagatcccttctgcaccatctcctcacatgttttaattcccaaagcatcctttaaaatatgttcagtaaccttaccaattccaccgatctgtagaccatttccaactggcattaatttgacgagtaaattatagaaacacagtaccatttcctagcacaatttaaaactcaaactataatcgaatttatttttgaaaaacctaggccaatggtttagacaactcataaagaaccaaccccaagccgtcgcaaacaacgtgaggttgtttttagttctgtgccaaacagaaactaagttctgcatggcatctctattactaccaacattcaaattttgtattggatatctaatctcgctcacgtgaatgaatcatcatctgcacttctacacagcaaattaaaggatctggggaataattgagaggtagtttctctttaaagcctcgaaaagaaagagaaaaaatctttaaaagatttgacagcaaaagcaacaattcaggaacacatacctttcttacagggaggaaagatacgaatgtcatgacagttgatcggtcattttgtagaacaaactgtccattaggcttgttaatgtctgagcaaacctgaaacatagtagggctagattaagaacacaatgttttttgtaatatagtaatatagaccaaactgagacaataaagagataaaaattggaagacgtataggatatcatgcacatatgaaaaccttggctagcaagcggtttgccgctactccagcactgcatgtcagtccagtctcggaataaacagaagatctaagctcctctgcaatctgcagaaagtgaagaaatggacagggaaacagttgcagtgtcagccaaataatctctcaaagaagatacaacaatcacaaaagaatgcatctcatgaggtcaaacttacttctccacctgaaagacctctttctcgacaaacctcagttatgtcaaggtaggcttcatccaagctcccagcaatgaagtgaggatcatagttcctaaaaactaaatgaaacacatgtatgcaaataagagcagagaaataagaacagcaagcataaagctacacatgttaaaagaggaagcaacgaaccctttctggttaagtcactgtagtgagtatacttagtgaaatcaacaggaacaaatatcaaatctggacacaatttacgagcaatgaagccaggcattgcagcacggaccccaaacttccttgcctaagtgggatagtactaatttaagttgtaagcataattttgaggaaactttttatccaccagttgaaaccaaagcatacctcataattagcagtggagatcatggataagcctccaacagccattggcttgcccttgatcgaaggatcgctcaaagtttcaacagcagcataaaaagcatccatatcaacatgaagccaaattctggataggtcacgtgtagcttctaactctaagatccttttatcaaccaccttcatatgataaagcttatatatagtttccggctaatcaaataaatatgtgaaagattacaaagccagtattccctatcatagccaactattcctcaaagcaaaagaagatatcgtatagaaaccttactcaggaatagtgacacataccttctgataattagataaatcaagggatgaaagctttgcgcatcgatcacgcatatgctcaatcttttgtttcataagagcttctttacgctcctcattttgaaaatacttggatcctttactcatttcatagacaaccctctggactttctctttgtcaactccctccatacctaaggaacatacacacagaaacatcgacgagtttagaaatttaactcaaacatcaatcaataactaaagatgcaaatttaagattttgatattccgcaattaaatcttcaaaacaacacataagaaatatgttcaaagaccagtcaactataacccatgatcaacgaattgatcaattttcaagaaattttgaactctggaagaaacaattcacgaaagaatcctgaaaatttgctaaagaagaaaaacactattggggaataatcgggaacaaaccggctttcgcgttagtgaagacggtattgtaggattcccatggacgcgacgaattgttggtggatgatgattcgccattatccattcttctccaatcttcttccttctcttcgaagcttgctggagaagaagaggaacagtttggtcgccgcaattttatttgcaaggcgtatcggaaaagcccgcccgattcatacctgaaccgaaccgaaatttatatttatttatttatatattgcgatttaacgcctcattccatttcaacttttttataatatccttaaatttcaaaatttcgataaaggaaccctattcgcaattatgcaatctgttgttgtctttcttaagaggtctttaatctggatttcaatttgaatttttaggtcttttattttatattttcgttttatccaaaaatgatacccaaataaaaagtaaaatctaatatatatttatttcttttctgtaaaatctaatatataatggatggcttagtatattttttttttttttgaatttttagtatatatccttatttttaaaagaaactaggttatgaacccaaactacgcgtgagtctatttttaaaattttaataattttttgtgtgactaaaagcttttattgaaaattttgaaatatatgtttttatatgtctacttgtttatatgtttacttgttgttaatattataaactcctggaattttaaaattactatgacaaatagttacaatttaaatacataactaaaaataacttcaaatacaacttttaggttttacaacaattatcaaaagaacattttttggttcataactctctctttagctttagatatttaggataacgacgtctttttacgtatgaaataaattgttgtatggagaataacttcgacgactttcttattttggtacccgtaaatttactattgtttttcgtttatcttcactgcattggttagtctatatagaagtatattcataagcttatctacattttcttttttaatttagaacgagtaacgcatgcatacgtgttttggggaaaagtcgttttggtcttttgatttgaccatttactgtgtatttttgcggtaaattaatattatttaattactttgactaacattaattactaaaatgtgttctattgatcacaagaacaacgagatgtagtattttccagtggtgaagacgccggagataatgtttatccggtgaaaatgaaggtgtttattaacgaggtgcctgtcaaaattgtgaccgtatatttatttttctgaatttgaacttttagtatatatccttatttttaaaagaaatttgagtttgtttacgtttttttaatctaggatctaatttaatttcttgttgataaaaaaaactgaattcatttaaattatattaagggaccaattggttacaattatggttttggttgtagatattctagatgtagaaatattgactgtaaaagttatgaaagttaatttagatatttataagagttttattcgcgatatagttgtatctattatactattaaaaatctagacttctttattggtgaataatatgcattatgtgatatttaaaatcaagttatggtataatgacagatatcgaacaaattactaaactacacgttttgtaaaaattaaatttttaataaactttaaatagtgcaaaaaatatatactaattattttataaataaatattcaaattacttgtttagattttgagttggcaacaattactattatctgatttttatgtcataactcaaaagtaacaatgattattttcattaaaatgctatagatttctctctttattttggaacattaaactcattaataaaaacgggaaattctgtcaaatggccaatacataatatgtcatgtaataacaattggatgacttgtgtttaatttgaaagtaggtaaaacaactttggtaaaacgatatactgtatggattaaaatagagaatttaactattcgtttctataatacaatataaatcttgtaatacgatatgagtgtgttcttgttaggtttagactcactaaatcaagctcaaggtagattgctggccttaactggagaagcaagaaaccgcataagaaggcttacttgagacacacgaaaccatctaatgcttttgtgtgtttgatcttgtgacggaaacaggcggagtttcttgagaagatacctagtagaagcacattcgcacacaagtgaaaggcattgtattctcatctgtccacatggaaaccataaggatactacaaaatcaagaactttagcgaccagaaacgccgtggacaagcttatctacgagtggagaggttttaagcacaccattgactggaaacaaacggtaggctctttagaaatatttatctcccatgagacactatgagcttcaattcacttccccactccactctcctgactatgttattgcatccacaagattgagcttggattctggtactccgttttcgaaaataaagtttgttgagaaaagcaaaaccgattcaacaaaaacatatacagagcaagatatataaattactgagcagccctttttaaaaaaaagtttcatagacaaacaaaaacttatcatcattatcaatttatcatcatcatcatcatcaattcatcataatcatttgttggctttgagccattccagaatccgtttttcagattcactgagctctgcttctgtctttccctttatagatccttcaacaaactcaaagtagtctttataattcctcttgtaaaaactgtccaatctctgtttcattttcccaatatgaacgaaaaaaagatcataagaaaatttcctacaaaagacataaactatgtgcgttatggtatataaatgtcattctctttacctccttatcattcttggctttgttttcctcagtcttcttcaaatactctgaaacaattcttccccaaagaacgacatagtttaggcaaaagaaacattctaaatgtaaagaagaaaaacacaactaagaatttctaattactttggagaagctggtcgctgctggtcaaagcagcggcgatgaaagacgtggaggagaagagaatgtttctgcgtcctaaatcagcgggtggagcagttaaagaatggcgtttggtatcgtttctgcgtacagcttgaacattggaagaagcatatttgttaacagttactgttaaagccatgagaatgctttggcttatggagctcatctctctcttgaccagaagataagattcttgttttatgtctcttatctacattacagagaagaaacaaacatctttttatttattaacaaagagtccctaactatgtaatttacaagaacaaaccctcaaatctattaaaaatagattccaaacccagatagaaatttgtagagacaaaaccggtttaatagacaaatattctcaaagcgattctggttcggtcgggattttgactgtactcagtacttacatcttcttcatctgacgatagcaaaaatgacaagcaatccctaatttcgcctcaaaaaatcccaaaaagcttcgttcttttttagtcatcatcatcttcttcttttcttcttcttcggttgctaaatcgaagatggcgactgctctggtttctcctcttacttcacaactcaaccatgaagctgtctgttccaagtttgtgttacccaaatcgccgttcatgtcgggatctaagctcttttcatcgaacatgccttgctctactgttcctagacgcacaagaagatcacactgctttgcttctgctaaagatatgagctttgaccatatccctaaacaatttcgtggagacaatctcaaagacggaggttttcattttctctcatctttttttttcaccttctgatagatttgttctttgattctatttggtgttgaattgagtcacaaagctatgtatttgacctttgtttagcttaaaccaagtacctgataggccttagcgacccatttatctgcaatcatactaagtgtagcaaagcttgtttctttgggggtttaattccgtttgcagtacgtctatgttgtttatcatctgagtctaagtagcaaattaatgtgggcttttgccttcactaaagttttaacctggagttagtttcagacatactaatttcagtaaagtaacagtcttttgttcttgataagttgtcgctgtataatggaatggcgaaatatattagtttgattgctacaattcttaattggaactaaatttaagcttgaaagaacaaaattcgccaaataagcggttaaatttgaagaacgtgtttcctttaattctctaaatactatttgatctgacatactatattcctcgcctttgttatagtgatgcagaacttcaagaacgtaccacaatatttttacgggcttaattcagctcaaatggatatgttcatgacagaagatagccctgtccgtaggcaagcggaaaaagttacagaggttagtttttctcttctaagccttcttatctgtgcatttacaggtccagaatctggaaacagctaagaggagaacaaatttgcttctctactatatgattcttatctcgtcttttggcatgcttctttgttcaggaaagcatctcgtctagaaataactatttgaacaatggaggaatatggagtatgtccggtatgaatgcagcagatgctagaagatatagcatgagtgtccagatgtacagaggtggaggtggcggcggaggatctgaaagaccaagaactgctcctccagatttgccttctttgctattggatgctcgcatatgctaccttggcatgccagtaagaccttcatgtgtcgataacttgttactaaacccatttctttgctactgtgtttgctctctgcttagctattggatctagctcattttgcttcatttttacttgcagatcgtacctgcagttactgagttactcgttgctcaatttatgtggttagactatgataacccaacaaagcccatctacttatatataaattcacccgggacccaggtcagtagaagaagtttgattatatattgtttgttggtggtagttttctggatttatttagataacccacttgttacttttaacaagctatctattcttttgtttccttttgcttatgccatgtagaatgagaagatggaaactgttggatcagaaacagaggcttatgccatagccgatactatttctgtaagtgattttactgaaactatctacatttttcttctgattgtacaaacacgaagttccttttgctgatgtttgtcactgattattgtttcgatagatggtatgcaaataacctatgtagcagctttgattctcatcgcctcactgttttttatttttatgtggcgtattagtattgcaaatcagatgtatacactatcaattgtggcatggcttttggtcaagcagcaatgcttctttctctcgggaaaaaaggttatcgtgccgtacaaccacattcatcaagtatgtactcttctctaaaatatttgaactctaactttgcattttgatcataataaacaaatgcaatacctcttgcccacttgtgtaagcttctaagttttgatggttaatggtgcagcaaaattatatctgccaaaagtaaacagatcgagtggagctgccatagacatgtggataaaggtggtgctcacattcttatacccttctgtgtaattccctcaagtttctttacctctactgtaatgaataatcctctggcaggccaaggaacttgatgcaaataccgagtactacatcgagctgttagctaagggaacagggaaatccaaagagcagatcaacgaggacatcaagcgacctaaatatctccaagctcaagcagccattgactatggaattgcagacaagatagctgactcgcaggacagttctttcgagaaacgggtaactttcaaaattatacttttatattcacccaaaaccaagtgatctttttgttgacttcattcatgcttaaatggaaaatatatctgggtttaggattacgatgggacccttgcccagagagctatgagacctggaggaggcagtccagcagctccagccggactaagatgatcaattcccaccagaaagaaagaggttgaatcctaatttcctagtcactctggaatatgtagctcttacaatctataagcaaacacatgtggtagtaacatacaaaaaagtgttggcaaaaagggaaataacatcaaaagttatctaggtggaaagttatttgtattatacatgtatctctctagatgcaggtttctcacactctgaaaaaaccgagttttgggttttcgggattttcagaatgaagggaagaatcggttgaggttgtaaggcaatgcgtaaaattcttctgttcgagtatcagtgtggtagactctgaatttctcccaccaatgtcttccgctgtctctcctcaccgaggcatgtccatagctatgagtacagtccaacaagaacgctgccattatcccaaccgttgcagcggaagagaatatcacttgcattatcacgttgaactgtcgttggcaacaccaaatacgaatcaataaagaggacaagacaaaaagaaaatgattgtttctgtttctcttgaacacttacagcagaagtgcgagtgtggacaggtccacgaccagagatgaatagatattcggtgaagtattgcgccacagagagtccaatgaagatggagaagccgaggataaatttattcctaaagctgtttaagttgcagaactgaagaaggccaagtcccgcagaagctgttcataaggtcatctgcttaatctcaatcatatttatagaagctataaggatctgaaagagtttagtttttaagttatacataccaacataggcgaatagaacacagtacagagctgcaaagattggtaaaggtattgatgcaagaacagccccaaacttccctgtttgtcaccaagttttgcagtcgattacaaaaaaaaagaccaattgtcttggaatgacttcacggggttgagcattaccgaaaatggagaagaagatcatgaaacctgcagatatctgaaccactcttctgctcccaaccttcgttaatcctagaagccctgtattttctctacaaatgacaagaacaaacaaaaacagagtttaaaatccgaaaacgagttttcttgattaaagaaaactgcagagcagaaagagaatggttctattacaccaaagctgtggaaccagttgctgttccaaacagtccattcagcaaaacgcctatgccctgtttttattcaattcccacatagcacacacatcggattcacatactaacacacttgaaatcgaatcacaataacaatcaatccgttttacctgccatccaatgccacggctaagcaccgagggagggatatgagttgcactgccaaatcttgaagccgcgatgaaggaacctgtcgtctaatccattggaaaaaattcaacaagaaaaggtgatctatcaaaaagctaaatccttctgcaaaccaaaaatgtgaactgaaacagtagtaaacctcgacaatcgccacgtaagtagctgccatcattgcgaatgcatcacttccatggaaacttggacgtccccattgcaatggatatggaattctcaccctaagaatgaaggaattgtcaaaaatgctctgtgttcttactgaaacagaggagatccaatgaaagatggaagatgaccagaccatggagaagcactaatgagaccagaccggtctgttcgacaactgagctgtgtattgtccggtcttttgtcataagctccagctgctgtcagaatctctgcgtaagcccagacgatcgctattgtgaacagaacagcgaattgctcgcatattgatctcttacacttaaacaagtgaggaagatactgaaaacattacaaccattgtcagaaattcagagatgataaggttttatataaaatctcacgaaattaaccgaaacctgagataaaattatcagtatgatcaatgctgggagtccaatttctatacatctcgcaagctgcaacacaaagactatttaagctccctcaacaaacaaacaaaaaccctaaaaccaattcgatctttatggcagttaaatcttgaatcgtctacctgaggaaacgcaaaggcgaggaggccaacgccggtgagaatcacaagaggagcagccgaaagaggagaaagaaacctgaagtagttttaataaagcaaaagcaaaaccttaaagtcttagttacttcttccacaagtaataatatataatacaacacatgagctttttatctttttttctccggacctgaccaagattctccacaaaccgaagaaacccattatcatatgacttattgaagcaatgataagagctccttgaatagctctcatagtctcttcaaatctctgcatttaacacattcattaatttactgttttcgactaatttgaaactttaaatgttttcaaagaagaagacaatggattgtgtgactaacgagatgaggatggagatagtaagtgaatcgataagagaaagtgatgtaaagagcagggatgaggtaagcataagaagctcccatgaccacaggaagtcgacttccgaacaaactctgcaacaacgtgtttattcctgacacgaacaatactgtgtttatgacttccgctttctccacctgaagaaaaatgacgtcgtttcacatcaatttatttaatttagaaagagttttcttctcgtgaatttgagctattagatgagattagggttaatgcttacgtcgccaccacccattagagggacgagtatggaaggtatgattacagtagttccaagcattacaatgtaatgttgaaacccaagaactattccttccgctgcaccattaatcatataaaaccatatcattttctcaaacatatattgttgacaaatcaaagagaatttggtgacgatcgactaaataactcatatgaataatggaaacgcttcaactgaaatttttgttaaataatcacaaacgctttaaaaacgagttttgtagattaataagaaatacaaccctaatttaaactaaatcgtatagttcatcactatcggtgaaacataaattcattatcctaaagactaaacataattttactgctaatagaacacaactatataacaaaatctaaatgaaaagaaaaaagcatacgccaatttggagagctcgagacacaaaattcgactccgggaagctgatctttaactggaaatggtgcaaaatcatcggtctttgttgccatatctcactcgcttcgagaagggctactctctttgtgatgagagctgtaaattcaaactaaggctttgcttaaaacggattcaaaagtgctaagtaatcgttaggcgggcaactttgttgactctttcttgctttttttactttctgtcttgtgttctcgtgcacgtaattaacactaatgctatacgtagaaaaatgaaccggattaaaccactggtgtgacttaaccagaattgtccacttgtatattcatgtgaagaatatgatgtttaatattacaaagtctttataagtagcaaattattctcatcttaatgccaaaaaagtatacaactaactccatccaccacttaaacattctctttaaccaatatcaagaattataactaatgactaattggtatgacttattgttggcttaatgaaaataagataaaacaataggattatcagttaaaaaatccagaaagatttaaggaggtttattttgaaataaatttgatgaattattgttgctgacttgaattattatcaagtacatatttcatatcataaataattttgggctcatgagctaaaaatgttaatttggtaatttaataatttattttggatggaactaattgctaatgttttattttgactgtaatttgaaattatttggacaattattaatttaaacccaaatatgaaattagtttgtattataaaatcataaatatctaggtgaaattagagaaggttctttctttttactgaacatctgcagaaaataaacctagtaaaacaaatcaactaaaactatgttcaacgaacttttcttttttttacgaaatgatctttatatttcaaattttggagaaattcaaaaataaataaattataaaactttttaatgtgtttaaaacaagtgtatagatttggaaaactctcaaaatatcgcaactaccatgtccacaatttttttttaattagtggtacagtcaactagataattttcagaaaaaataaacaatagagaaaattctatggataaaatgaaaatagcatttttgaaaaaaaatatcacaactaccaccccaccacacatttctgaattatatctagcaacatatttgtattttatgttcaaaataccacttaatcatcaaatttttaatcaccaccaaaactttcaaacataaaccaaattgttcgtgtaaatatgatctgggtcactgcgtattagttttgataatatattttcttgacaatcatattaacacttcatttggggaatttgatattttctttatcattattaaaagttgaatttgtaaatatttagacaatttataatcttcagaatataataactagcgtaaacaaaaacgcgttttaaggccgtttgtaaaaaacgcgttttaaggccgtttgtgaaaaaacgcgtttaaagcttaattggtctaagcggtttgccgcatcagaattgacggaggtccgttactctgaatccttgtattcgcattaaccctaactttttctgcttcccaagcgtctcgaaatctgaatccagagattaaacaaaaattggtattgcgaatgatcgattcttcttcctctaaactctgattcctggtgaattcatctgtttcttctttctcgattgtgtatattctcagcatgagattaggcttcattctgaaagaacggatttttctagggtttgagtttcggcatctttcagtgatgtgaagttggtgtttgctattgcgtcttagtttctgaactattgctgcggtatagtttgataatctatgttagggtttcctcggaacagggaattagggttttactattctgtggtatttgatgatgaattgtgagctacaactgaagaaaaagtttacatttttatgtagaaactttagttctgattggtttcgtgacatttgatatgtattgttgcagaacggacttgctttgacacagcagaccgtaaatcgggatgggtgctcctaagcagaaatggactcaagaagaagagtcagctttaaagtctggagttataaagcatggacctggtaaatggcgcacaattctcaaagatcctgaatttagcggagtcttgtacctgcgttccaatgttgatcttaaggtcatgattacttcttatcctttttgtcagctttgataatgctactgtattttgtttgtgattttatctgactgggagatggtttgtttattgtattgggacaggacaaatggagaaacatgagtgtcatggcaaatggctggggatcgcgcgaaaagtctaggttagctgttaaaaggacgttctcccttcctaaacaggaagagaactcactagccctaaccaattctttgcaaagtgatgaagaaaatgtggatgcgacctctggactccaagtttcttctaatcctcctccaaggagacctaatgtaaggttagaaatgtgtctattttgtttcttgtattgaagaggagttgctttgttgtatctctctcgctggtatttctgaagttggattacatctcaaaatgtatggtttgccgtcactttttattctgtgcaagtcgataagtgttggattacattcatgtgatatgggtttgttttcacacctctgtttaagttgtcttcactggcttagtacatttctcctccttcttactattatcatgcgagccgtttgctcaatcctatcactgtggctttataattgtgaaattatgatgaggatttgtaaagtcccacttacacgtagatgtttgtatcactcaaatcttttattatagacaaattgtaacttttaaaaacgttgcaggttggatagccttataatggaagcaatagctaccctgaaagaacctggtggctgtaacaaaacaacaattggtgcctacattgaggtattctgttttcgttcttgcatcttttttttcttttctcatagacaatatgtattattaaattgttactctcagctaaatcgcatcgtgttacatttcaatttgaatgatcctcagtgggttgatatgttgtcaactagaacctgtgaagcattgcggatgaaaaccaaaatatagcctttggttgtgtcaatagaatatattcctcaatatcaatataggcaacggatgtggcagttttattgcaaggcaatgggtgacatctttatcttctcctctcctgaatagacgaatgtgcattgaatatcctgactgaaactaagctgaaagggctagaaatatttctgtaattacgagatttattgtggtggcatctacttaagtcgatataattatgagaatatcgtaagagtagattctgtagttaattcagaaacacgccaatgacataaatattttcgtctacttatgtgattcaagcatgggaaatattgagttcaacttgtacgattactgctttgaagattctttgtctaagttccttgtaaaagactgatttagaggactgactgtacccgtgttccttttttttttttgtgtaggatcaatatcatgctccaccagacttcaaacgcttgttgtctaccaagctaaagtacttgacatcttgcgggaaacttgtgaaggtaagaattcctacattcatttaatgcttttgagtgcatatatttttggtcttttgaatagtatgtatgactttttgtgcaaatcaatttagttcatggatgtcagtagaacagagacatatccattattcactgcaacttgcgaggtttattgatctgggctttctcttttacaggttaaacgtaagtacagaattccaaactccactcccttgtcttcccacaggagaaaaggtctgggggtgtttggaggaaaacagaggacttcttctttgccttcacctaaaacagacatagatgaagtgaattttcagacaaggtcacagattgatacagagatagccagaatgaagagtatgaacgtacatgaggcggcagcagttgcagcacaggcagtagcagaggcagaagctgccatggcagaggctgaggaagctgcaaaggaagcggaggcagcagaagccgaagcagaagcagctcaagctttcgctgaggaagcttcaaagacattgaaaggaagaaacatctgcaaaatggtaaaaaaaagaaaaaaacacccatattcttttatatcacaagacattatatctatgagagaactttgaaaatctcaaaatgcttttgttgaaaatgtgattcgacagatgatccgtgcctgaggtaatggaaagcgagagaagaaggagactaaatgtgaagagagagtagagagaagcctagtgtttgtgttgatcattctctttacttgggaagttgttttttagtagtaagcaatcaaatatgtttgtcagtatgtcgtcgctctgactcttttgattcctgcacaacttttgggaaaaaatgttttatttggctcttctcactctccaatatacatacaactatcgttagtaatgtgtataatttatagaccgatctatctatgcactatcatgcttatcgccaatgagcattttgattatgtatgtattatcaattaatagtagtactgtttttttaagatataaaagcacaatgactttgggacactatatggatcgttttcgggttcagaaaaggaattaaatccttttaaatcccctgtaaatcttttaaaaactcttgtaaatctattttctattaaaattattttttctggggaaaatgatcttttggaagaaaaaaaagtttggcgggaaaatttttgtcggatttttttggtcgaaaaattatcttcggaataattttgataggaaaaatcattattatattttttaaacctaaaatattttcaaataagagtaaaatgaccataaaaaatcaaaagatgggataaatgaaaataaattacaaaaaatgatagaattgaaaaggagtagtttgaaagggcattcctaacaatttctcccgattatatatgtagttgggattattaggtgattgacagatatatatataatcatccgaaatttgacatactaaaataatttgtaatcattgatattaaaaataaaaagaccatggtatttttactataattgtgattctgtaaagaaaataatactatgccactcacagtcactgcatagccaacataggattagaaccaaaccgagtcaatccaaaattgttcacggagcacggtaattacatcatggttaagctttaaccaaaaacatttcaggctgttactaaaccaaaattttaaaatcttgggttaaattttgggctgttaacgttaaacatttcacacattacaatcggtgacgtgtcaaaaaataaaattcaaaattctattctcgaaatgggcggcatttttgtttttccaaaattgaattttgttaaatagtctgttagaagacaatcatctacaagttcctctctgatctctctaatattttaaaacccctaaattctccatttcaaaaaatgtctgtaaattttgagaagcggtgcttttccggcgaccctgcttatgccaccagcgactagaatctagaaattgcgttctctcacgttattcgatttaatggtcagagattctcgaattctggattttagtcgagtgaattccgatgattacgagtctgtttttgatttgtgtttctctgctacttgattcgatttgctgttactatgtctcttgttacttaatttgtcttatcgttacgttaatcttcttgattttattagaaatcaaatgattttgtcatttcattgctttcaataccttctaactcctgatttgtttgatttgggtttgacagatcactagcgtctagcgatcgcgaaactgggggatcaagaggattatgatttgtgacgagaacaggactctttaaaggaagcgacagtggatgagaccgtggtggtggtgggtggccgccgtgaggtggattacggaggcggtgacggaggtttgtggttttcaatcgaatttattatgatttaattccaccgtctcaaatttcttgtgttcgtttttctctgcgaacccaataagtttgattttgaattttcgcgatctcatccgatcatttttgatctaatttgttgtgtctttggttgatagaagcttttagaaatcattttggttgtggaaaatcatattgttttcttatgtcattgccattcgaaattttaaaggtttgttgttttgattcatatgcatagttatactgaaacttgctaatagttttccaaatggtgataaaactttagaagacacttgtacattatttgtgttctcttcataagattcgtctaggtcgtaattcagataagtgaaagcatctttagtgttgacatactcatttattttgatctctgatatcttgtgctttcttttctcaaattttggtgtagggagcaattggcgactctatctcctttgcaaagagtttgatgttgtgtcacttttcttctgcaacaacaaattggagagccacagaattcttatgggttgttcgcaatcattcaaccaaatgcatacacatacatacatgcattcattcatacacacatacatgcattcattcatacacacatacatgcatacatgcagtcatttatacatacatacatacatacatacatacatacatacatacatacatacatacatacatacatacatacatacatacatacatgcctgcatacttacatacataaatgcatacataatttacattgcaaacatacatacatacatctacgcttatgtataatatgtatactttcgtacttttacacatctataatttcttctctgcttctttgagtcgttgtttacttacttgattccttaattctttgcctgattcttcgcttacttttttttttttttgtcaatccaagtttgctttactcattttacttcttcattacttgttctgttaccaacttcagaggtatgttgcttacttccttcagtccttgtgagcttgcttccttccttaattcttggtctgattctttgctttcttcattccttgtttaattaccaggttcagtggtttgtcgtttacttcctttgattccttgtttacttagtttttttttccttgcttcctcattagcttcttgcttcactgtgtacttgatttcttgcttacatggttaacttgattccttgcttacgtgcttaatttcttacatactttcttttccttaactacttgatttgcttaatttgttttcctcattttctatccttaacttgctttcttatttgctcatgaactgtctctgtttattaaatatttgctttgctttagatcgttctaggactattcaaagtccttcagagcaaccaatcagctaagttataactgtcttaacttgtcagaccaaataaactaagctagataaagtttatttgattatttcttatcattcaatttatagaacctttaagcagtgctagaagtttctggaaaaacttcatcttagagttaaacaatacattccgccaacaatgaactgtcacttgtaagttgtctaactcttaagactcaatgaacttcttttttgttttttttctgaaaactacaacaatcttttttgataacaggcaaattttatgtttgttgaaggtatggctgagacaagctcaagaatcattagaaaatgtactcatcgatctctataaggtaaataaactctaaccgataccattctcttgtttctctcagttattgttattagattgtagaattgacaaaattggattgaaattttgagcaaaaaggtggaagaactaaagagcaagttgagctcttaaagctaaactttggatgatatatcaagaagaagcattcaatggaaaaccagcaaagattgcgagatctcatggccgaaatttcaggtcacggtcgagaaggaaacctctaggatattggtaagactaatctcactagtctttagttttgatttgatttatgaattctcttgatcaattaactgatggatttgaatgtgatgttacaacagctgaagccgtgtatcggaaactcaagtgatagagccagatgcaaacaaggcttgtaaaaagttgccaaacataaagtgcattgtcgaagtcttactgaagtggctagaaggaatgaagaaaaaacttttcaaagcaaaggtttgcttctaatacctgttttgtaaacgcagtatgctcaagatgcatctttggtgcctcaaatttaaacttcatattttcgcgagtttatcttctcttaacatgcaaatgttgagctcctcctagtacattaactttattgcgtttatgcaaacatacatactagttgtgtatatatatattaatattttttccttttttcagagtcaggttggaattatatttgaggccaagaaaggtaaggcatattttgttagctttgcttacaatgttcaaagttgtctagattttggtatatttgttagcttacatctctcttgatttatctcagaccaagaaaggtaaggagaaaataaaaatgcaactggctctaacataagtagatcggaacattcaaaagaaacttcattaaagtacttttccaactcaattgacaaattctctcatagaagttctgagtgctcaagtactgatgttctttgtttatgtttccaggactagtaggtagaagatattttggataaggacgaggacgagggcaatgatggatactatatggatgtggagttgcatggccatagcaagggttcctctttttcaaaatctaatgcatcgttttaaggttggttgttatatataaattttggcataatcttggcttgctatgcgtttggatctatctatttgatcaatgttttggtaccatattacagattcaagtatattcagaaccagagtcttcttaaagtggatgagtgagacgatggaccactttgacacaaaacaagatcagctctttgaacaagtgaggtttgcaaatgagttagatgatgaacctctttcaacaagatttcgatgtggaaggaattttaatcattcgtgaaggatatatctgatgtaaattttgatgccagacacaacaaatactgtgagatctcatggcaagaaatttcaggtcacggtcgagaagaaaccactaggatcttggtaagagtaatctcactagtctttagttttgatcagatttctgaagtctcatgatcaatgaactaatggatttgaataaatgtggtgttacggcggaacgtcggatgggcttatatgcaactaagggtctatagagcagctaaagacgaagtcttactgaaattgctacaaggaaatggaataaccttttcaaagcaaaggtttgcttctaataactgttttataaacgcaatatgcccaatctttggtgcgttgaaatataaatgttgaatttctgcaactttaccttctctcaaacatacaaatgttgaattcctgctagtacattaactttcttgcgtttccccaaacatacatactagttgtaaacatatatatatatatatatatatatatatatatatatatatatattgagattcttgtccttctttcagagtcaggttggagatgcttataaccaaatttgggttgtgaagcctgaggaaaagatgaaactcctgaaaaatacgaaaggtttgcttacaatgttcaaagttggctagatttcagtatttgtgttaactcacatcttctctcggttcatctcagatcaaggaacgtaaggagaaaatatatgtagctggttctaacataaggagatcgcaacattcaaatgatatttcattaaaagtacctttccaactcagttgacaaatgctctcatagaagtatttgagtgcttaagccctgatgttctttatttatgattttcattattgatataggtggaaagtattttggatgggggcgaggacaacgatgggaaatatatgaatgcagtgtcgcatggccataacaagccttcctcaatttttaaatctaagaaatctaaggcatcgctttgaggttgattgttatatagtatacacattttggcattatcttcgtttggatctatctattcatatttttggtacatatgacagatccaagtatatcaaaaccagagtcttcttgaagtgaatgagtcgatgattaagcgctgacttaatgttataatacaaaacaacgtacgttagcactttgaaaaactgaggtttgcaattgagttagatgatgtggaaggacttctaatcatccgtgaaggaaatatctaatgtagatttggatgccaggaacaacaaagctagtagtttctctgtaaactaataaaggaagaacattactggaaatacaaggatcgaaatctattataattcttcattaattagcttttagggcttatatatataccaagatttaaacaaggtattctggtttgtatctaaatattttacttggtggtttcagttattcagggtttgagatattggcgtaatcttgcaaccagcttctgagccaagagggtcatgaattttctggcagaaggttaaacgactgaatactgcattttctgatcattcaatttctagaacctatgagcagtgccagaaagtttctggaagaacttcatcttggtgtaaaataagacgatccgccaaccacgaactcccacttgtaagttgtcattttaatgtaatttacagttactataccaaatcatataatatataattttcttaacttatcgtgaatgaatatacattcagatcaatggaactatgtttgtagaagggttattatcctgtacactctgtatcaaacattttatacaagctagaagcattgccagaagattctagaagaactcatcttcgagtattataagacaatcaaccatccacgaatttccacctgtaagttttcattttcttgatcccatgatttttcattatgcataggacaactttttaatcgtacgaacgacttggtaggtcatcttgtatatatttgcactgatggtacattatttcacgtgtatattgttttagattttgcacttaaagcactgcaattcgtagctaagagatgaaacataagagatgtagttctagagaaaagccaaaaattggatcaagaaacagacttgtggaaaaatatcaaatcttttgaatggtaattcgataagaacttattggggtctttgtttctcttgtgttcttaaatcagaaacacattatgtcgcttatctctcagacatcgttttgcttatttcaggtatactgcaacttcggacataattaacgtatatcgtttcttaggttgactcctttccctagtatgttactccaatcttttctgcaataatctttcggtttagctattatagtttccagtaactttatttttttgatattacctatatatacaagtatttcgtttcttctcttataacttgaagttatcatctctttcatttttatgcaggagccgatctcatagccaacaaactttgtgaattaaaagaagttatgtggtgagtaaaacaggtatagaccaattacattgacaatgttgtctttcccttgacagcgtgatatcccaaccattgcatgtatgcgcccactcatgtacacatgcatatattcatttttgcatacatagatacatacatatacacatacatacatacattcatacaggggcggacccagcaaaaaaagttggtgggggcaaaatgttatagggatgaatcgaacatgggtttctagcgaaaatttgaaggatatgaaaccatttggccatgccacttaatttgtttagtactaattttttgttaatttagatattagtggtggcaggtgcctccaccttccttaacgtggatccgccaatgcattcatacattcatacattcatacatacattcatagatacattcaaacattcaatcatacattcattcatacatacattcatagatacattcaaacattcaatcatacattcatttatacatacattcatacatacatacatacatacatacatacatacatacatacatacatacatacatacatacatacatacatacatacatacatacatacatacatacattcattcatgtatatttgcttcttagttcattgcttgtttctttatttacatcgttaacttattttacttgctctcttctttgtttcgtttgctttcatttgcttaactcggttgcttgtttaaattttacatacgtcctgctttgtttctttgatctttgcctactcaatcgcttcattcatttcttaacttgtttacgtctttcttttctcaacgttttaatttatttactaaccatggttattatttaaatcatgttatagtttataactatttaaaaaccatcagctttaattttaaaaagtaaatactactttttattgtggatgtattacgaatgtataaactcttgtattcaatttgaaatcaataaatgaatgagatgttatataaaaaaaaaaaactactctaatagctacttaaaatctagtgtaaattgataaaatttggaaatgacactagaaatggaagaattttatctctttacatttaatggaataaattgtcatcaatttaagtatttattactttaactttagtaaatgtgatgatagcattatcatatgttatattctaccgctttttgtaaggaccaatatataactacacatatttttatgatgaaacgatagtcgcttttgtattcacaagttattggaaaaagacataaaaaagattttttttttgttaaagagagtacattgttgaaagcattatatattttgttttgccctttttaatccgatttgtacccaaaataatatattaaaccgagttttatgcaatctgaaattattgaaaaataacgttttaaacaattacttcaaattgaatcggaaccgaaacttcaaccacatatcattagtccttacaatcatatcaccgcatcagtaactccggtgacacaacccaacacagtcaaagcgcggtcgtctcaactgccaacaacttcacctcaccctcatcaaaagctctctacgcgcatagcaagcatgacattcaccttcataacttgctatatataatgctatgttaaatatacacaaatttataaattcacgttttgtaatacgtccaaaaccgttgggacgacgttcaatgagtaaagcaaatcgaaacatagtccttcattcattaaaagaaatgtcattgatcatttaatgttcaaaaactagatacatcaaatatctttaatgtccatcatctatacatgcaatacacttgtctagaatcaagctatgtgctcttccttctctctgtacatgcagttcacttttgaagttgtgcttcaccctagcttttcggatagagttgccacgagatcttcctgagctttctctaaggcacttgagagattttcgggctttctttccaccacctcctccgccacagagcttagctatgggggcaataattttcctgcttgaactcctagggagactattccaggactaaatgcagcaactaaactaaccttgtctttctctggagatgaacctagtaccacaacgactggatcatccaatgtgcttatcaaatgctcagctgcactctttaatgagtcagcatcggtgtcatccatagactcgacgagcactccaaaggaattaaacattcacagtagttgacatattatagtgttagatcatgtgtcaattcatctgaacatcattatcatatcaagcattgtaagcaggaaacaatagattaccttatcgtctttgaagttcctacagtaaatgcgttgttcgatatgacagatgctttatagaccgctgcttttgaacgcaagtcggaggcttcttttctatcagcacgcagttcctctaaagattctccactctgtttgtaacttcctctgctttcacttttagattaaaaccaaacaacaataggtcgtcattagtaactactaccttgaaagcagcaaatgggtagcttgtttttttttccgcattcaaacatggaatggataagcagaataccttttattttcgtaaaacacatatcaatgggctttatagtttgggcctaactgttttatttatttattgcgctctgtatttattttgaaaattaggatgctgctatttgagagttcctcctaggtcaagcatatgaaaaggcagttatcatcaaaccaccggagaattc

SEQ ID NO: 28 - DNA, 141753 bp, Arabidopsis thaliana
  unsure (1)..(141753): unsure at all n locations
nnnnngaattccacaagttctttatctcgttgtcggttctcccgggaagcctcgcagcaatttgcgaccatctgatacaagataacaggggatttcagaaaatactctgtttcagaaacagagaataattgtaattgtgattgttacctgtttccaagaacagcatgaagctcgacaatgagattctgttcctctgaagagaaagctcctctctttaaatcaggtcttaagtaattgatccatctgagtctacagctctttccacatctctcgagacctatagaatcatacaactctggttctgtaaatgacttaaggaacaaaaacacaattttaggcctttttcggagaagagagagttttacctgcgagtttagggacagaactccagcaaccatggccatgtttggtaatgtaattgagaagtttctcatcttcttcaggagaccaaagaccttttctcagcttttgtttgtaacaacaagaatgtctcttcatgttgcaatgctgtggaaaagaacaatgaagaaaaactctggtttcttggtaatgtattgatgaaagagaaagattaatggattgtgaaaaaggttgagaaaatgaagtaagagatgtgcagagactaatacataaatagagaggctatggaaccgacgaaaaaaaagaaaaaggaaacaaagtcactttcataagaagacttttgttgaattttatggtttctttttctgtatttaactttcagagaaaagagacaatatgatgtgcttagctgggaccaaagactactcatgtataagtcatgagactcgtgtcttttctttttttcgagtgtgggtgtggaatctatagaaactaaatcttgttttcaatttcattatactttattcaattaggtttaaattttaactataggtgctattcgaaggtaactagtttgggtcattttgactaaacctatgagaaaatgaaaaatgcgttgtatattgattggacttctcgttttgacaacctttcatgtcacctaattgattgtagtcgactatgcaaatttttctcttttcgattgggtttagattactcataccgccctaagaaatcgactaaagagttgattttcgaaaaacttttatcgatacctatggctggtttgaggcttattagtttcaacgagacttgtgatgatggttaatgtttggaatgtttaaactttgaacttatgtttatttagttttgaagagatttatgatgataaaaacaatgatctatttcataaattataattctaaaaaatttcattcaaaagatttctctaaatttgattttttttttgaccgggcatgttaattaattagagtgagaaatatattgtacttgaacttgtaccttgagatggcggttgaaatacaattgtttcaaactttatttcttttggttataagttgtttatggattttttctttattcttcgttataatttttttttttcattttaaataattgagcatttgacgagggaatctcttgatgcaggaaccaccaagaagcatgaagtagctagacaatttatgttggttaatcggttaacaaaaaaattatgttggttaaaataaagatcgacaagacatatctcataatcaaacacaataaaaaaatagggctacttgattctattgtatgaaatcatgtaataacgaagctgcctttaaggtacttcggattaaaaattcatcaaatgattgaattatattggaaaatcatataattcattgaaaagactttcgaatcgaaattgcagacatacaagcttttaacgagtatcttttgcttatactattaaattaagtcgaacaacacgttattgaaaaaaatattatgctatatactaatattatttcctcccaaaaaaaatcatcatcctcttcatcaatcatatcataattagcatgacaatgatccgccgtaagccttccattatatgaagaaggtcggattttgaggtattgattttgattagattcgaatgatgcatgcaattataatatttttggtttatggagcaaaaactttgctttacttttttcactgttcaaaaggattcttataatgaacttcataactatttttctgagggtggaattatggtttctaacataaacctagatggtaatttgtggtgttatccatgttatatatatttgtactttaatattaggagatgataattaattattttggcttttcatttcgaatctcaattccttttgtattggttatgcaagtttgttttgcagctaccatgtaagtaaaaatgtcatacgaactttagtcaaaactacttttaaatttaagtctttgcaatttaactagttgtgtatataggaaaaaaaaacactacttaattgatactgtaaactgttttaataattgaagatatcaaaatattagtggatgttatattggccattttttttttatatccgcaaagtttggaaccaaactccgtagattttcataaaccaaagtgagtgaattcaccgcttcacaaatgaaacttaaactagagggctctaggatgaccctagtttatttgctactagaccgagcaacacttgatattgaactaaacttgataaaacagagattttgatacactcaacatatacttttatgttgagtgtatcaaaatctctgttttaagttggtgaagcgtgtacccgacagtttcatgtccacatagctcaacattgttgtatttattgatttatgtgggcgtttcaataatctgtgtaaatccaagatatcattgtcgtaaaaaaaggcgagggtcagatttgtatagcgacactccccgtgaaacagttgtgcaattttacatgtttacatagaattccaagtatttaaagaccaaccctttggccgatatatgtataattgtacataactaaattctataaaacgtagacgataaaatcataatgtggattttatgcatgtcgttaaatggtatggtgttatttaacttgttcatatatgtttttttattaacgagtttacttgataaatgttattcacttatttcacgtaatattacggttattatacaagtttaacaatcacatggaaatatgtactatttacgattttttcatcgcattttttgtcaaacaaaaaggtagaattaagttataaaaaagccctacatatcaaaaagttatattgctgaagacgaacgaatagttgccatgcttaacatgcattgcattggaatggtcaaatagagatgctatgaatatatgagctgtcctctcaagtcaattgttcaataactcgttatattatatgtaatttataagctaatcatcactgtccttttcgtttgtctttgtcataagattgacagaaccaataaaatctgaggacgattaaattaatatataaagaaactagagatttaatattttgaactgaataaaagttatatagattacatgaaggatcgttgtcattatcactaccacaaaactttaacatcattcaccgacaaatggaaaacattaagctgttcacttaattaacacgcatctcatatattatttccctcgtatatattaaactttatagatgagatttaatttctttcaactacctatgcaaaatttattttatttgatgttttgtgacaattatattaatctttgataattagttttggttaaacttttttttttattatccatttttgtcaaccacgtaattaaattaaaaaaatatatcttaatagattatctaatatgaaagaaccgagtttacgaaatttcatttttaaattagttttgactaatgggtctctaagttattacacccgactaaatatgtggagtcgataagtgatagcaagttagatttacttgttctaagctaaactaacaaatatagataagttaagtagattaaaacttacataattgaatatttacatgtttggaaaaaaaacttgagtaaaagaaaaaaaacttgataaaaatcactaaaaattatgtttacacttgagttaaaagcaaacattttatctacataagatgatactaatacaaactaatggcctatatatatttgtaatccatgaaatttaattttatttttgtaacagacattatgattgtaacattttaatttctttgcccaaaaacaaaacattttatttttaagttattcgacttcttatttgtgttcatcccatttttttgtttccaaccgatgaacaacggaaggttgcgtcaaaacgcaaagggttgtgttgtttgtgttgaagtggagctccttcattttaggaacaagcagaggacgttacacaatcaaactcagtttcttcccttatttaacgtaaccactaattctattttcttgttcttttacaaagttcataaatggaaatgaacacgtaagaagaaataaaacaaagttcaaaactaagaaacagaaaaacaaaaaaaaacataaaaaaacatataaaaaaaacataaaattacagaagaaaaaaatgggtagcttccttgaggttctttgtgcaatcttcatacctcctgttggtgtgttcctcagatatggccttggggtaaatttttttcattcataaatcataaaaatatatgacacatttgacattaatggtcaaagtaagatcaaatctcttgtttttttgtttctttgtatatgtgtttgcagttggagttttgggtctgtttgcttctaacgttattcgcttttatccccggactgatatatgccatctacgttctcaccaagtaggaataaccaatcaaaaacactggatcctttttttattttataactttttctttttccaacaatgtttgcttttttagattttttatgttgtatttaaggaatcagttttgtaatctagcaaactttttgctatgttagatgtatgtaaattccagcagtttccaaattgctgttgttctagtttgcagaggttatggatacattttacggatcataaacagatttggaagattgatgatattattatatgcgtgatataaattttgaattgtagtaatactacatctaaagagtgatcaaattattagtaccattaggaactataaagttctgatagagatattacatggagtcatcgatacacacagtttacttatgcgtataacgataaatataaacctgtgtacatacatttataattttatatagcttctgcaattccgatttgaagattgcttgaatcgaataccgtgtggtataggctcccatgaagacgttcccaataatccctgcatatacaaattctttacctcaaagtggtaagcaaaaaatgtaaacaaaatctattgaaatcgtcccatcttaccaaagaggatcaattggtatagtcaatgctctcccataatgaaaaaaattatgagctacttggttacaacaacgattcgaatgagaaaaatattattttctaaccttaaatatccaagatatcggtgtaaattccgataatagatgcgtctattaatccattgttaatgctgtcaattaaggttttttgcaatcccctctaactctctaagtgtacctcggtgaaacctcgaatctactttacactaacttttaattagttcgtactaattaacgaaaaaaaaaccttttaattaattcagaaagacagaaaccaactccttgaaaaaacaaattgtttttccgagccacgtgtatcacttggatccgacgattattgtgtccggcccattaagatagttaacacttattgggcttccaaatatcagctaattagacacgtggatctgattctcttctccgtcttcttccgacaagctcgacggcgacacagccaaagaaactacgcatcaccggtaacgacagagattgcttttgcttctggtatttatgtaccaattctgctctcttttttactgcttagatcttaacccatatagagttattatatctgttgctcgtttttgaagttgcccttatactgctcgatgaaatgcctcagtgaatatcttaatcacaaaaccgaatagtttcgtttctcttatacttaaattaatttggtgttgttattacagagagaaatggcgttaaggcagaagttaggatggtcagaaggagatctgatgagatcagatgctaagccatgttcaagactgatgaaacaaacagctgccattttcactgttggtggagctcttggtttctgggttctttgcagacttcactatggtaaacaaagttctctcctttctaatcagtgatttgcgtttccatcaaaaggttgttctccatatagctattgaatccagtgctctgcataattgattgttagaaagatttcttgtagccttatgaaaacataccaatgcgtattaccattctgttttctgttctgtagtatccgtttcttatgagaaaaatgaatccaaaaggagctttgattgaatagtttgatgtggtgaaagattggatctttacacgttttgggaagcaatacacttgttctttgattcctattgtcatgaaaaatgattcttggggttggtttgttgtttatgtggttttaagagtaaaaggaacgtagaatagaatagttgagtcaattctaagatagaacggttataaaagcaaatgttttctttgggaaatgtgtaggtccaaggatcacagtgccaaggagtctgcggtgggctgggtgtggtgctttgtccgtaagcacatcaactgcaatgcttgtccgtctcttcagccctgaatgtgaaccacaaaacattgctgcatatgataacatcaaaacccctcaagcttcactcccttaaaccccatcataatctggctttacctatgatgtgtatggacctcatcttctgtacattttcttgcagtacatgaatttaggtaactatttataatactaccaaattctgtcactttttgtttcctttagaaattatggtgtattttttcatatagcctttaggttgatagagttaagagtatcatcctatgctcctctctcattttcgtgtgtgtttgattatgagtgtagtgtaattggccattggtcacactcttttgggagagtgtttagctttctaaagcttttgctgtcgaagggaagacctttggatttatttggagggttgggtctcactatcccctcaaactagtcataggtggaatatccacaccgaggttgtgacttcatggagatgcctgctagttaaatatgtgtaggaatatgtttgatcaccaacaaacctaatgctaccatttctcgagcataattaattaattaattataatcgacatcaatgtgttttgaatgtgagtaaagagctaggatttcagtgatattgtcatatagacacagcatataagcctgtggtattataatgtcatggagaacataacttaatcaagtgaattctgcaagctatggaggccaaagatctagctttttggaacggaggttgtttctttgcatttcgaatgaaaacaatagttgaagcagaacatccttaggtcaatagtttgaatccggtagggtcagatcttattttctaaagcttgtttcattccattttcagtgttctttgacaagagtattacaacaaaatcgttatcaaaagagaactcaataagagaaatgcatacatgtcaagttttttttttttggtaaaaggttaagttacgttacatgccaagtttgttatagggaatgagtggaaatgtcagaggttactttcactatacttgacaccttatgatgtttgaaccattgactaggcagactacaaaaccaaaagatccatccacatgtggtttttgcacagttcttggcgcaaagaaacaacctcctgtctaccaactgagcgaaggtcgaactgtactattgcatttgatacatgtgtaaaattataacaatatatgaacacaatgattttgcagtactttagaatatacagagtgattcctctttaagaaattgtaaacaaagttagaaattagaatgcatatcaacaatatatgcaaacatgcttcttggaaaaatctggtagatattcgaaagtgatggctacaactcgaacggtttaaatatcctccggtgcccaaggcctaccagttgataacaccacgtttaaggcgtcaatcacctcccaaatggtcgatgattgttaatattcttggaaaattaaagccatgaaaatcgtgcaacaaagtgggaaagggtatttcactacacttgaatgaacattgacaacttataggcacaacccacaagctattgaatagaattattcatacacattcttttttcattgcaaaactcaataactataggttgggttgatcaaagaaaattagaaaactcattgttttaagtaatttcaaatattttcttatcgcatcaatattgaaaaagctaaaattacggaacatctacaacttcgagcaaaacttttcgtgcaacaaagtgggaaaaggtatttcaccacccttgtatgaacgttgacaacttataggcacaacccacaagcatttgaatataattatgcatacattttttgttctttttaaaactctaaaactaaatgtttgtttgaccaaagaaaattagaaaactcatagtttttagtcacttttaaatcatttttcatcgtatcaatattgaaaaaagctaaacatacggatcgtttaagaattcgagcaaaacttttcggtatgtttaattgtcgaccaccatataaccgtttattataaaatttaaaaaccttaatgtcacaacgaaagaaaaataaaaagatctcgtgtgggagcaaattccgacctaccggattcgaaccagtgacctaaggataatctgcgtctactacagtcctccgctctaccaactgagctaaggtcggattgtattctatttcatgcatgtgtactgatctaaatattctatcaacacaatgatttgtattaagttagcatactcatagtgagtctctattacaaatttgtaaacaaagtttgaatttataaaaacattatattagaaaaacacttaatatcttgcctaaagctcgtaaatatacgaaaatgagggtttacccttaaacggtttaaaatacagtgaaaattacttcgagatttcccactcatttctgataatacaatcaatagctatgcaattctcttaaaccaatttctcatagaaaaacgagtttgtagttatactcttgtctaagcactttgaaacgaaatggaaaaaaaaaactttcaattttaatgatccgacctaccgaattcgaaccagtgacctaaggattatctgcgtcaactacagtcctccgctataccaacagagctaaggtcggttttgtattataacactttatgcatgttgatgattcgagagaaactttttaatcaaatttaaacttatcaagaagaggagtagaaagaaagttgacttcatatctttcatgctatcttgttttttaaagttttttttatcaatactaaattttactgaaaacagtaacatgatggaaaactgttcaaattctaaaacgatccataaaacacaataagtaattttaaaaacttaccaacactcaaaataaaaacgtaaacggcatgattcgaacctgcgcgggcaaagcccacatgatttctagttatgcccgataacaccactccggcatgtccactttttctctaaactaaacttttatttcaaaatagactaaaccgtataccattctctatcctaaattttgatcatgagtgagaagtagaagattacaaggatgacccagtttatgaacaaaataaaaaagattagaaccataaacctatttggctgtcttgattttttagaatttttataatattttctcaattcaaaaataaattatttctaaagagcaactttgatgatatatttatgcatgtaatattgagattgtgctatgattgtttatattcttgaaaataaagccaaacaaatcgtgcaacagagtgggaaagggtatttcactacccttgtatgaacgttgacaacttataggcacaacccacaagcatttgaacataattatgcacacattttttgttctttttaaaactttaaaactaaatgtttgtttgaccaaagaaaattagaaaactcatagtttttactcacttttaaatcatttctcatcgtatcaatattgaaaaaagctaaacatacggatcatttaagaatacgagcaaaacttttcggtatgttgaattgtcgaccaccatataaccgtttattataaaattcaaacaccttaatgtcacaacaaaagaaaaataaaaagctctcatgtgggagcaaattccgacctaccggattcgaaccagtgacctaaggataatctgcgtctactacagtcctccgctctaccaactgagctaaggtcggattgtattctatttcatgcatgtgtactgatctaaatattctatcaacacaatgatttgtattaagttagcatagtcatagtgagtctctattacaaatttgtaaacaaagtttgaatttattaaaacattatatttgaaaaacacttaatatcttgcctaaagctcgtaaatatacgaaaatgagggtttactcttaaacggtttaaaatacagtgaaaattacttagagatttcccactcatttctgataatacaatcaatagctatgcaattctcttaaaccaatttctcatagaaaaacgagtttgtagttatactcttgtctaagcactttgaaacgaaatggaaaaaaaaaaactttcaattttaatgatccgacctaccggattcgaaccagtgacctaaggattatctgcttcaactacagtcctccgctctaccaactgagctaaggtcggttttgtattataacactttatgcatgttgatgattcaagagaagctttttaatcaaatttaaacttatcaagaagaggagtagaaagaaagttgacttcatatctttcatgctatcttgtttttttaaggtttttttatcaatactaaattttactgaaaacggtaacatgatggaaaaccgttcaaattcaaaaacgatccataaaacacaataagttattttaaaaacttaccaacactcaaaataaaaacgtaaacggcaagattcaaacgtgcgcgggcaaagcctccatgatttctagtcattcccgataaccactccggcacgtccactttttctctaaactaaacttttatttcaaaatagactaaaccgtataccattctctatcctaaattttgatcatgagtgagaagtagaaaattacaaggatgacgcagtttatgaacaaaataaaaaagattagaaccataaacctatttggctgtcttgattgttttgaatttttataatattttctcatatcaaaaaataaattatttctaaagagcaactttgatgatatatttatgcatgtaatattgagattgcgctataattgtttatattcttgaaaataaagccaaacaaatcgtgcaacagagtgggaaaggttatttcactacccttgtatgaacgttgacaacttataggcacaacccacaagcatttgaatataattatgcatacattttttgttctttttaaaactctaaaactaaatgtttgtttgaccaaagaaaattagaaaactcatagtttttagtcacttttaaatcatttttcatcgtatcaatattgaaaaaagctaaacatacggatcgtttaagaattcgagcaaaacttttcggtatgtttaattgtcgaccaccatataaccgtttattataaaatttaaaaaccttaatgtcacaacgaaagaaaaataaaaagatctcgtgtgggagcaaattccgacctaccggattcgaaccagtgacctaaggataatctgcgtctactacagtcctccgctctaccaactgagctaaggtcggattgtattctatttcatgcatgtgtactgatctaaatattctatcaacacaatgatttgtattaagttagcatactcatagtgagtctctattacaaatttgtaaacaaagtttgaatttataaaaacattatattagaaaaacacttaatatcttgcctaaagctcgtaaatatacgaaaatgagggtttacccttaaacggtttaaaatacagtgaaaattacttcgagatttcccactcatttctgataatacaatcaatagctatgcaattctcttaaaccaatttctcatagaaaaacgagtttgtagttatactcttgtctaagcactttgaaacgaaatggaaaaaaaaaaactttcaattttaatgatccgacctaccgaattcgaaccagtgacctaaggatgcgtcaactacagtcctccgctataccaacagagctaaggtcggttttgtattataacactttatgcatgttgatgattcgagagaaactttttaatcaaatttaaacttatcaagaagaggagtagaaagaaagttgacttcatatctttcatgctatcttgttttttaaagttttttttatcaatactaaattttactgaaaacagtaacatgatggaaaactgttcaaattctaaaacgatccataaaacacaataagtaattttaaaaacttaccaacactcaaaataaaaacgtaaacggcatgattcgaacctgcgcgggcaaagcccacatgatttctagttatgcccgataacaccactccggcatgtccactttttctctaaactaaacttttatttcaaaatagactaaaccgtataccattctctatcctaaattttgatcatgagtgagaagtagaagattacaaggatgacccagtttatgaacaaaataaaaaagattagaaccataaacctatttggctgtcttgattttttagaatttttataatattttctcaattcaaaaataaattatttctaaagagcaactttgatgatatatttatgcatgtaatattgagattgtgctatgattgtttatattcttgaaaataaagccaaacaaatcgtgcaacagagtgggaaagggtatttcactacccttgtatgaacgttgacaacttataggcacaacccacaagcatttgaacataattatgcacacattttttgttctttttaaaactttaaaactaaatgtttgtttgaccaaagaaaattagaaaactcatagtttttactcacttttaaatcatttctcatcgtatcaatattgaaaaaagctaaacatacggatcatttaagaatacgagcaaaacttttcggtatgttgaattgtcgaccaccatataaccgtttattataaaattcaaacaccttaatgtcacaacaaaagaaaaataaaaagctctcatgtgggagcaaattccgacctaccggattcgaaccagtgacctaaggataatctgcgtctactacagtcctccgctctaccaactgagctaaggtcggattgtattctatttcatgcatgtgtactgatctaaatattctatcaacacaatgatttgtattaagttagcatagtcatagtgagtctctattacaaatttgtaaacaaagtttgaatttattaaaacattatatttgaaaaacacttaatatcttgcctaaagctcgtaaatatacgaaaatgagggtttactcttaaacggtttaaaatacagtgaaaattacttagagatttcccactcatttctgataatacaatcaatagctatgcaattctcttaaaccaatttctcatagaaaaacgagtttgtagttatactcttgtctaagcactttgaaacgaaatggaaaaaaaaaaactttcaattttaatgatccgacctaccggattcgaaccagtgacctaaggattatctgcttcaactacagtcctccgctctaccaactgagctaaggtcggttttgtattataacactttatgcatgttgatgattcaagagaagctttttaatcaaatttaaacttatcaagaagaggagtagaaagaaagttgacttcatatctttcatgctatcttgtttttttaaggtttttttatcaatactaaattttactgaaaacggtaacatgatggaaaaccgttcaaattcaaaaacgatccataaaacacaataagttattttaaaaacttaccaacactcaaaataaaaacgtaaacggcaagattcaaacgtgcgcgggcaaagcctccatgatttctagtcattcccgataaccactccggcacgtccactttttctctaaactaaacttttatttcaaaatagactaaaccgtataccattctctatcctaaattttgatcatgagtgagaagtagaaaattacaaggatgacgcagtttatgaacaaaataaaaaagattagaaccataaacctatttggctgtcttgattgttttgaatttttataatattttctcatatcaaaaaataaattatttctaaagagcaactttgatgatatatttatgcatgtaatattgagattgcgctataattgtttatattcttgaaaataaagccaaacaaatcgtgcaacagagtgggaaaggttatttcactacccttgtatgaacgttgacaacttataggcacaacccacaagcatttgaatataattatgcatataaccgtttattataaaattcaaacaccttaatgtcacaacaaaagaaaaataaaaagctctcatgtgggagcaaattccgacctaccggattcgaacctatgacctaaggataatctgcgtcttctactgtcctccgctctaccaactgagctaaggtcggattgtattctatttcatgcatgtgtactgatcaaaatattctatcagcacaatgatttgtattaagttagcatactcatagtgagtctctattaaaaatttgaaaacaaagtttgaatttataaaaacattatattagaaaaactcataatatcttgcctaaatctcgtaaatatacgaaaatgagggtttactcttgaacggtttaaaatacagtgaaaattccttcgagatttcccactcatttctgataatacagtcaatagctatgcaattctcttaaacaatttctcatagaaaaacgagtttgtagttatactcttctctaaactctttgaaacgaaatgaaaaaaaaaatctttaaacttttatgatccgacctaccggattcgaaccaatgacctaaggattatctgcgtcaactacagtcctccgctctaccaactgagctaaggtcggttttgtattataacactttatgcatgttgatgattcaaaaaaagctttttaatcaaatttaaacttatcaagaagaggaatagaaaaaaagttgacttcatatctttcatgctgtcttgttttttaaaagttttttatcaatactaaattttactgaaaacggtaacatgatggaaaaccgttcaaattgaaaaacgatccataaaacacaataagttattttaaaaacttaccaacactcaaaataaaaacgtaaacggcaagattcaaacctgcgcgggcaaagcccccatgatttctagtcattcccgataaccactccggcacgtccactttttctctaaactaaacttttatttcaaaatagactaaaccgtataccattctgtatcctaaattttgatcatgagtgagaagtagaagattccaaggatgaaatagtttatgaacacaataaaaaagattagaaccataaacctatttggctgtcttgatttttttgaatttttataatattttctcaattcaaaaaataaattatttctaaagagcaactttgatgatatatttatgcatgtaatattgagagtgtgctatgattgtttatattcttgaaaataaagccaaacaaatcgtgcaacaaagttggaaaaggtatttcaccacccttgtatgaacgttgacaacttataggcacaacccacaagcatttgaatataattatgcatacattttttgttctttttaaaactctaaaactaaatgtttgtttgaccaaagaaaattagaaaactcatagtttttagtcacttttaaatcatttttcatcgtatcaatattgaaaaaagctaaacatacggatcgtttaagaattcgagcaaaacttttcggtatgtttaattgtcgaccaccatataaccgtttattataaaatttaaaaaccttaatgtcacaacgaaagaaaaataaaaagctctcatgtgggagcaaattccgacctaccggattcgaaccagtgacctaaggataatctgcgtctactacagtcctccgctctaccaactgagctaaggtcggattgtattctatttcatgcatgtgtactgatctaaatattctatcagcaaaatgatttgtattaagttagcatactcatagtgagtctctattacaaatttgtaaacaaagtttgaatttataaaaacattatattagaaaaacacttaatatcttgcctaaatctcgtaaatatacgaaaatgagggtttacccttaaacggtttaaattacagtgaaaattacttagagatttcccactcatttctgataatacgatcaatagctatgcaattctcttaaaccaatttctcatagaaaaagagtttgtagttatactcttgtctaagcactttgaaacgaaatggaaaaaaaaaactttcaattttaatgatccgacctaccaaattcgaaccagtgacctaaggattatctgcgtcaactacagtcctccgctctaccaactgagctaaggttggttttgtattataacactttatgcatgttgatgattcaagagaagctttttaatcaaatttaaacttatgaagaggagtagaaagaaagttgacttcatatctttcatgctatcttgtttttttaaggttttttatcaatactaaagtttactgaaaacggtaacatgatggaaaactgttcaaattcaaagacaatacataaaacacaataagtaattttaagaacttaccaacactcaaaataaaaacgtgaacggcaggattcgaacctgcgcgggcaaagcccacatgatttctagtcatgcccgataaccactccggcacgtccactttttctctaaactaaacttttatttcaaaatagactaaaccgtataccattctttatcctaaattttgatcatgagtgagaagtagaagattccaaggataaaatagtttatgaacacaataaaaaagattagaaccataaacctatttggctgtcttgattttttagaatttttataatattttctcaattcaaaaaataaattatttctaaagagcaactttgatgatatatttatgcatgtaatattgagattgtgctatgattgtttatattcttgaaaataaagccaaacaaatcgtgcaacagagtgggaaaaggtatttcactacccttgtatgaacgttgacaacttataggcacaacccacaagcatttgaatataattatgcatataaccgtttattataaaattcaaacaccttaatgtcacaacaaaagaaaaataaaaagctctcatgtgggagcaaattccgacctaccggattcgaacctgtgacctaaggataatctgcgtcttctactgtcctccgctctaccaactgagctaaggtcggattgtattctatttcatgcatgtgtactgatcaaaatattctatcaacacaatgatttgtattaagttagcatactcatagtgagtctctattaaaaatttgaaaacaaagtttgaatttataaaaacattatattagaaaaactcataatatcttgcctaaatctcgtaaatatacgaaaatgagggtttactcttgaacggtttaaaatacagtgaaaattccttcgagatttcccactcatttctgataatacagtcaatagctatgcaattctcttaaacaatttctcatagaaaaacgagtttgtagttatactcttctctaaactctttgaaacgaaatgaaaaaaaaaatctttaaacttttatgatccgacctaccggattcgaaccaatgacctaaggattatctgcgtcaactacagtcctccgctctaccaactgagctaaggtcggttttgtattataacactttatgcatgttgatgattcaaaaaaagctttttaatcaaatttaaacttatcaagaagaggaatagaaaaaaagttgacttcatatctttcatgctgtcttgttttttaaaagttttttatcaatactaaattttactgaaaacggtaacatgatggaaaaccgttcaaattgaaaaacgatccataaaacacaataagttattttaaaaacttaccaacactcaaaataaaaacgtaaacggcaagattcaaacctgcgcgggcaaagcccccatgatttctagtcattcccgataaccactccggcacgtccactttttctctaaactaaacttttatttcaaaatagactaaaccgtataccattctctatcctaaattttgatcatgagtgagaagtagaagattccaaggatgaaatagtttatgaacacaataaaaaagattagaaccataaacctatttggctgtcttgatttttttgaatttttataatattttctcaattcaaaaaataaattatttctaaagagcaactttgatgatatatttatgcatgtaatattgagagtgtgctatgattgtttatattcttgaaaataaagccaaacaaatcgtgcaacaaagttggaaaaggtatttcaccacccttgtatgaacgttgacaacttataggcacaacccacaagcatttgaatataattatgcatacattttttgttctttttaaaactctaaaactaaatgtttgtttgaccaaagaaaattagaaaactcatagtttttagtcacttttaaatcatttttcatcgtatcaatattgaaaaaagctaaacatacggatcgtttaagaattcgagcaaaacttttcggtatgtttaattgtcgaccaccatataaccgtttattataaaatttaaaaaccttaatgtcacaacgaaagaaaaataaaaagctctcatgtgggagcaaattccgacctaccggattcgaaccagtgacctaaggataatctgcgtctactacagtcctccgctctaccaactgagctaaggtcggattgtattctatttcatgcatgtgtactgatctaaatattctatcagcaaaatgatttgtattaagttagcatactcatagtgagtctctattacaaatttgtaaacaaagtttgaatttataaaaacattatattagaaaaacacttaatatcttgcctaaatctcgtaaatatacgaaaatgagggtttacccttaaacggtttaaattacagtgaaaattacttagagatttcccactcatttctgataatacgatcaatagctatgcaattctcttaaaccaatttctcatagaaaaagagtttgtagttatactcttgtctaagcactttgaaacgaaatggaaaaaaaaaactttcaattttaatgatccgacctaccaaattcgaaccagtgacctaaggattatctgcgtcaactacagtcctccgctctaccaactgagctaaggttggttttgtattataacactttatgcatgttgatgattcaagagaagctttttaatcaaatttaaacttatgaagaggagtagaaagaaagttgacttcatatctttcatgctatcttgtttttttaaggttttttatcaatactaaagtttactgaaaacggtaacatgatggaaaactgttcaaattcaaagacaatacataaaacacaataagtaattttaagaacttaccaacactcaaaataaaaacgtgaacggcaggattcgaacctgcgcgggcaaagcccacatgatttctagtcatgcccgataaccactccggcacgtccactttttctctaaactaaacttttatttcaaaatagactaaaccgtataccattctttatcctaaattttgatcatgagtgagaagtagaagattccaaggataaaatagtttatgaacacaataaaaaagattagaaccataaacctatttggctgtcttgattttttagaatttttataatattttctcaattcaaaaaataaattatttctaaagagcaactttgatgatatatttatgcatgtaatattgagattgtgctatgattgtttatattcttgaaaataaagccaaacaaatcgtgcaacagagtgggaaaaggtatttcactacccttgtatgaacgttgacaacttataggcacaacccacaagcatttgaatataattatgcatataaccgtttattataaaattcaaacaccttaatgtcacaacaaaagaaaaataaaaagctctcatgtgggagcaaattccgacctaccggattcgaacctgtgacctaaggataatctgcgtcttctactgtcctccgctctaccaactgagctaaggtcggattgtattctatttcatgcatgtgtactgatcaaaatattctatcaacacaatgatttgtattaagttagcatactcatagtgagtctctattaaaaatttgaaaacaaagtttgaatttataaaaacattatattagaaaaactcataatatcttgcctaaatctcgtaaatatacgaaaatgagggtttactcttgaacggtttaaaatacagtgaaaattccttcgagatttcccactcatttctgataatacagtcaatagctatgcaattctcttaaacaatttctcatagaaaaacgagtttgtagttatactcttctctaaactctttgaaacgaaatgaaaaaaaaaatctttaaacttttatgatccgacctaccggattcgaaccaatgacctaaggattatctgcgtcaactacagtcctccgctctaccaactgagctaaggtcggttttgtattataacactttatgcatgttgatgattcaaaaaaagctttttaatcaaatttaaacttatcaagaagaggaatagaaaaaaagttgacttcatatctttcatgctgtcttgttttttaaaagttttttatcaatactaaattttactgaaaacggtaacatgatggaaaaccgttcaaattgaaaaacgatccataaaacacaataagttattttaaaaacttaccaacactcaaaataaaaacgtaaacggcaagattcaaacctgcgcgggcaaagcccccatgatttctagtcattcccgataaccactccggcacgtccactttttctctaaactaaacttttatttcaaaatagactaaaccgtataccattctctatcctaaattttgatcatgagtgagaagtagaagattccaaggatgaaatagtttatgaacacaataaaaaagattagaaccataaacctatttggctgtcttgatttttttgaatttttataatattttctcaattcaaaaaataaattatttctaaagagcaactttgatgatatatttatgcatgtaatattgagagtgtgctatgattgtttatattcttgaaaataaagccaaacaaatcgtgcaacaaagttggaaaaggtatttcaccaccctcgtatgaacgttgacaacttataggcacaacccacaagcatttgaatataattatgcatacattttttgttctttttaaaactctaaaactaaatgtttgtttgaccaaagaaaattagaaaactcatagtttttagtcacttttaaatcatttttcatcgtatcaatattgaaaaaagctaaacatacggatcgtttaagaattcgagcaaaacttttcggtatgtttaattgtcgaccaccatataaccgtttattataaaatttaaaaaccttaatgtcacaacaaaagaaaaataaaaagctctcatgtgggagcaaattccgacctaccggattcgaaccagtgacctaaggataatctgcgtctactacagtcctccgctctaccaactgagctaaggtcggattgtattatatttcatgcatgtgtactgatctaaatattctatcagcaaaatgatttgtattaagttagcatactcatagtgagtctctattacaaatttgtaaacaaagtttgaatttataaaaacattatattagaaaaacacttaatatcttgcctaaatctcgtaaatatacgaaaatgagagtttacccttaaacggtttaaattacagtgaaaattacttagagatttcccactcatttctgataatacgatcaatagctatgcaattctcttaaaccaatttctcatagaaaaagagtttgtagttatactcttgtctaagcactttgaaacgaaatggaaaaaacaactttcaattttaatgatccgacctaccgaattcgaaccagtgacctaaggattatctgcgtcaactacagtcctccgctctaccaactgagctaaggtcggttttgtattataacactttatgcatgttgatgattcaagagaagctttttaatcaaatttaaacttttgaagaggagtagaaagaaagttgacttcatatctttcatgctatcttgtttttttaaggttttttatcaatactaaagtttactgaaaacggtaacatgatggaaaactgttcaaattcaaagacgatacataaaacacaataagtaattttaaaaacttaccaacactcaaaataaaaacgtgaacggcaggattcgaacctgcgcgggcaaagcccacatgatttctagtcatgcccgataaccactccggcacgtccactttttctctaaactaaacttttatttcaaaatagactaaaccatataccattctctatcctaaattttgatcatgagtgagaagtagaagattccaaggatgaaatagtttatgaacacaataaaaaagattagaaccataaacctatttggctgtcttgattttttaaaatttttataatattttctcaattcaaaaaataaattatttctaaagagcaactttgatgatatatttatgcatgtaatattgagattgtgctatgattgtttatattcttgaaaataaagccaaacaaatcatgcaacagagtcccaaaaggtatttcactacccttgtatgaacgttgacaacttataggcacaacccacaagcatttgaatataattatgcatataaccgtttattataaaattcaaacaccttaatgttacaacaaaagaaaaataaaaagctctcatgtgggagcaaattccgacctaccggattcgaaccagtgacctaaggataatctgcgtcttctactgtcctccgctctaccaactgagctaaagtcggattgtattctatttcatgcatgtgtactgatcaaaatattctatcagcacaatgatttgtattaagttagcatactcatagtgagtctctattaaaaatttgaaaacaaagtttgaatttataaaaacattatattagaaaaactcataatatcttgcctaaatctcgtaaatatacgaaaatgagggtttactcttgaacggtttaaaatacagtgaaaattccttcgagatttcccactcatttctgataatacagtcaatagctatgcaattctcttaaacaatttctcatagaaaaacgagtttgtagttatactcttctctaaactctttgaaacgaaatgaaaaaaaaaatctttaaacttttatgatccgacctaccggattcgaaccaatgacctaaggattatctgcgtcaactacagtcctccgctctaccaactgagctaaggtcggttttgtattataacactttatgcatgttgatgattcaaaaaaagctttttaatcaaatttaaacttatcaagaagaggaatagaaaaaaagttgacttcatatctttcatgctgtcttgttttttaaaagttttttatcaatactaaattttactgaaaacggtaacatgatggaaaaccgttcaaattgaaaaacgatccataaaacacaataagttattttaaaaacttaccaacactcaaaataaaaacgtaaacggcaagattcaaacctgcgcgggcaaagcccccatgatttctagtcattcccgataaccactccggcacttccactttttctctaaactaaacttttatttcaaaatagactaaaccgtataccattctctatcctaaattttgatcatgagtgagaagtagaagattccaaggatgaaatagtttatgaacacaataaaaaagatcagaaccataaacctatttggctgtcttgatttttttgaatttttataatattttctcaattcaaaaaataaattatttctaaagagcaactttgatgatatatttatgcatgtaatattgagagtgtgctatgattgtttatattcttgaaaataaagccaaacaaatcgtgcaacaaagttggaaaaggtatttcaccaccctcgtatgaacgttgacaacttataggcacaacccacaagcatttgaatataattatgcatacattttttgttctttttaaaactctaaaactaaatgtttgtttgaccaaagaaaattagaaaactcatagtttttagtcacttttaaatcatttttcatcgtatcaatattgaaaaaagctaaacatacggatcgtttaagaattcgagcaaaacttttcggtatgtttaattgtcgaccaccatataaccgtttattataaaatttaaaaaccttaatgtcacaacaaaagaaaaataaaaagctctcatgtgggagcaaattccgacctaccggattcgaaccagtgacctaaggataatctgcgtctactacagtcctccgctctaccaactgagctaaggtcggattgtattatatttcatgcatgtgtactgatctaaatattctatcagcaaaatgatttgtattaagttagcatactcatagtgagtctctattacaaatttgtaaacaaagtttgaatttataaaaacattatattagaaaaacacttaatatcttgcctaaatctcgtaaatatacgaaaatgagagtttacccttaaacggtttaaattacagtgaaaattacttagagatttcccactcatttctgataatacgatcaatagctatgcaattctcttaaaccaatttctcatagaaaaagagtttgtagttatactcttgtctaagcactttgaaacgaaatggaaaaaacaactttcaattttaatgatccgacctaccgaattcgaaccagtgacctaaggattatctgcgtcaactacagtcctccgctctaccaactgagctaaggtcggttttgtattataacactttatgcatgttgatgattcaagagaagctttttaatcaaatttaaacttttgaagaggagtagaaagaaagttgacttcatatctttcatgctatcttgtttttttaaggttttttatcaatactaaagtttactgaaaacggtaacatgatggaaaactgttcaaattcaaagacgatacataaaacacaataagtaattttaaaaacttaccaacactcaaaataaaaacgtgaacggcaggattcgaacctgcgcgggcaaagcccacatgatttctagtcatgcccgataaccactccggcacgtccactttttctctaaactaaacttttatttcaaaatagactaaaccatataccattctctatcctaaattttgatcatgagtgagaagtagaagattccaaggatgaaatagtttatgaacacaataaaaaagattagaaccataaacctatttggctgtcttgattttttaaaatttttataatattttctcaattcaaaaaataaattatttctaaagagcaactttgatgatatatttatgcatgtaatattgagattgtgctatgattgtttatattcttgaaaataaagccaaacaaatcatgcaacagagtcccaaaaggtatttcactacccttgtatgaacgttgacaacttataggcacaacccacaagcatttgaatataattatgcatataaccgtttattataaaattcaaacaccttaatgttacaacaaaagaaaaataaaaagctctcatgtgggagcaaattccgacctaccggattcgaaccagtgacctaaggataatctgcgtcttctactgtcctccgctctaccaactgagctaaagtcggattgtattctatttcatgcatgtgtactgatcaaaatattctatcagcacaatgatttgtattaagttagcatactcatagtgagtctctattaaaaatttgaaaacaaagtttgaatttataaaaacattatattagaaaaactcataatatcttgcctaaatctcgtaaatatacgaaaatgagggtttactcttgaacggtttaaaatacagtgaaaattccttcgagatttcccactcatttctgataatacagtcaatagctatgcaattctcttaaacaatttctcatagaaaaacgagtttgtagttatactcttctctaaactctttgaaacgaaatgaaaaaaaaaatctttaaacttttatgatccgacctaccggattcgaaccaatgacctaaggattatctgcgtcaactacagtcctccgctctaccaactgagctaaggtcggttttgtattataacactttatgcatgttgatgattcaaaaaaagctttttaatcaaatttaaacttatcaagaagaggaatagaaaaaaagttgacttcatatctttcatgctgtcttgttttttaaaagttttttatcaatactaaattttactgaaaacggtaacatgatggaaaaccgttcaaattgaaaaacgatccataaaacacaataagttattttaaaaacttaccaacactcaaaataaaaacgtaaacggcaagattcaaacctgcgcgggcaaagcccccatgatttctagtcattcccgataaccactccggcacttccactttttctctaaactaaacttttatttcaaaatagactaaaccgtataccattctctatcctaaattttgatcatgagtgagaagtagaagattccaaggatgaaatagtttatgaacacaataaaaaagatcagaaccataaacctatttggctgtcttgatttttttgaatttttataatattttctcaattcaaaaaataaattatttctaaagagcaactttgatgatatatttatgcatgtaatattgagagtgtgctatgattgtttatattcttgaaaataaagccaaacaaatcgtgcaacaaagttggaaaaggtatttcaccaccctcgtatgaacgttgacaacttataggcacaacccacaagcatttgaatataattatgcatacattttttgttctttttaaaactctaaaactaaatgtttgtttgaccaaagaaaattagaaaactcatagtttttagtcacttttaaatcatttttcatcgtatcaatattgaaaaaagctaaacatacggatcgtttaaaaattcgagcaaaacttttcggtatgtttaattgtcgaccaccatataaccgtttattataaaatttaaaaatcttaatgtcacaacgaaagaaaaataaaaagctctcatgtgggagcaaattccgacctaccggattcgaaccagtgacctaaggataatctgcgtctactacagtcctccgctctaccaactgagctaaggtcggattgtattctatttcatgcatgtgtactgatctaaatattctatcagcaaaatgatttgtattaagttagcatactcatagtgagtctctattacaaatttgtaaacaaagtttgaatttataaaaacattatattagaaaaacacttaatatcttgcctaaatctcgtaaatatacgaaaatgagggtttacccttaaacggtttaaattacagtgaaaattacttagagatttcccactcatttctgataatacaatcaatagctatgcaattctcttaaaccaatttctcatagaaaaagagtttgtagttatactcttgtctaagcactttgaaacgaaatggaaaaaaaaaactttcaattttaatgatccgacctaccggattcgaaccagtgacctaaggattatctgcgtcaactacagtcctccgctctaccaactgagctaaggtcggtttgtattataacactttatgcatgttgatgattcaagagaagctttttaatcaaatttaaacttatgaagaggagtagaaagaaagttgacttcatatctttcatgctatcttgtttttttaaggttttttatcaatactaaagtttactgaaaacggtaacatgatggaaaactgttcaaattcaaagacgatacataaaacacaataagtaattttaagaacttaccaacactcaaaataaaaacgtgaacggcaggattcgaacctgcgcgggcaaagcccacatgatttctagtcatgcccgataaccactccggcacgtccactttttctctaaactaaacttttatttcaaaatagactaaaccgtataccattctctatcctaaattttgatcatgagtgagaagtagaagattccaaggatgaaatagtttatgaacacaataaaaaagattagaaccataaacctatttggctgtcttgatttttttgaatttttataatattttctcaattcaaaaaataaattatttctaaagagcaactttgatggtatatttatgcatgtaatattgagattgtgctatgattgtttatattcttgaaaataaagccaaacaaatcatgcaacagagtgggaaaaggtatttcactacccttgtatgaacgttgacaacttataggcacaacccacaagcatttgaatataattatgcatacattttttgttctttttaaaactctaaaactaaatgtttgtttgaccaaagaaaattagaaaactcatagtttttagtcacttttaaatcatttttcatcgtatcaatattgaaaaaagctaaacatacggatcgtttaagaattcgagcaaaacttttcggtatgtttaattgtcgaccaccatataaccgtttattataaaatttaaaaaccttaatgtcacatcgaaagaaaaataaaaagctctcatgtgggagcaaattccgacctaccggattcgaaccagtgacctaaggataatctgcgtctactacagtcctccgctctaccaactgagctaaggtcggattgtattctatttcatgcatgtgtactgatctaaatattctatcagcaaaatgatttgtattaagttagcatactcatagtgagtctgtattacaaatttgtaaacaaagtttgaatttataaaaacattatattagaaaaacacttaatatcttgcctaaatctcgtaaatatacgaaaatgagggtttacccttaaacggtttaaattacagtgaaaattacttagagatttcccactcatttatgataatacgatcaatagctatgcaattctcttaaaccaatttttcatagaaaaaaagtttgtagttatactcttgtctaagcactttgaaacgaaatggaaaaaaaaaatttcaattttaatgatccgacctaccggattcgaaccagtgacctaaggattatctgcgtcaactacagtcctccgctctaccaactgagctaaggtcggttttgtattataacactttaagcatgttgatgattcaagagaagctttttaatcaaatttaaacttatgaagaggagtagaaagaaagttgacttcatatctttcatgctatcttgtttttttaaggttttttatcaatactaaagtttactgaaaacggtaacatgatggaaaactgttcaaattcaaagacgatacataaaacacaataagtaattttaagaacttaccaacactcaaaataaaaacgtgaacggcaggattcgaacctgcgcgggcaaagcccacatgatttctagtcatgcccgataaccactccggcacgtccactttttctctaaactaaacttttatttcaaaatagactaaaccgtataccattctctatcctaaattttgatcatgagtgagaagtagaagattccaaggatgaaatagtttatgaacacaataaaaaagattagaaccataaacctatttggctgtcttgatttttttgaatttttataatattttctcaattcaaaaaataaattatttctaaagagcaactttgatggtatatttatgcatgtaatattgagattgtgctatgattgtttatattcttgaaaataaagccaaacaaatcatgcaacagagtgggaaaaggtatttcactacccttgtatgaacgttgacaacttataggcacaacccacaagcatttgaatataattatgcatacattttttgttctttttaaaactctaaaactaaatgtttgtttgaccaaagaaaattagaaaactcatagtttttagtcacttttaaatcatttttcatcgtatcaatattgaaaaaagctaaacatacggatcgtttaagaattcgagcaaaacttttcggtatgtttaattgtcgaccaccatataaccgtttattataaaatttaaaaaccttaatgtcacatcgaaagaaaaataaaaagctctcatgtgggagcaaattccgacctaccggattcgaaccagtgacctaaggataatctgcgtctactacagtcctccgctctaccaactgagctaaggtcggattgtattctatttcatgcatgtgtactgatctaaatattctatcagcaaaatgatttgtattaagttagcatactcatagtgagtctgtattacaaatttgtaaacaaagtttgaatttataaaaacattatattagaaaaacacttaatatcttgcctaaatctcgtaaatatacgaaaatgagggtttacccttaaacggtttaaattacagtgaaaattacttagagatttcccactcatttatgataatacgatcaatagctatgcaattctcttaaaccaatttttcatagaaaaaaagtttgtagttatactcttgtctaagcactttgaaacgaaatggaaaaaaaaaatttcaattttaatgatccgacctaccggattcgaaccagtgacctaaggattatctgcgtcaactacagtcctccgctctaccaactgagctaaggtcggttttgtattataacactttaagcatgttgatgattcaagagaagctttttaatcaaatttaaacttatgaagaggagtagaaagaaagttgacttcatatctttcatgctatcttgtttttttaaggttttttatcaatactaaagtttactgaaaacggtaacatgatggaaaactgttcaaattcaaagacgatacataaaacacaataagtaattttaagaacttaccaacactcaaaataaaaacgtgaacggcaggattcgaacctgcgcgggcaaagcccacatgatttctagtcatgcccgataaccactccggcacgtccactttttctctaaactaaacttttatttcaaaatagactaaaccgtataccattctctatcctaaattttgatcatgagtgagaagtagaagattccaaggatgaaatagtttatgaacacaataaaaaagattagaaccataaacctatttggctgtcttgatttttttgaatttttataatattttctcaattcaaaaaataaattatttctaaagagcaactttgatggtatatttatgcatgtaatattgagattgtgctatgattgtttatattcttgaaaataaagccaaacaaattcatgcaacagagtgggaaaaggtatttcactacccttgtatgaacgttgacaacttataggcacaacccacaagcatttgaatataattatgcatacattttttgttctttttaaaactctaaaactaaatgtttgtttgaccaaagaaaattagaaaactcatagtttttagtcacttttaaatcatttttcatcgtatcaatattgaaaaaagctaaacatacggatcgtttaagaattcgagcaaaacttttcggtatgtttaattgtcgaccaccatataaccgtttattataaaatttaaaaaccttaatgtcacatcgaaagaaaaataaaaagctctcatgtgggagcaaattccgacctaccggattcgaaccagtgacctaaggataatctgcgtctactacagtcctccgctctaccaactgagctaaggtcggattgtattctatttcatgcatgtgtactgatctaaatattctatcagcaaaatgatttgtattaagttagcatactcatagtgagtctgtattacaaatttgtaaacaaagtttgaatttataaaaacattatattagaaaaacacttaatatcttgcctaaatctcgtaaatatacgaaaatgagggtttacccttaaacggtttaaattacagtgaaaattacttagagatttcccactcatttatgataatacgatcaatagctatgcaattctcttaaaccaatttttcatagaaaaacgagtttgtagttatactcttgtctaagcactttgaaacgaaatggaaaaaaaaaatttcaattttaatgatccgacctaccggattcgaaccagtgacctaaggattatctgcgtcaactacagtcctccgctctaccaactgagctaaggtcggttttgtattataacactttaagcatgttgatgattcaagagaagctttttaatcaaatttaaacttatgaagaggagtagaaagaaagttgacttcatatctttcatgctatcttgtttttttaaggttttttatcaatactaaagtttactgaaaacggtaacatgatggaaaactgttcaaattcaaagacgatacataaaacacaataagtaattttaagaacttaccaacactcaaaataaaaacgtgaacggcaggattcgaacctgcgcgggcaaagcccacatgatttctagtcatgcccgataaccactccggcacgtccactttttctctaaactaaacttttatttcaaaatagactaaaccgtataccattctctatcctaaattttgatcatgagtaagaagtagaagattccaaggatgaaatagtttatgaacacaataaaaaagattagaaccataaacctatttggctgtcttgatttttttgaatttttataatattttctcaattcaaaaaataaattatttctaaagagcaactttgatgatatatttatgcatgtaatattgagagtgtgcgatgattgtttatattcttgaaaataaagccaaacaaatcgtgcaacaaagttggaaaaggtatttcaccacccttgtatgaacgttgacaacttataggcacaacccacaagcatttgaatataattatgcatacattctttgttctttttaaaactctaaaactaaatgtttgtttgaccaaagaaaattagaaaactcatagtttttagtcacttttaaatcatttttcatcgtatcaatattgaaaaaagctaaacatacggatcgtttaagaattcgagcaaaacttttcggtatgtttaattgtcgaccaccatataaccgtttattataaaatttaaaaaccttaatgtcacaacgaaagaaaaataaaaagctctcatgtgggagcaaattccgacctaccggattcgaaccagtgacctaaggataatctgcgtctactacagtcctccgctctaccaactgagctaaggtcggattgtattctatttcatgcatgtgtactgatctaaatattctatcagcaaaatgatttgtattaagttagcatactcatagtgagtctctattacaaatttgtaaacaaagtttgaatttataaaaacattatattagaaaaacacttaatatcttgcctaaatctcgtaaatatacgaaaatgagggtttacccttaaacggtttaaattacagtgaaaattacttagagatttcccactcatttctgataatacgatcaatagctatgcaattctcttaaaccaatttttcatagaaaaaaagtttgtagttatactcttgtctaagcactttgaaacgaaatggaaaaaaaaaactttcaattttaatgatccgacctaccggattcgaaccagtgacctaaggattatctgcgtcaactacagtcctccgctctaccaactgagctaaggtcggttttgtattataacactttaagcatgttgatgattcaagggaagctttttaatcaaatttaaacttatgaagaggagtagaaagaaagttgacttcatatctttcatgctatcttgtttttttaaggttttttatcaatactaaagtttactgaaaacggtaacatgatggaaaactgttcaaattcaaagacgatacataaaacacaataagtaattttaagaacttaccaacactcaaaataaaaacgtgaacggcaggattcgaacctgcgcgggcaaagcccacatgatttctagtcatgcccgataaccactccggcacgtccactttttctctaaactaaacttttatttcaaaatagactaaaccgtataccattctctatcctaaattttgatcatgagtgagaagtagaagattccaaggataaaatagtttatgaacacaataaaaaagattagaaccataaacctatttggctgtcttgattttttagaatttttataatattttctcaattcaaaaaataaattatttctaaagagcaactttgatgatatatttatgcatgtaatattgagattgtgctatgattgtttatattcttgaaaataaagccaaacaaatcgtgcaacagagtgggaaaaggtatttcactacccttgtatgaacgttgacaacttataggcacaacccacaagcatttgaatataattatgcatacattctttgttctttttaaaactctaaaactaaatgtttgtttgaccaaagaaaattagaaaactcatagtttttagtcacttttaaatcatttttcatcgtatcaatattgaaaaaagctaaacatacggatcgtttaagaattcgagcaaaacttttcggtatgtttaattgtcgaccaccatataaccgtttattataaaatttaaaaaccttaatgtcacaacgaaagaaaaataaaaagctctcatgtgggagcaaattcaaacctaccagattcgaaccagtgacctaaggataatctgcgtctactacagtcctccgctctaccaactgagctaaggtcggattgtattctatttcatgcatgtgtactgatctaaatattctatcagcaaaatgatttgtattaagttagcatactcatagtgagtctctattacaaatttgtaaacaaagtttgaatttataaaaacattatattagaaaaacacttaatatcttgcctaaatctcgtaaatatacgaaaatgagggtttacccttaaacggtttaaattacagtgaaaattacttagagatttcccactcatttctgataatacgatcaatagctatgcaattctcttaaaccaatttcttatagaaaaagagtttgtagttatactcttgtctaagcactttgaaacgaaatggaaaaaaaaaactttcaattttaatgatccgacctaccggattcgaaccagtgacctaaggattatctgcgtcaactacagtcctccgctctaccaactgagctaaggtcggttttgtattataacactttatgcatgttgatgattcaagagaagctttttaatcaaatttaaacttatgaagaggagtagaaagaaagttgacttcatatctttcatgctatcttgtttttttaaggttttttatcaatactaaagtttactgaaaacggtaacatgatggaaaactgttcaaattcaaagacgatacataaaacacaataagtaattttaagaacttaccaacactcaaaataaaaacgtgaacggcaggattcgaacctgcgcgggcaaagcccacatgatttctagtcatgcccgataaccactccggcacgtccactttttctctaaactaaacttttatttcaaaatagactaaactgtataccattctctatcctaaattttgatcatgagtgagaagtagaagattccaaggatgaaatagtttatgaacacaataaaaaagattagaaccataaacctatttggctgtcttgatttttttgaatttttataatattttctcaattcaaaaaataaattatttctaaagagcaactttgatgatatatttatgcatgtaatattgagagtgtgctatgattgtttatattcttgaaaataaagccaaacaaatcgggcaacaaagttggaaaaggtatttcaccacccttgtatgaacgttgacaacttataggcacaacccacaagcatttgaatataattatgcatacattttttgttctttttaaaactctaaaactaaatttttgtttgaccaaagaaaattagaaaactcatagtttttagtcacttttaaatcatttttcatcgtatcaatattgaaaaaagctaaacatacggatcgtttaagaattcgagcaaaacttttcggtatgtttaattgtcgaccaccatataaccgtttattataaaatttaaaaaccttaatgtcacaacgaaagaaaaataaaaagctctcatgtgggagcaaattccgacctaccggattcgaaccagtgacctaaggataatctgcgtctactacagtcctccgctctaccaactgagctaaggtcggattgtattctatttcatgcatgtgtactgatctaaatattctatcagcaaaatgatttgtattaagttagcatactcatagtgagtctctattacaaatttgtaaacaaagtttgaatttataaaaacattatattagaaaaacacttaatatcttgcctaaatctcgtaaatatacgaaaatgagggtttacccttaaacggtttaaattacagtgaaaattacttagagatttcccactcatttctgataatacgatcaatagctatgcaattctcttaaaccaatttctcatagaaaaagagtttgtagttatactcttgtctaagcactttgaaacgaaatggaaaaaaaaaactttcaattttaatgatccgacctaccggattcgaaccagtgacctaaggattatctgcgtcaactacagtcctccgctctaccaactgagctaaggtcggttttgtattataacactttatgcatgttgatgattcaagagaagctttttaatcaaatttaaacttatgaagaggagtagaaagaaagttgacttcatatctttcatgctatcttgtttttttaaggttttttatcaatactaaagtttactgaaaacggtaacatgatggaaaactgttcaaattcaaagacgatacataaaacacattaagtaattttaagaactaaccaacactcaaaataaaaacgtgaacggcaggattcgaacctgcgcgggcaaagcccacatgatttctagttatgcccgataaccactccggcacgtccactttttctctaaactaaacttttatttcaaaatagactaaaccgtataccattctctatcctaaattttgatcatgagtgagaagtagaagattccaaggatgatgcagtttatgaacaaaataaaaaaattagaaccataaacctatttggctgtcttgatttttttgaatttttataaaattttctcaattcaaaaaataaattatttctaaagagcaactttgatgatatatttatgcatgtaatattgagattgtgcttatgattgtttatattcttgaaaataaagccaaacaaatcgtgcaacagagtgggaaagggtatttcactacccttgtatgaacgttgacaacttataggcacaacccacaagcatttgaatataactatgcatacattttttgtatttttaaaactctaaaactaaatgtttgtttgaccaaagaaaattagaaaactcatagtttttagtcacttttaaatcatttttcatcgtatcaatattgaaaaagataaacatacggatcgttgaagaattcgagctaaactttttggtatgtttaattgtcgaccaccatataaccgtttattataaaattttaaaaactttaatgtcacaacaaaagaaaaataaaaagctctcctgtgggagcaaattccgacctaccggattcgaaccagtgacctaaggataatctacgtctactacagtcctccgctctaccaactgagctaaggtcggattgtattctatttcatgcatgtgtactgatctaaatattctatgaacacaatgatttgtattaagttagcatactcatagtgattctctattaaaagtttgaaaacaaagtttgaatttataaaaacattatattagaaaaatacttgcataaatctcgtaaatataagaaaatgagggtttacccttgaacggtttaaaatacagtgaaaattacttcgagagttcccactcttttctgataatacagtcagtagctatgcaattctctaaaacaaattctcatagaaaaacgagtttgtagttatactcttctctaatcactttgaaacgaaatgaactaaaaaaaactttaaacttttatgatccgacctaccggattcgaaccagtgacctaaggataatctgcgtcaactacagtcctccgctctaccaactgagctaaggtcggttttgtattataacactttatgcatgttgatgattcaagaagagctttttaatcaaatttaaacttatcaagaagaggagtagaaagaaagttgacttcatatctttcatgctatcttgttttttttagaggttttttatcaatactaaattttactgaaaacggtaacatgatggaaaaccgttcaaattcaaagacgatccataaaacacaataagtaattataagaacttaccaacactcaaaataaaaacgtgaacggcaggattcgaacctgcgcgggcaaaacccacatgatttctagtcatgcccgataaccactccggcacgtccaccttttctgtaaactaaacttttatttcaaaatagactaaaccgtataccattctctatcctaaattttgatcatgagtgagaagtagaagattccaaggatgatgcagtttatgaacaaaataaaaaaattagaaccataaacctatttggctgtcttgatttttttgaatttttataaaattttctcaattcaaaaaataaattatttctaaagagcaactttgatgatatatttatgcatgtaatattgagattgtgcttatgattgtttatattcttgaaaataaagccaaacaaatcgtgcaacagagtgggaaagggtatttcaccacccttgtatgaacgttgacaacttataggcacaacccacaagcatttgaatataattatgcatacattttttgttctttttaaaactctaaaactaaatgtttgtttgaccaaagaaaattagaaaactcatagtttttagtcacttttaaatcatttttcatcgtatcaatattgaaaaaagctaaacatacggatcgtttaagaattcgagcaaaactttttggtatgtttaattgtcgaccaccatataaccgtttattataaaatttaaaaaccttaatgtcacaacgaaagaaaaataaaaagctctcatgtgggagcaaattccgacctaccggattcgaaccagtgacctaaggataatctgcgtctactacagtcctccgctctaccaactgagctaaggtcggattgtattctatttcatgcatgtgtactgatctaaatattctatgaacacaatgatttgtattaagttagcatactcatagtgagtctctattaaaaatttgaaaataaagtttgaatttataaaaacattatattagaaaaatacttgcataaatctcgtaagccttgaacggtttaaaatacagtgaaaattacttctagatttcccactcatttctgataatacagtcaatagctatgcaattctctaaaacaatttctcatagaaaaacgagtttgtagttatactcttctctaatcactttgaaacgaaatgaaaaaaaaaaatctttaaacttttatgatccgacctagcggattcgaaccaatgacctaaggataatctgcgtcaactacagtcctccgctctaccaactgagctaaggtcggttttgtatcataacactttatgcatgttgatgattcaagaaaagctttttaatcaaatttaaacttatcaagaagaggagtagaaagaaagttgacttcatatctttcatgctgttttgttttttttagaggttttttatcaatactaaagtttactgaaaacggtaacatgatgaaaaaccgttcaaattcaaagacgatccataaaacacaataagtaattataaaaacttaccaacactcaaaataaaaacgtgaacggcaggattcgaacctgcgcgggcaaagcccacatgatttctagtcatgcccgataaccactccggcacgtccactttttctgtaaactaaacttttatttcaaaatagactaaaccgtataccattctctatcctaaattttgatcatgagtgagaagtagaagattccaaggatgatgcagtttatgaacaaaataaaaaaattagaaccataaacctatttggctgtcttgatttttttgaatttttataaaattttctcaattcaaaaaataaattatttctaaagagcaactttgatgatatatttatgcatgtaatattgagattgtgcttatgattgtttatattcttgaaaataaagccaaacaaatcgtgcaacagagtgggaaagggtatttcactacccttgtatgaacgttgacaacttataggcacaacccacaagcatttgaatataactatgcatacattttttgtatttttaaaactctaaaactaaatgtttgtttgaccaaagaaaattagaaaactcatagtttttagtcacttttaaatcatttttcatcgtatcaatattgaaaaagataaacatacggatcgttgaagaattcgagctaaactttttggtatgtttaattgtcgaccaccatataaccgtttattataaaattttaaaaactttaatgtcacaacaaaagaaaaataaaaagctctcctgtgggagcaaattccgacctaccggattcgaaccagtgacctaaggataatctacgtctactacagtcctccgctctaccaactgagctaaggtcggattgtattctatttcatgcatgtgtactgatctaaatattctatgaacacaatgatttgtattaagttagcatactcatagtgattctctattaaaagtttgaaaacaaagtttgaatttataaaaacattatattagaaaaatacttgcataaatctcgtaaatataagaaaatgagggtttacccttgaacggtttaaaatacagtgaaaattacttcgagagttcccactcttttctgataatacagtcagtagctatgcaattctctaaaacaaattctcatagaaaaacgagtttgtagttatactcttctctaatcactttgaaacgaaatgaactaaaaaaaactttaaacttttatgatccgacctaccggattcgaaccagtgacctaaggataatctgcgtcaactacagtcctccgctctaccaactgagctaaggtcggttttgtattataacactttatgcatgttgatgattcaagaagagctttttaatcaaatttaaacttatcaagaagaggagtagaaagaaagttgacttcatatctttcatgctatcttgttttttttagaggttttttatcaatactaaattttactgaaaacggtaacatgatggaaaaccgttcaaattcaaagacgatccataaaacacaataagtaattataagaacttaccaacactcaaaataaaaacgtgaacggcaggattcgaacctgcgcgggcaaaacccacatgatttctagtcatgcccgataaccactccggcacgtccaccttttctgtaaactaaacttttatttcaaaatagactaaaccgtataccattctctatcctaaattttgatcatgagtgagaagtagaagattccaaggatgatgcagtttatgaacaaaataaaaaaattagaaccataaacctatttggctgtcttgatttttttgaatttttataaaattttctcaattcaaaaaataaattatttctaaagagcaactttgatgatatatttatgcatgtaatattgagattgtgcttatgattgtttatattcttgaaaataaagccaaacaaatcgtgcaacagagtgggaaagggtatttcaccacccttgtatgaacgttgacaacttataggcacaacccacaagcatttgaatataattatgcatacattttttgttctttttaaaactctaaaactaaatgtttgtttgaccaaagaaaattagaaaactcatagtttttagtcacttttaaatcatttttcatcgtatcaatattgaaaaaagctaaacatacggatcgtttaagaattcgagcaaaactttttggtatgtttaattgtcgaccaccatataaccgtttattataaaatttaaaaaccttaatgtcacaacgaaagaaaaataaaaagctctcatgtgggagcaaattccgacctaccggattcgaaccagtgacctaaggataatctgcgtctactacagtcctccgctctaccaactgagctaaggtcggattgtattctatttcatgcatgtgtactgatctaaatattctatgaacacaatgatttgtattaagttagcatactcatagtgagtctctattaaaaatttgaaaataaagtttgaatttataaaaacattatattagaaaaatacttgcataaatctcgtaagccttgaacggtttaaaatacagtgaaaattacttctagatttcccactcatttctgataatacagtcaatagctatgcaattctctaaaacaatttctcatagaaaaacgagtttgtagttatactcttctctaatcactttgaaacgaaatgaaaaaaaaaaatctttaaacttttatgatccgacctagcggattcgaaccaatgacctaaggataatctgcgtcaactacagtcctccgctctaccaactgagctaaggtcggttttgtatcataacactttatgcatgttgatgattcaagaaaagctttttaatcaaatttaaacttatcaagaagaggagtagaaagaaagttgacttcatatctttcatgctgttttgttttttttagaggttttttatcaatactaaagtttactgaaaacggtaacatgatgaaaaaccgttcaaattcaaagacgatccataaaacacaataagtaattataaaaacttaccaacactcaaaataaaaacgtgaacggcaggattcgaacctgcgcgggcaaagcccacatgatttctagtcatgcccgataaccactccggcacgtccactttttctgtaaactaaacttttatttcaaaatagactaaaccgtataccattctctatcctaaattttgatcatgagtgagaagtagaagattccaaggatgatgcagtttatgaacaaaataaaaaaattagaaccataaacctatttggctgtcttgatttttttgaatttttataaaattttctcaattcaaaaaataaattatttctaaagagcaactttgatgatatatttatgcatgtaatattgagattgtgcttatgattgtttatattcttgaaaataaagccaaacaaatcgtgcaacagagtgggaaagggtatttcaccacccttgtatgaacgttgacaacttataggcacaacccacaagcatttgaatataattatgcatacattttttgttctttttaaaactctaaaactaaatgtttgtttgaccaaagtaaattagaaaactcatagtttttagtcacttttaaatcatttttcatcgtatcaatattgaaaaaagctaaacatacggatcgtttaagaattcgagcaaaactttttggtatgtttaattgtcgaccaccatataaccgtttattataaaatttaaaaaccttaatgtcacaacgaaagaaaaataaaaagctctcatgtgggagcaaattccgacctaccggattcgaaccagtgacctaaggataatctgcgtctactacagtcctccgctctaccaactgagctaaggtcggattgtattctatttcatgcatgtgtactgatctaaatattctatgaacacaatgatttgtattaagttagcatactcatagtgagtctctattaaaaatttgaaaacaaagtttgaatttataaaaacattatattagaaaaatacttgcataaatctcgtaaaccttgaacggtttaaaatacagtgaaaattacttctagatttcccactcatttctgataatacagtcaatagctatgcaattctctaaaacaatttctcatagaaaaacgagtttgtagttatactcttctctaatcactttgaaacgaaatgaaaaaaaaaaatctttaaacttttatgatccgacctagcggattcgaaccaatgacctaaggataatctgcgtcaactacagtcctccgctctaccaactgagctaaggtcggttttgtatcataacactttatgcatgttgatgattcaagaaaagctttttaatcaaatttaaacttttcaagaagaggagtagaaagaaagttgacttcatatctttcatgctgttttgttttttttagaggttttttatcaatactaaattttactgaaaacggtaacatgatgaaaaaccgttcaaattcaaagacgatccataaaacacaataagtaattataaaaacttaccaacactcaaaataaaaacgtgaacggcaggattcgaacctgcgcgggcaaagcccacatgatttctagtcatgcccgataaccactccgccacttccactttttctgtaaactaaacttttatttcaaaatagactaaaccgtataccattctctatcctaaattttgatcatgagtgagaagtagaagattccaaggatgatgcagtttatgaacaaaataaaaaaattagaaccataaacctatttggctgtcttgatttttttgaatttttataaaattttctcaattcaaaaaataaattatttctaaagagcaactttgatgatatatttatgcatgtaatattgagattgtgcttatgattgtttatattcttgaaaataaagccaaacaaatcgtgcaacagagtgggaaagggtatttcaccacccttgtatgaacgttgacaacttataggcacaacccacaagcatttgaatataattatgcatacattttttgttctttttaaaactctaaaactaaatgtttgtttgaccaaagaaaattagaaaactcatagtttttagtcacttttaaatcatttttcatcgtatcaatattgaaaaaagctaaacatacggatcgtttaagaattcgagcaaaactttttggtatgtttaattgtcgaccaccatataaccgtttattataaaatttaaaaaccttaatgtcacaacgaaagaaaaataaaaagctctcatgtgggagcaaattccgacctaccggattcgaaccagtgacctaaggataatctgcgtctactacagtcctccgctctaccaactgagctaaggtcggattgtattctatttcatgcatgtgtactgatctaaatattctatgaacacaatgatttgtattaagttagcatactcatagtgagtctctattaaaaatttgaaaataaagtttgaatttataaaaacattatattagaaaaatacttgcataaatctcgtaagccttgaacggtttaaaatacagtgaaaattacttctagatttcccactcatttctgataatacagtcaatagctatgcaattctctaaaacaatttctcatagaaaaacgagtttgtagttatactcttctctaatcactttgaaacgaaatgaaaaaaaaaaatctttaaacttttatgatccgacctagcggattcgaaccaatgacctaaggataatctgcgtcaactacagtcctccgctctaccaactgagctaaggtcggttttgtatcataacactttatgcatgttgatgattcaagaaaagctttttaatcaaatttaaacttatcaagaagaggagtagaaagaaagttgacttcatatctttcatgctgttttgttttttttagaggttttttatcaatactaaagtttactgaaaacggtaacatgatgaaaaaccgttcaaattcaaagacgatccataaaacacaataagtaattataaaaacttaccaacactcaaaataaaaacgtgaacggcaggattcgaacctgcgcgggcaaagcccacatgatttctagtcatgcccgataaccactccggcacgtccactttttctgtaaactaaacttttatttcaaaatagactaaaccgtataccattctctatcctaaattttgatcatgagtgagaagtagaagattccaaggatgatgcagtttatgaacaaaataaaaaaattagaaccataaacctatttggctgtcttgatttttttgaatttttataaaattttctcaattcaaaaaataaattatttctaaagagcaactttgatgatatatttatgcatgtaatattgagattgtgcttatgattgtttatattcttgaaaataaagccaaacaaatcgtgcaacagagtgggaaagggtatttcaccacccttgtatgaacgttgacaacttataggcacaacccacaagcatttgaatataattatgcatacattttttgttctttttaaaactctaaaactaaatgtttgtttgaccaaagtaaattagaaaactcatagtttttagtcacttttaaatcatttttcatcgtatcaatattgaaaaaagctaaacatacggatcgtttaagaattcgagcaaaactttttggtatgtttaattgtcgaccaccatataaccgtttattataaaatttaaaaaccttaatgtcacaacgaaagaaaaataaaaagctctcatgtgggagcaaattccgacctaccggattcgaaccagtgacctaaggataatctgcgtctactacagtcctccgctctaccaactgagctaaggtcggattgtattctatttcatgcatgtgtactgatctaaatattctatgaacacaatgatttgtattaagttagcatactcatagtgagtctctattaaaaatttgaaaacaaagtttgaatttataaaaacattatattagaaaaatacttgcataaatctcgtaaaccttgaacggtttaaaatacagtgaaaattacttctagatttcccactcatttctgataatacagtcaatagctatgcaattctctaaaacaatttctcatagaaaaacgagtttgtagttatactcttctctaatcactttgaaacgaaatgaaaaaaaaaaatctttaaacttttatgatccgacctagcggattcgaaccaatgacctaaggataatctgcgtcaactacagtcctccgctctaccaactgagctaaggtcggttttgtatcataacactttatgcatgttgatgattcaagaaaagctttttaatcaaatttaaacttttcaagaagaggagtagaaagaaagttgacttcatatctttcatgctgttttgttttttttagaggttttttatcaatactaaattttactgaaaacggtaacatgatgaaaaaccgttcaaattcaaagacgatccataaaacacaataagtaattataaaaacttaccaacactcaaaataaaaacgtgaacggcaggattcgaacctgcgcgggcaaagcccacatgatttctagtcatgcccgataaccactccgccacttccactttttctgtaaactaaacttttatttcaaaatagactaaaccgtataccattctctatcctaaattttgatcatgagtgagaagtagaagattccaaggatgatgcagtttatgaacaaaataaaaaaattagaaccataaacctatttggctgtcttgatttttttgaatttttataaaattttctcaattcaaaaaataaattatttctaaagagcaactttgatgatatatttatgcatgtaatattgagattgtgcttatgattgtttatattcttgaaaataaagccaaacaaatcgtgcaacagagtgggaaagggtatttcactacccttgaaaataaacaccatattgatgagctttaaacctaagcacctctaccctacccacttgggccgggcctgattggaaatcttcaaaatacatcttggtcacgataaacaaacatgaaggatcttgcgtctgttttccgagaaccagggttgcctcttttagtgtttccactagatttcttacaccttcttacgaaaaggcatttgtaggtgttttactttctatatcttacgagctatcaggcattgacgtgcttattagtcttgtacaaacccttgacgccatatcttagtaagctggcatagtggcatgtgtcgaacttgctgatatactctatatttaccgctttatcacggtttttaatatcattttttatcgtattttattggtattttccttatgttttgtctatttagagtccaagtgagttttcttccattttagaagttctatagtgtttttgtgtgtcttttcgtgtgttttgtatgtttttgtaagttattccaggacaaaataaaaaaggacatacatttggatactatttctttaaagataataatcatcaaaaaacagtcccagactcggatgaaggtgtacccttgggatttgtttcctcgaaggtccttacgaaagtcaatagaaacttgagttagcttttcagtggaggtcattgtgggttaatccgagctgtggttaaagagttatggccggttaactgaaaatgtatcaatttgatgccagtgtcggtcttgtcatttttcggggaggctttttaaactgttaaattttctatattttgctaattgtgggttataaaaaaaaaaaattcacaatgaaacaaaatgctattttatttttactaaaatgggcttaaattctttcatttatttttaagatactcttaagacactattaatattttagacaaaatgggccacgaaattagaggcccaatacctatatgttatatgtatgtgtcaagggcaggacctgggtgtagagggacattctcacgatccaaagtccatgatcagacccagatctgttatgtgtcgatccggaaacttctctactctaaaagttgatttagatccaacctcttcttttgatatgagctttcatatctggaaggcgtttgtgaaaatagacttgttattaatgctcattgatcatatagacaaacataattagattatttgtgaagttgttagtgtcacggaagtggaattagtcatatttgtgagtttcatgttctggttaaacgtcttacttcattgcatgattgttaaattcattttcatgataataaaactcatagtttaatgcttttatcttattttacttcttgcattttctctatattagtttgaagctcgcatatttagtgttgcaatctttattcctggtgggatcgatttctaaattactataacggttgcgcttgcacttgggtgatttagagatacaaattttataacttgtgttttgaaaccaaaaatatttctacaacatttgctatgtattaggaaacctctatggctctatcgatggtaatttctctcgaggcttgtaaggtcctcgttggatgaaattcacaatgtcacaactatttaatactctccaccttctagtgattaacttttttttttttttttggggcaaaacctgtcatgcaaaattttggttttcgatcgtctatacatgttcctgtgcaaaattttggagcacagttaaaaaaaaaatatactagaatttgatttgcaattttcatctttctaagaataatataattctctatttaagactcgtctttactaattattcactacactttattctgctgttatgttttctttttttgaccatgcagtgcaataaacctgacagttacttctggtaactaaaacatcatcatcgtcctcacatgtgaaccttacacattcccatgatgttctgaataatgtaattgactaattgtaatgcaaggcaagacatctctcctttgtctctctcaccataaaaattaaagaaaacaaataaaaacacttaaaaaacctttcactacctaacacttgataactctatctcttcttcttctcttattaccttccaccagatctcactccccacatttcaaagttttctccctttttgtcgatttccttctcttactcatattaaacccaaaacttaataaattctcttaaattatctattcactggctgggccagagtgtttatttgaatatgttttattacagttttagtgtagttgttgtagttacatgacagctccttacaagcttagatctctccacagttctttcgttatcttccttccacattgacacttgccttaagaagagggccaaagaaaggtctcttgtctctttgtctgagctgttcattttcttgattttcttgcatcttggatttgcttcattacattctttctcctgaaattttatttagtgtttttctcacttctctcaaatttggttctaggatctggaattctttcttcttcaagatttgtaaatgggtgttagttcttcaaagatctaaaatatcaagatcaggtaattaaacattaaattctcatctgctttggtacttactctgtatgtgttgtctgtttatatttattttaagaccaacattattgcttgtgttctttattatgtccttgattttagctacttcagttgtcctctagtgtgttttcctgggaaatttttgtctttctatgagtaaatttcaatgtggataaacttgggaccacaaaacaaattcgagactctatcattaagctcattgcattttcatgtatcaacttggactctgtttatatcaacctgattttggagatttatttgtaaagtttaggaagaaatgggaggtgacttgaaaagccagctatctagagagagccatgtgtttggacttaaggtgtgggaagtaattggtatagctgttgcattgctcatcatagctatcctctctgttctttcgtgttgtcttacttcgaaaaagaaatcaagaagatcgaaaaccggtcttccggttatccaaactcctccggtggtctccaaagagatcagagaagtgagagttgagcatgtctcagctagtaactttgctcctggtgaaggcattcttctaacaattcaggacaaaaataacaaagactcagaaaaagtcatggttcatttggatatgaggaagaagagaagtagtagtggccggtcagggtcgtttcatcatttagagatcatagataaacattctgactctgctgaagaagtttctgcttcttcatcattgtataatattgcaactccatctccattgtctggtttgcctgaatctcaccttggttggggacactggtttactttgagagatcttgaaacagcaactaacagattctctaaagagaatgttataggtgaaggcggttacggtgttgtctacagaggagagttaatgaatggaactcctgttgcagttaaaaagattcttaaccagttgtgagtatcggattgtaaaaagattttcatacctttttatggtttgagttttggttgattgatagattttataggggacaagctgagaaagagtttcgagtcgaggttgatgctatcggtcatgtgcggcacaagaacttggttcggcttcttggttactgcattgaaggcacacacaggttggtgaaaaaaattccaacttaggaaccaaatttgtgagttactaatactaaaagatcaatgtgaattgctactaggatattggtttacgaatatgtgaataatggaaacttagaacaatggcttcatggagcaatgagacaacatggatatctaacttgggaagcaaggatgaaggttctgatcggcacatcaaaagcgtaagcaaacaatgtaatttcctttttattaagttcttcttctcacatactgatcattattcctctgtgtagtcttgcatatctgcatgaagcaattgagccaaaagtagtgcatagagacatcaagtcaagcaacattctgatcaatgacgaattcaacgcaaaggtttcagattttggccttgctaagttgcttggtgctggaaaaagccatgtgacaactcgagtgatgggaacatttgggtcagaggcttataaactgaaaaataatcaagaagtctttagtattaaatctaaatgcttttgtggacgttttgtaggtacgttgctcctgaatatgcaaactcagggttgttaaatgaaaagagtgatgtctacagctttggtgttgttctcttagaagcaatcacaggacgagaccctgtggattacggacgtcctgctcatgaggtaatcaactattttcatttagtttaattagtttcatcgcggttcgcggaccaacacgagattattgtaggtgaatctagtggactggttgaagatgatggttgggacaagacgatcagaggaagtagtggatccaaacatagaagtgaagccaccaacaaggtcactgaaacgagctcttttgacggctctaagatgtgttgatccagattcggataagcggccgaagatgagccaagttgtacgtatgcttgagtctgaagaataccccattccaagagaggttagtgttctaaagagctgataaaaccaaacatagaccataacaggtgatggttataactggaattatgtttctttcaggaccgaaggcgttctagaacgcgagaagggagtatggagataaactcagacactgacatgagtactccagtttcaagatcacagagcaagagacaataatttatcaatctgcgtaagctttcaacgcgtttcatgattatgagctattctttgaacttgttcttatgcattttctgtttgtttgtttttttttggttttgaattgagatgagtagagaccatagaggattgtttgtacatatgaactggatttgtgtttagagctcctacatcaaaataatatattggtgtgtacagtactattgcatcagctgttcagatctctaccacataccatacaacaacaaagtaacatagaaaccactgaaagcaaattagctcactaaccaaaatataacagtaacaatcaacactagtcaatgagaagactaaaatcccaataacactagcatcgatggagactagtatttttatgttgaacgtgcaaaatcattgagaataacaaactctcatcgaaaaatccttagacatgccaagttgttgtaaataacaaatccaatatttcataatttgagaaagagatgtaagatataaagaaattagctcttattggtgtaaataatatattgtatatttgttcattttaatcattaatctcatatttattttgaagtttataaaacactcataatatggccatctcgggtgttgtaaagtccatttcctgtaccagtctaatgattgcatgttcaaaacttggattcagtgtcagattcaccaaaagtctcgtgaaaggacaatattatcgatggagtatcaaatgcttctgatgaaattttgtttgatttgtgtgaacaaattaacaagtaaccttcgtcaagtagaagatcatatggtttcaattttcaagtgaagttttatttaataataatgttttaatcttgaagacttaaaatttgtactgatttgagtatttatgagtttttttctatagagtttattgtgatcaaatactctatcaaaataatgaatgtacatttaaaaaaaataaaagtaatattagactaaaaactcccaaattctcttcaaaattccgtttttcctcgtatgtttttttttttttaaattcataccataacaaatacacatagttaacaaacatcactgaaagcccataaggcccgtcgataccatcacaaggtaaaaaaagagttatctctacccaaaacgtatcgagagatattggagtataacaatgccaagtgttgcacaagaaagtgatatgcttttccatcatcctctgccacttggactctgattccggtgaataaaatcaataccggagaaacacgacacaaaaagaaaatattgaaaccagccaccgtctatgaaaaccgactgatggtggaaaaggaaccgggccttgtccgggcacaaagcggaaatgaaaaaccggatataaatggaattggaaattaaatagaatcaaaaatcaatttgcttagccacacttttggacttcagaggcggaagaatgggaaaaggtggactcgaccacacctataagacaagttgaaattaagagaaaagtgaagctaacatacttatcataggtttttaggggttgggactgaagagccttatacaaacaaaaaaattgtccaatacttgtgagttgtgaccacatttcacaaattcacaaaaccaagttacttcggctattttgctaatccgtcattttcatgttgttgaactctttaaaaatactaataaaattaagggctggaaaatattgtaataaaaagtagacaaccaaaattaaggaagtaatttgcaagttgcacccttatcaaaaaaggacataaatagtcttttctcttgcgaaataacattggcatcaggtaacaaattaacgccgaagtaatgtaaattcgtttatttcacttactattagcaaaaaataaaagatatcaatttattcgataacatattattttatataacatattattttatatgatatgaaattaatatatgttgacatgatgcacggtatattttcatttggtagacaaatgttactttacacgatgacgctatacctaataaaatagcaacaaccatggttaccaaatttagcttgaaagtaattaatgatatttcatgtatgaactaatataatcaaaataaaaataaaaactgctaacacttgtgtgttgagaccacttaggtaatctatcttatgaatgtaaaatatagatctacatatatagatagatgatgcataaaacgtcatatatatcaccgatgaaaacaaaaccatgcataatatatcctggctcaactcagtcaataaactatctcagtttcttttcagaaaataagaagtcttagttcgaatattttaatagtgatatcgtagaagatatgtttcctaagaatttatctctaatctcaacatccctttttaccgctacttgctagtctaaagatactatatatagttccaatatttcatttttaggctctattttttatgtgagtatgagacctcttaattcatcgcatgtgagatttggctaacctattacctataaacccctaaagtagattattgtagaatctatgtttagtacaagaatgtatctctaacctcaaaaacccttttttatcgctagcctcaagatatatatccttactagataaggcccgcctatttaggcgggtgtatccgaaattttcaaatattcgaacgggtctaaacttgaaaacccgaaaaactcgaacccgaacccgaatagatatccaaacatatctcaaatataagtataagtataactaatatatacttatacataaaaaatattaggacttttttgatattttagttatttttgtgtatttttagatatattcgagcaaaactactcgtgttgttttgggaatttttgaaattttcaagtaatttaatagatttgcacacacaatttgatatttcaatatataaataaactcgaacccgaacccgaacccgacccgaaatcttaaattacccgaacgggtcctaaacttctaaactcgaaaacccaaacccgaaatacccaacccgaatacccaaacgcctagagctaataattaatagaaaaacagaaatccacaaaaatatttagaaaccaaacattgttgaaaatataattttatatatgccgtaatcttgtaagttaattttaacatcatgcaaatattaaatgagttaaaattaataaatgaaaataattgaaaaggtaaatcctataagctaagctatttttctcaaaatgttctattttcacttatgattacatgagttaaagacaaatttgttaattttccttttattgaataaatgttaattgtttataaatatatagacatataaattagtatatgtaaatttgtttactttttaagattttctattctttttaaaaaataaaaaagttaaattttaaatgacacatgtaaacatctgatcgtttgacttgacacgtggcacgatcctatgagttagcaactttgaaaaccatactttatataataagattactagtccaaaagatagcattacctcttcattcctcgcgtgtaagacgatttggctaaacctatgaaaccctaaagtctaccacatacatacataggaataggataatgatgtccattactctttttatagtttattctctttgtataccttcaccactgatgtatatatatacacatgtatatagctcatcattcttcatctcctaagacattcacaaaaaatgtcattacctaattcactcttctatacatttttcttgatcttattctcaacgattcgaattgctcaaagcatatatttaagtccatcaccggctccaaatccggcttacaatgataacgacaatattgcgccaaccgtcttcgacgtgacttcatttggagccatcggcgattgctcgaccgacgacacgtcagcattcaaaatggcatgggacgctgcatgtatgagtacagggcctaagtcagccctgcttcttgtcccttacactttctgtttcttggttaagccaaccaccttcaatggtccttgcagaacaaatcttgtactacaagtaagctaatttcataatcatactttaatgttctgtatatagtttttcatgtacggaaattttcttccttatagatcgacgggttcattgtatcgcccgatggaccgaggtcatggccatcgaactaccagaggcagtggatgatgttttacagagttaatggattatcaattcaaggctctggtgttatcaacggccgtggtcagaaatggtggaatcttccttgcaaaccacacaagggccttaacggaacgactcaaaccggtccttgtgacagtccagtagtaagccatcgcctcagaatcacactttttcttgttatgaaaaaattagtgaattacatttgctaaaaatgtcattttgattcgatatcaggcgattaggttatttcagagctcaaaagtaagaatccaagggattaacttcatgaacagcgctcagtttcatgtaaggtttgacaactgcagtgacgtcgtggttgattccgtgataatcaaggcaccagcttctagtcctaacactgatgggatccatattgagaatacacacaatgttcagattcgcaattccatgatttccaacggtatgttttcccgttttcgcagttgcttaatagtaaaatttcattgattccaatcagttttatgttacttatttggttataacaggagatgattgtatttctatcggagccggctgctttaatgtcgatattaagaatgttacgtgcggtccaagccatgggattaggtatcacattcataacttgcattaatatttccatctgccaaactctatgcgcctctcttatagaggaggctttagattcccagcctttaaggctctgtttctcagaaagttttgtttttttggtttgaagtgtgaacaacgaacctatgggtaatgttgcagcataggtagcctcggagtccacaactcgcaggcctatgtctcgaacataacagtgacaaactcaaccatatggaactcagacaacggtgttcggatcaagacatggcaaggagggtcaggctcggtttcaagaattgtgttcagtaacattttgatggtcaacgttcgtaaccctataatgatagaccagtactactgtcaaaccaataactgtgctaaccaaaccagcgcagtcattataagcgatgttctctatgcaaatatcaaagggacttacgacctgagaagcccacccatacattttggttgcagcgactctgtcccctgtactaacctcacactcacggaagtcgatctgtttccttccaaaggccagcatttggaaaacccgttctgctggaacgcgtatggaagcatgaagattacagtaccacctgtttattgtctactcgatgcacctccggacttctaacagaaaaagatatgttcatcgcagttcaccaacttgtattcagattcagaaccaagtatgaacacaaaaatgtgagggtagcttcaatatcagtaaagagtatcgaagaacttagtctaaaggttagacattaccctaaaagtatgtaattttttaggatgcacactatatacagttgtgataggctcaaagaagtcaatctagtttgtaacataaataaataaaaagtactttgagaaacagaagaagacccttaaatcagattcatacattgaattttcctcaaaatgattagtactttgagcagaaagattgcatatttccaaatctcattgcattggcaccactggcaagtaggcatatatcatttttcatttgataccacttttgaagaagaaaatgaatctagtttatgaaacttgaatgcaatgatgcatatatgaagaggagatagtagagaagtgaacttatattccatttattgataagcgaatttttcccgtggggagacaatcggtccatgatgcacatttcatgaataagaatagccacatttgggataacattacttgcaaatagaagcgagtacctccagcagagaaacagtgaatctcatttgggtttcttcatccacggcaacgaaaagaggaacgtgaacaaagagtgatctggtcttattctgctctgcaaatctcagagaatggtaatagacatagttacacacaaatcgacctgcatcatctgatgttatcacttcaaagccattcttctccaacgcctttgttatctcttcaacaggaagattagtctgcaaatcataaacaagattcaacacaaaaacaagaatggccaactctgcagaatcaggagacaaagtcaacatacctttcttacagttgagattggaccatcagagggaacaattggcaaattctgcagaccacaagaatgtttcatggaactaaacaacttatcaaacaaaaacaaccaaaggggagtgaacaaaaacctgaggtttccaacccaattcatcaggacaacgaaaagtcgcttcattcacagcttgttgctcaattgcaaattttgtagcgccactattaactccaaagtgaacctaaaagagacatcacaataacttcagagaaacttcatcatatagaatcaaatcagaaatcacttggcttaactaactaactaacccatatggtttttccggtcaacgactctgactcttttgtgttaaccgcggattgtagcaactgatagagagaagcaagagctccttgaccagcagtctcaagcacagtacaacttccaagattcacatctttcgaaacacaattcttagccaaatattctttcaaattgttagccattttctctgtaggattctcagctactccatggaacttcttgaaccctgtgatatgaatcgtcacacccgttggtccttcagaacccatcaatacaactgaaaacaaaaagctgtttctgtcagatatattagattacaggacactgacagtgtcacagtgactctatcctattaacaatctaaaacaccagccagatttagaacaatcagacaacactctatactcaaatgacaaaaacgaatccagatctcaacaagtttaacataaagttaataactttatcaacattaagaacaaagtttgcagcttttttctatttccgtacgaacccagacgataaaaagatcaaaaattaaaaattctaaaaaaacctaactttagatcaaacccagttcaataagatgatcaagaaacgtaaaaatcgaaacttttacctcaaagagacagatattgaaaacctgagacgacgaacacaattacacaacaaccagtcttcgagtgaaatcgatttgcctgtaaaatctgagagagagaggaaatgtgacacaacaaccagtctttgtccttatccaatcaattgaaacctaactttaatcatgttccactttggacggaagtttgataaatcacaaaacaagacattaagacaagaggtacatatgttttgtattcttttattccatataacaaaagtggtaggtcacttctcaaagagataataacaacaaatcatcatcaatgattcaattattaaaacgaataatgttaagatgataattgagtggtgcattgatatgtgtgaaacattctcttcttataaaacaatataataatacagacatctcaaactaaaccaatagaagttgaaccgaaataaaccaatagaaatagaccattctcaccagtagtctctacaagaacactctccattgttgaaatgatggaatctgtttgcatctcttagaatgatctctctttctgtgactttagaaatgagtttaatggcggcatgacaatctccacagactctaaggttcttcatgactcgaataggtactccttcgggtagctttaagagtccataagctaccgcgagtctttcactgtgacggcttaaactatcaactttctcttcctcgtctacatcgtgtaagacatggctgcaatcaggactataaccagcttctcttaataatccatctgttttctccaacatcattagtatcatcgcttgctcgggatggtttttgatacctccgcgagtgaacatgtgcactttcttccctacctcaatccaactacaaccagggaatttacttacattgtttgtcctcatgttttttcttactactgcaacatccccccacttggatcgagatgcatttatgctcgatagcaaaacgtatgtaccagcgttatctggttcattctcgaaaagtttctttgcagcaacttcagctaaatccaatcgtgagtgagttttacacgctcctaacagagcaccccaaactgtagcatctggcttaatagtcatactttcgatcaactccattgccttatctacctgtcctgcacgcccaagcatatccaccgtgcaagaataatgctcaaccgttggagtcacgcaaaactttgattccattgattcaaatatctcaagcccttcctcgagttttccagcatagctacatgctgtcagaattgcaattaaggtcactttgtttggcatggtaccagatgatggcatctcgtgaaaaatcttaagagcttcctctcctagaccatgcgacgcatagccagaaatgattgaattccacatgataatgtcctttgaggaaaacctgtcgaatactagctttgcttttacaagctcaccacatttgacatacatggtcatcaaaacagaggcaacatagacatcatcatcaaactgacatctcaccaaatgagcatggacctgtctaccatattgtagacttgctaaagtggcacaaaccgaaagaatactgatcaaagacggaaaactcggtctaactccttgtttctgcatttgagcaaacaaatcaagagcctccaattcaaaaccttttctttcataagctttaatcattcctcgccaagtcgcattatccctatcctccattagatcaaaaaccctcctagctttcgatatctctcctacctcaccaaacccaacaatcatagcattacacgcaataaccggcttcatcggcatcacctcaaaaaactcctcagcatcctcaattctcccactcaaagtataccccaaaagcatagaagtccacgaaacttcagtcttctccggcatcacttcaaacaacttcctagcaacatccactcgattattctgcctgtatccagtaatcatcgtagtccaagtaacaacattcctctccctcatctcatcaaaaatcaaccttgcctcatcaactcttccttctctacacaacccaccaatcatattagtactcgctacaacatctttaacaggcatcatatcatacaacttccttgctttatcaatacgtccatcatcaatcaaaccaccaaacatcacagtccaagaaacctcattcctctcaggcattctccaaaacagcgactccgcttcaccaaccataccttcttgcatgtaacctttaaccatcgcggtccacgacacaacattcctctcaggcattagctcaaacacattcctagcttctacaatcatcctattcttaatataccctgaaaccaacccgttccaggaaactacatttctctcagacatttcgtcgaacagttggcgtgcttctttcggtaacccgtttgagaaatacccagatacaattgagttccatgaaccgattgctttaaactgtaacgaatcgaaaaactttcgtgcttcattgattttcccgattcgtgagagacgtgagatctcaaaactgcaattcactccagtgcttgtcaagtaagttctgcgtaagattagctttaaacgcttcattaatcaaactgattctaatgagagtgattcaaatgtggtttaaagataataatcatgacataaaatgaggcgcgaaagctctaaagctgacaattttgggcagagcgtttgtataagggtttttagaatttataataattgaaattatttattcagctttaatggaaaaatcaagttaataaattggatcaatttaattaaccggttactgattcgtctttaatgtagatcaaatatggagaatcttttaatggcgtcgtactatgtctttaaatgaaaaaaataaaataaaattcgaattgttttgatttttcagagatcatcacaacaacaacgacaaatggtttatcttctaaagtaatagttttgagtaatcaagtgaaattctattatttcaaactgttctttctaaatccaacattgttattccattatccgtttggtgaaagacaaaaaccgttaaatattgtagccttgtatttttgaaggatttgttcagccaaaagctatataatttttggaacgaaataacaaaatttaaaaacatgttaaattcataatggaacataaaaagtttgttcataataaatcacaatcaatatcatataaatgaattatgttgaaatttttcttctcttcataagacagtagatttataaagaattctcatatagaaagagatattcaaaaaaaaaaaaagattttcaaacaacatgtgggttttggtggctaaacggcccttgcaaacttcctaagagtttcagctcttacaacttcaatgatggctcgtgtggtaaaagcgagagcgttgctacatcttcaacatacgtgaggtttttgtcactgtagtcaaatgtttaggagactacaaaggaatggtagttaaccgcgagatcacggccatattagctaacttctcttacggagctggaggtaagttacaatactacatttgggaaccatttattgctggttgagcctcttcagtaaacgtggtccattgcgatattagcatttggacattcatgatgttccacatgccacggttcaacactcttcttcgcaatgtctcatttctcattctgaatttaactgtcgtgtcatcgacaacaaatacgtctatcaaagatgatttatctctcgattttcaaatcttgttcactatcatgtgaattttctccacttgtggagggtttgcattgacaaactgcccaattaaaaaatcttcccatagaggctttgcatccataaacacatcttttgggacaacaactcttttctgaccatcaacttttgatacctcaaacttctgctttgtgtgagtttgaccttagcaacattcacccaagattctttaacgacttgctcaaaatccatcttttcagtattaaaattggaacgatacataaaaaaatcttataaaacgagactaaaaagtattatcatagtcattcattaattaaattaaaatcaattgaatctatttttacaaatttcaagtaaattttaaacataaaaaaaaatcatgaggcgaatatacttttttaaacatcaatttattggattataaattatttacgtagttattaaataaaacagtccttaaaaaaatgaaaggataatagtaagcaaatgtgactgtctgggcaagtactttacatatatgtattttgcaatgcatgtgacgatagtatgatattttagggccaactagttagacattttagactttttgggtcaacaaggtacatcgggatgtgactttgtattgagatttggtatcccttagatacatttttagatatgagagctggatctgagattgggggtagagacatgggcagacacaagtagtaaggaggaaatactactcttttttttggataaataattttagaactggttaattatattatcaagaataaaaattcaaataatcgtttgttgcgcacactgtatagttttaaatagtgaatcttattagtaagatgtttctctacaatgaatattgttaacgattgtttagtttttcttttcgaaaaagatgctctggatcgtcacataacagagacgactgtccatgctcgtagtctcggtgaaggtgtcagttggcatagtatcctagagtcttacattttttgttaacaatgaatatctactgttgcctctctggtctccatcaaatagcacaatgaaaccaagtattttaaattgtattttcaaatttgttcaaaaaaattctatacgtgtttaattaaaggactatagactatagtaatagtaaattaagactaattacatatttgaccaaatctacttcaaactgaccaatgtttcactacaaatacgttcacaaaccatcatcatctcttcacccccttccttcaaatatagaaaatatggcaacacaaaacaagattcagaaaaactctctcatcattttcctcttcaccttagtcgtcatcgcccagaccgctacctctcagaactgcctcaccattggttgtcctggcattaacgagtgttgtagccatacgggttactgcggcaccaatgtagagcactgcggcttttggtgcctcagcggcccttgccaactttctaagagttccagctcttacagactcaatgatggcccacgcgggaagatcgaaagcattgttacacctgcattattccacagactcatgcgtaaagtcggaagtaattgcacgggaaaaggtttctacacccgtgaggctttcatcacagcagtcaaatctttcgaaggctacaagggaacggtagctaaacgcgagattgcggccatattggctcagttctcttacgaatctggaagtaagttagttactatactaaccattaatttattttttcttaaatgtataataatgttaagaaattgtgttatcttaattaattaatgtgacacattcgagtagctgagccaatgccattggactaatccatttttttcatgtacagatttttgttacaaagaagaagtaacgagtgagacatattgctcgtcaagcaagacatacccttgtcaatcgggaaagaagtactatggtcgcggtctcttgcagtcaatcaaatggaacgagttctatggtgaggcgggaaagtaccttggcctccctctattgaaagatccagatatggtggctcgtagtccggaagtggctttcaaatttgcaatgtggttttggaagaccgaagttggtccatcactaagactaggatttggagcgaccacgatgaggatcaatggcatagagtgtggtggtatgagttggaatgctgaggctatgcagaacaggattaaccaatacttggagatctgcaagtggtttggggtgaatcctggtaaagatctatattgctaaaaggcattccatgtgatagtacgtttaacttaatttaagttgtcgattgtaatgtttccaataattaaaggtttcgattgtggtgtttccagttttaaagattaaaagtcatcaggtgagaatataatatgtaataatatcacaaatggaaaaaaataaaataatggctacaagtattgatactgtgatacatgtgccaacggatatatggaaggcaaccaggctagggtgggcataatatccgaatccgatcacccgtccaaaacccgattgaatctaaatcgaatccaaactcaaacccaaacttgtatccaaacatacccacaatttaaatacatagtaataatataataatctaagtgtccaaaatattttgatttttggaatacaaaacaataataaacgactaacaaatgtgtcgattttgatttgataatcaatgcaagaagccaagaacgttcgaatttgaattcacttcggatctcttatagactttctctctcagggtttataatgggcctcaattgtctttcctcgataagcagccttctgcgagttctagactgaactttcgggttcccttgtctagagggggaatatggtattttgtacaatttacagagtgtatttttgacctgaaaaaatttgtagagtaaattccaacacatactcaaacttgatatttagtgttatttcaatatcgtaattaatgggctgatgagtcagctaacacgtgtttaatgacgtagagttggtttgtaggtgtaagtaacagtttttaactaaacacataaatcttaactaaaactttggcacatatcaatcttagtaagatgagaagcttgataggagttcaagacatgactaaggccaagttatagcttacgaggcaaaatgttggataagattcaaatattgcttgcaacctaagatttctctaacaagattggttaggataagaatataagataggttttatgcatgtaatagaattaagagttatctagttctaatagaaatatgaatagcaaagatgtacaactactatgtatatcagtgttgacttgtgaagttgagaataagagcttttggtgttttgtttttgagctagttttctaaacataagttagtacgtttgatatatttcttttgaattggtaccagtgcctaggtcgaaaaaggttggcatagggaggtgcgcttgggttgcatgttcggtgtgggaggagtgttgggctgtgtggccttagcccatttatattgtatagattaactaggtctaaacttatcgtgtatataaaggcattgcctcttgccgtaatcaataagaatcttcttttcacaacctcgattgattcttgacatggtatcagagcacaatacctaactactaaaaggtttttgtgatcgattctgtgatctctccttccgctataagagatcgctttcttattccttctaacttctctacttaatacttgcatcaaactctccgttcatcatgagtactgaattggctctcgctagctccaccacaccagctaggactgaaacaaggcgtacaatctcgccatatgatctcacatccggtgataatcccggaactctcatctccaaaccgttgcttcgtggacccaactacgacgaatgggccacaaatcttcgtttggcgttgaaagctagaaagaaatttgggtttgctgatggatctattccacaaccagttgagacagatcccgatttcgaagattggactgccaacaatgctcttgtggtttcatggatgaagctcaccatcgatgaaactgtttccacatctatgtctcatctcgacgattctcatgagctctggacacacattcagaaacgctttggtgtcaagaatggacaacgtgttcagcgactcaaaacagagttagcaacctgtcgtcaaaaaggagtggccattgaaacttactacggccgtctctctcaactgtggcgtagcttggcggattaccaacaagctaaaaccatggacgacgtcagaaaagaacgtgaagaagacaaattgcatcagtttcttatgggacttgatgaatctgtgtacggagctgtcaagtcggctcttctctctcgagtgccactaccttctctcgaggaagcttacaatgctttgacacaagacgaagaatccaaatccttgagtcgcttacataacgagagggttgacggtgttagcttcgcggtccaaactacttcacgacctcgagattcttcagaaaacagagtctgtagtaattgtggccgtgttggtcatctcgccgaacaatgtttcaaattaatcgggtatcctccttggctcgaagaaaaattgcgtcttaaaaacactgcatcttcttcacgtggtggtttaagttcgttcaaaggaaaacagagtcatggtcgtggatcttctattaatcatgtcgcttcttctggaatggctgccaatgttgttacgaattcatcgctcacttctccattgacatcagatgatcgcataggacttagtgggctgaatgattcacaatggaaaattttacaaacgattcttgaggaacggaaatctacctcaaatgatcatcagtctggtaagtattttcttgaatcttggataattgattctggagccacaaatcatatgactggttctcttgcatttctccgtaatgtttgtgatatgcctcctgttttgattaaacttcctgatggacgttttacaaccgctacaaaacaaggcagtgttcagttaggctcttctttagatcttcaagatgttctgtttgttgatggtcttcactgccatctcatctccgtttcacaactgactagaacacgtcgctgcatttttcagatcactgacaaagtttgcattgtccaggaccgcaccactctgatgctgattggagcaggtagagagctgaatggcttatattttttccgaggagtggaaacagcagctgcggtgactagtaaggctttgccgtcttcacagttatggcaccaacgtttaggacatccatcctcgaaggctttgcatttgttacctttttctgatgttactagtagtacttttgattcaaagacttgcgaaatctgtattcaagctaaacagactagagatccttttcctttgagcagtaataagacgagttttgcttttgaattagtgcattgtgatctctggggtccgtatagaaccacttcaatatgcggctctcgttattttcttactctagttgatgattattctcgagcagtatggttatacctcttaccatcgaaacaagaagctccaaagcatctcaaaaacttcatcgctctagtagaacgacaatacactaccaacatcaagatgatccgaagtgataatggttctgagtttatttgtctctcggatttctttgcacaaaaaggaatcatacatgaaacttcttgtgtaggtactcctcaacaaaatggtcgcgttgaacgcaaacaccgccatatccttaatgttgctcgtgctctccgatttcagtctggtttacctattgagttttggagttattgtgctcttactgcagcatatctcattaacagaactccaactccattacttaagggaaagacaccatttgagctcatatataatcgtcctccaccactgcagcatattcgcatttttggatgtatttgttatgttcataatctgaagcatggaggagataaatttgccagtcgtagcaataaatccatttttcttggttatccatttgcaaagaaaggatggagggtctataatatagaaactggtgtggtttcagtttcacgtgatgtagttttccgtgaaacagagtttcatttccctatctctgttatggattcgtcaccatcacttgatccggttctcgttgattcatctgaattagaagaaatctctatgactcctccggtcactccgtcttctccggctactccatcttctccggtcactccgtcttctccggttactccgtcttctccggttagtccgtcttctccggttactccgtcttctccggtcactcctgtatcttcaactacaacctcagctgcgatagacaccattgaggatattaccactgatcttgaggattcaacctctatggatttttttcctgatgatgaagatgagttttctcccactgctacagaatctcctgcttcatcgtcatctcctgtacaccctccagcagttcaactagagcttctcggtaaaggtcatcgtccaaagagacctcctgttaaacttgctgactacgtcacgactcttcttcatcaaccattcccttccgcgactccgtatcctttggacaactacatctctagttcacgtttctcagataattatcaagcatatattctcgctattacatctggaaatgagcctcgaaactataacgaagctatgcttgatgatcattggaagggtgcggtttcacatgaaattggttcgcttgaaaatcttggtacttggacagtcgaagacttgcctccagggaagaaagctcttggttgtaaatgggtgtttcgtctaaaatacaaatctgacggcacacttgaacgacacaaagcacgtttggttgttcttggtaacaatcaaaccgaaggtcttgattacacagaaacttttgctccggttgcgaaaatggtcacagtccgcgcttttcttcagcaagttgtttcacttgactgggaggttcatcaaatggatgttcacaacgcgtttctccatggtgatcttgacgaagaggtatacatgcaatttcctccgggatttcgtactggtgacaagacaaaagtatgtcgtttacgcaaatctttgtatggtctcaaacaagctcctcgttgttggttcgcaaagctcacatcggcattgaagaactacggttttattcaagatatttcagattactctttgtttatctttcacaaaaacggagttcgacttcatgttttagtatacgtggacgatttgatcatcacgggtactactattgctgtgattacagagtttaaacattacttaagctcttgtttctatatgaaggatcttggaattttgcggtacttcttgggaattgaggttgctcggagtcctgaaggtatctacttatgccaacgaaagtacgcacttgacattatcacagaaacgggtctccttggtgttaaaccggcttcttttccattggaccaaaatcataagcttgcttttgccactggtgaaacaatagatgacccacttcgataccgtcgtctagttgggcgcattatttatcttgcgactacgaggcctgaattatcatatgttattcatattctctcacagttcatgcataatcctaaaccggctcattgggaagctgctcttcgcgtcgtcagatatctaaagtctagtcctggtcaaggtattctcctacgtgctaatacacctttggttctctctgcctggtgcgattcagactttggagcatgtcctcattcagatcgatctctcaccggttggtttattcagttgggtggctctcctttatcttggaagacacagaaacaaaatgttgtttcccgctcttctgccgaagctgaatacagggctatggcagaaacagtgagtgaaatcatatggatccgtgaattacttcccgctctcggtattccgtgtactgctcctaccacactccattcagatagtttatcagccataagtcttgctgctaatcctgtctatcatgctcgcactaaacatgtgcgtcgagacgtccatttcattcgcgatgagctcgtcaatggcactatcgctactaagcacgtctcaaccacttctcagctagcggacattctcactaaagccttaggacgaaaagagtttgcagactttcttgccaagcttggtatctgcaatctccatataccagcttgaggaggggtgttgggctgtgtggccttagcccatttatattgtatagattaactaggtctaaacttatcgtgtatataaaggcattgcctcttgccgtaatcaataagaatcttcttttcacaacctcgattgattcttgacaaggagccctcaatgtaacacgaaaaagaaatataattccggtttgggaaatataattccacctaaaaccagattggtgcgcttggtttatacagaaatatatagagatgttatatcgttatttgttatatcaattcacataattccgtctcaaaacccttacaacattataatattttgtttcagcaaatcggagataggtttttttcataatggtacaaattataacagttgtataagaaactattacaacacactcttctattatttccctagtgatttgattacaactagaaagttttactattaaaaaaaatcgtccaagttagaaataagcaaaagaataataaatttggttcttagcgacggcagaagaaatggaacggagttggtggcttagagtaatgcattgaaagaactttcatggctacaatggcattagctgtctcggtgtaatgaatcccatcccagcttatgaaacgcgacccttcctcacatacattagagcctttgtgcccacatgttatcttcacattgtagttgtatggagtccctccgtatccacaacacgccatcaacggactcttaaaacctgtattgagctaagtaaagttaagatataaccatctcatttatctactaatggtacgggtaaatagtaactctacttaaccgtattggttggagtttgcaataagactgtatttgatagcgtatatgtcaatatagattatggtggcatctcgtagttcggtcctcagctcctcacacatatgatccaatccttggttaaacagagttgctgccgagttgtaactgactaagcaaccgtgctggtcgagatctttgctcttaaccatagaaagtttttgaggtagacaacccaatggaccagtgttgtgaatccagaatctccttcctccttcatcatacaatctctggagaccataaaacccatttttaaaggttacatggtgcatactctaaagttatattaaggcgaataaactcacctttatgctgctttttatttccgtaataatttgtggaatcaacttaaccgtctgagaatacgagttgcctctagcgaatgaacgcgcaatgtcgttctgtccaatatcgatcatgtacaacgcgtttttgaatccattgttgcttatgaacatgccctttaatgaatctagaaaacacaaatgctaactctagtcaagatcattaactgattaagaacttaggataaataataatgatttgggatgaggtaggtttacttgaactagaagcgagctcgagtgatcgggatttgaaatggctgaactgcttgacctgaatgttaagcgagaaagggacgtttttgggaagagttggggatccagcaattgcaaaatttgcaccattttgaaaccttgttctacccaatgaatctaagtatggcctcaaaagacttgtattcaaactctgacctgcatatgcattattccattgctagtacatccatttaccagatttaaatgaataacacgaacataaatatataaatttggttcgcatataaaaaattatctatatgataattgaactaacttgagctatatatttttgttgaattacgttaacaattgtttgtatgacccgttatagaaatctcaatatcaaattatgctaaccaaaactaaaccaaaaccaaattttgtgcaatcaaatcgaattaacaattatttattagaattaatatgtttgaatacataagatttttttttataagatatactaaaagtttacagcattaacgaaaataatgagttatttttatttattttggttatactattttatctaaaacgaaactgaaataaactcaaatcaaaccaaaccaacaaatttcaactaaaacaaaccaaaaatttaattgactcttaacccaaactaaatctaaactcaaaccaaaccgaatcaacaaatttcaactaaaacaaaccaaaaaaaataatttactctgaaaccaaactgaatctaaactcaaaccaaaccaaattaacaaatttcaaataaaacagaccaaatgtaattatgaattgacgataaaaccaaactgaatcgaaactcaaaccaaaccaaaccaaaccaaaccaagaaattcaactaaaacaaaccaaaacataaattgacttctaacatgtgctacatggaacccactttgttctactagattctgattttcaatgaccgatttttttttgttttttcttatggatcacacctgcgacgcaccgacatttatgtcttaacacaatctggaccgtacatccaaaagtaaacgtacggtagagatcactatcatttatcaaaaacaagttttttgttctacttacataggaaatcgatgagaagacgtccgtcggacaaacgaccggtagatcgccggaaaaataagcgtccatttgggaagccaatggggtaaccaagtccagcaacaagtcctcctgtatctgaattagaatctccaaagttaaaaatcaccggccgagctgtacaactcgccgccctagagggttgccggagaattagaagagctaacgacacgagtgtaataaagaagaaggaaaatgtgttagagtagagaaagagagtagccattggagaaactttggtagtgaagagagtttacctctataacttttatatttagtgtggtccaaagaatattaaaaaatgaactataagagtggtgtagatttgcacagattattctctctgacaaaactattactccatcgtttattgtggttatttataggacgagaatcttttatgacttggaaatatgtttttttttttcttttgaattataaaacgtttatatgttgtttgatatgaattaagtgaatgatttacagttcaaatctttgatatgatctaagtaaatgatttatgttcatatttatttgatatgaatttcggtatacttttatttattatgtctaaaacccctaatcggagatctagacgatttaaagcgtaaaactatttaagattgtttaaatctgtttaatactaaaaatgtataattctaaatgcataaaatataacttttatggtttagacgttacctgccgcgtaggtctaaacaatcgttttgactgtttttcagaacactggaaaaggatgtgaaaccacacggttacaattttacaaactaagatacaaatctggatgacacatttaaatcccagagacaagctggtgaaagaaaaaaatttcctcgatccagaaacaaaattacaaatctaaactaaatcagctaaaagaaaatatatgtttacgttaataaaattttgatacatgaaatatagaaaataggaaatatgtatgtgaagtatgttgaccgcaaggaacgaaatggtaacgtgaaataggctttatctttggaaatcacagttctcatgtctcctttgcaaaatgaaattaaggaccacctcttcttttctttgtcaagtctagagaagatgtttgcctatgtttataaaagcttttgatgagttttcattaccattaatatcacattctatcatccaaattttttttatggtccatgcctcctttgatagtacttaaggcaagcccgcaaacatagcatattaacaatatccatctaatcggttgagccaactgaatttggtttgaaaaatctagctttatatcgatagattatgcaactttgtaatatatcaaagaaaacatatattatttagccagaaaaaaactttgtaatatgtcacaactcaacataaaaggaaaaggaaaaaaaaaatttaagttaagtgcaaatgtaccaagagacatgtagccttagcttctctgtggatgttgccaagtccatattatcaagttcagttacataacattaagctgctcccatcatttttttatgttccacaatcatcacatcattgctctccctctgcgtctttaatctgattctcgatttctgccttctcctccattaaggctcctattttttcatcgatcttcgccaacttcgttttcagcttaccgatgtcattaccacccttctttttcttcacatctttgtctttcttttcttccttagcttttgacccttctattttaacgtccttagaatcatctttcttctcttcttcgtcctccgtcattttcggttcctttgtatctttcttcttgttcttctttttatctttcttcttctttttcttcccctcttcactctcacccccttctactttagatttcttcttctcttcagtatcatcttcttccttcttctcagcttctggttcttctaattttatatctcttgacatcacttcagtttcaaggggattctccttcttcttgtcttcctttacatctttttcgcccttttcgctcttcttctcctttttcttattctttttctgcttggtttctccttcatcatcatctttgtcttttgtttctttctcacatacctcatcgatgacggtttccttcttcttcgccttatctttattcttctttttctttccctccttatgatcggcggcttcatcatccatctcttgctctgttgcatcatgttctttcgtcttctttccttcatcttctttttcaggcttctctccctttcctttctttcccttcagcttcttgtcttccttctcagtagattcgtctttctctttcttctctttatcgggcttcttctttttttcctccgcacatgattcatctttctctttcttcttgttctttttactatctttttctttcatctcttgatctgtttcatcatgttctttcttcttctcttcatcttctttctcaaggtcacccttctctcccttttccttctttcccttcacctttttgtcttcattactcttagattcttctttttgtttcttttctttttttggtttcttctttttctcctctgtacctgattcatctttctctttcttcttgttctttttaccatcttcctcttctaactcttccttttcttgtgatacatcctcatgtttcttctctttatctgccttcttatttttttcctctggacccgactcatccttctcttttttattcttcttctttttaccttctttttcttcttctaactcctcgtgtttcttctctttgcccttcttgtgttccttctcatgctcttccactttcacatcgctctctttaacctccagatctccatggccttcttcatgtttcttggagaccatttttccatctttctttttgtcatcatctttatcttcttttacctctgagtccacgtttttgccctttttcttttctttgtccttcttggattttccactactctcttcatctttctttgctttaaccttctcaattgactttgccttcacttccatctccacctcaacattttcccccttctcttttggatccaattcctgcgtctttattttgacatggagtttctcttccttggcattttcttggttcgatgacataattctctgctagaaaatgaaacaaaaaaaaaaacacttttcttataacgaaattcattatgaaaaagagctacactttttctatttaaaagcaagtggactaatagtttctgcctatggtccttttcgtttgccagcaattagcgctagcgaccaacaaccaaaataatcttcgttttatggttatggctcaaccacatatttggataaccaaatcatattcagtgttttataatcattggttcaccattttatttagacaaaacatcgtcaaaccagaatttactacatttgattttttttggtagctaggcgtggaaacctatcacataaatgtcttgttgaaccaaccaatacaataaaaacatgatcggtgatctctggtagctcaacgactattatacaaaacataattacaacgactaaatgaacatgttatacacctatactctacaatcctctctgcaccgagattcaataaactaaatgtaggtcactatatattagcaagcactactactcgttgaaaaaaaaaaaaacaagaatgtcgaattctccaatgttattttttttttttcctaatgataaagaggaaaatcaccaattatagtcaattatagaacaattgtttccttttcttgtaagagagaggctagagcaaacagattaattcaccatatagaagatgagaccaaaaaaaaaaaaaaaagtctacaaagtcaagggcactaaatcataaaaaacccaaaatctcagatctatcaagaaaacgactattccaaaaatggaaattataagaacaaaattctttggacagagatcaaacaagaaaggaacgagaaaaatgaactttaggtaccttagattatccaaatttgtagctgcaaaagttgttcctgtgttcaagaaagaaagacctgtaaaatgatctggatgtgtttggttatatatataagaagacttaaaagataatgacttaatctcgtaacgagtcacacggacgtgacgctgaaactcacacacgttggtgccacgtctttgtctttcctcttttgctctacttttttctcctcataggtgataggtcccataagcaatgaaataaaaaaaatggtaattgacttttctccaaacattttcgaatctgattttctttttcaaggttttataacctctacattccagaatatgactaatgacatcattatccaattattttttatactgtaaactcattattatgaatattctttatttcaaaaaattaccattgatttataagtttattagtataatatataacatatggaataaaacttttatttaaaaaaaaatatttttccccaaaaaaagtaggattaataacctgattaataaataaaaagtgttatatttttaagcattgtatgcatttactttatcatagttgtcttgtttttaagagttaaaaaataatgatgaacaatttcacggacaacgattccacgataaagctttccctgcaacactcagattttctaaagacggttttgcattgcgttttctgggattcgaaacccaaacatgatgtacaagtattaatgaactcttagttaaccattagattaaaaatattttcactattaattttctcttaaaaatattaataattttttgaaatcaaaaattatagttattttattttaataaacgagaaacactacaaaaaaagttaactgcatttagataatttaataaactaaaatatccacataaaaatttcaaatttatcaaaaataaaacatcaatttgttttttgttttaaattaaagatttgctattgattgcataaggaagaaaactttacaaagccgaaaggcctaagagcccaacacacacaaaagaagaaccattttggatcaagggaaccgaccatgggtattagaagtagtggtataaagcccatcatatcccaacacataacccacgaatgtttaatattaaaagtttgttgttcggctcatgattagcgatgatcatacagaaagtttgtatctaatacgtgccttgaattttatgtgtacaacaaacaaattaaattattcaaaaccataaattataaaaaataattacagaaataaaactatattaagagcgagcctaccatccggtgtgcaactttctagtttatatacagtggcggatcaacgttaatgaggcaaattggttcaaattcatctaaataagactagagttcacaggttcgattcctccttataacaatttgctcccaccaattttttttgctgggtccgcccctggttatatatatacttctacaccaggtttgggttcgagtccacacataattaacgacacaattatagtgcacgatagaatgaactaaaacagctagagcgtagagggctcattgtctataaaaatccttcgttaacttgcaagaaaccaagagtagagggctcacacttaagtctcctacatgacgattatatttcgtcaaaaagaagcaattagttagctttacagcatatcatttcgcctaggttttccatcgtacacgtaaattttcatgcaagaaagcagaaatatacaaatactaacttttagatactgaaaaatgagatcagattctagtcaaattttgttaaaagtatttataaatttaaattgcaagtcctcaaaaagtacgactaaaaatgcttttcttagaaaatgataataaaccggcgttttatatataagtgtttctttttctcttctgtccagaagtaaatcattaagaaccaatatggcttttcttaaactaatctccgtgataatcaaatctttgatcattctccacacaatcccatcaacaacatcgatctcactagatgcaccaacaatgattctaatcggcactactaactatagagatagttgtcccaaaaaaaaaaaaaaaaactaactagagagataaatcatattcaatacatgtactatttctactatacttaagaaaatttgtataccactatcttaactcttaacactgaacatactatacactatcttaactcccaactcttgtaaaagaatatctaattttaagaaaagacttcaaatgcttgttaaatttctagtgaagatgcacattctaaaaactggtaaaatggtaagaaaaaaatatataaaaaaatagccttattaaaatttatatctcctatttctctatccaaactacacggatgaagcttattgttattcatccaccctttttctcaattctgtcctatttcttgtgcatgaaacttctccatcttgtaatcggataaatcatacccaaattttttctttctgaaaacatatatacccgaacattaattactatcgtcctttctcctaattttgttaagaaacatgtttgtttgtttttagtactgaaaaaggatggagatacttgctagatcctatgaaccttttctctctaggacaaatcagtaaccaaacaataacttagcaaattaagcacgacagctaatacataaaatgtggatatcaaacatgcacgtcacttccttttttccgtcacgtgtttttataaattttctcacatactcacactctctataagacctccaatcatttgtgaaaccatactatatataccctcttccttgaccaatttacttataccttttacaatttgtttatatattttacgtatctatctttgttccatggagggttcgtccaaagggctgcgaaaaggtgcttggactactgaagaagatagtctcttgagacagtgcattaataagtatggagaaggcaaatggcaccaagttcctgtaagagctggtatgttatttacgaacacacacacactaaccgacacacacacacacaaatatgaatatctataatcactaccaatagtcttcgttctctctattttctattcagaaaattgattaatacccggtattaaaaaaaaaaaaaaaaatttgtttaaatgagtacaaatcattgttacaacttctttatgctgtttttacatgctattaaaggttgtgcatgaaaatttcttttgctgttcgtatttgttttacacctaaacgaagatttttacttaaaattaaagaaaaaaaattatactaattttagttacgttgcgtattgctagcttctcctataaagtcgttcaaatttttacacgcttgtcttcttgtaaatgaattcgtgggaaaattttgtatgaacacgtgtttctgtgttggaacagttctttatttttattggtgtgcatagattcttcctgataaaatatatagaaggagacaaataaaaaacagtcttagtatgtaggtataatcaaagaatcaattattggttttgtagggctaaaccggtgcaggaaaagttgtagattaagatggttgaactatttgaagccaagtatcaagagaggaaaacttagctctgatgaagtcgatcttcttcttcgccttcataggcttctagggaataggtattaattgttacctcgatactacttaactcggagagtcgtcataagttaatactaataacatatgtatattttcttacaattgttaggtggtctttaattgctggaagattacctggtcggaccgcaaatgacgtcaagaattactggaacactcatctgagtaagaaacatgaaccgtgttgtaagataaagatgaaaaagagagacattacgcccattcctacaacaccggcactaaaaaacaatgtttataagcctcgacctcgatccttcacagttaacaacgactgcaaccatctcaatgccccaccaaaagttgacgttaatcctccatgccttggacttaacatcaataatgtttgtgacaatagtatcatatacaacaaagataagaagaaagaccaactagtgaataatttgattgatggagataatatgtggttagagaaattcctagaggaaagccaagaggtagatattttggttcctgaagcgacgacaacagaaaagggggacaccttggcttttgacgttgatcaactttggagtcttttcgatggagagactgtgaaatttgattagtgtttcgaacatttgtttgcgtttgtgtataggtttgctttcaccttttaatttgtgtgttttgataaataagctaatagtttttagcattttaatgaaatatttcaagtttccgtgtttacattttgaagaaaataaaatattaatatattctgaagatttttgtttttttttggttatctacatgacaacagtaaaaatagaaaaaaaatcttattttttgaaaaaggtatgtatccggtgtttagaatactttccgaaatcaaaccgcctatatttctaatcactatgtaaaattgtaaaccaattgggttaaaactcaactaacaaactttctaaataaatgtcatttttgttttcaaatatgattgaactcggatttaggagttttacccttcagtaccaaaccttctctaccgaccatgtatggttgggcaaatgtcatgttttacaatgtttagattactaaacactttggttgagaaggcaatgctttatttatatattctgaagtcatgttttagtgttatttttatttatttttaaatgcatagattgttaacgtgcagattctcatatgggcttagtttctggattttgattatcaaaaccgtattccactcttaaatgattacgacaaaaaaatcaatactactaacaaacctatttcccagttattaattagtcaataacaattgtcaaatttaataacgtacttgctagtaataaagttttaacgacgatcatagataggtttttgaaacccatactcgcagaagttctgatacaaaaatttgtactccctctatttcaaaatattaaatgttttagataaaagcacaatgtttaagaaactaattaatcttgagtttcttacattataaacataaattaatatctattaaaaataatttgaccaatgatataacttacagcataatataaatagttaaaaaaaaactgtttactttaataatttgcataacaactagctagtctggtccaagaacggtagtaggatgagattttagaaggtcgtaatgtgtaagactaataatcatgcgatagacgatcatgcatgaattattttatgtaatacttatatggttccaaaatctataagaaccctcaattataaaagtaatatctattaaatatttaaacgataatttcatacggaaaattaatagataaattcttctatttgtttttaaatatatgtaaatgcgaaagtgtcccatgcaattttatatatttaatcaagtgaaaactcgaaaacaaaaaacttgatgtacttcaaacaagtttttttggcaagtaatacccattctgttccggttggactataaatgcatggaaaagcaccaaaaaaggcatggatactttcgcgatttttgccatttttgtatctttgttcatcgctccgttcaaaagaacctcttgtcgttactataataagttatggaccaacggtattgtcatgtatcaaaataactatgtagcatacgtgtattgtgaatcaatgaagcaatagagagataacatactgaaacgtccacatctcgtttataaaaaaatcgtctacatgcttctctttggctggacatcccaacttttctcaccgtaaccagtgaaattgtattatttggtaagaattacggatggagttagatttattttgttgtgtgtgtataaatcaatacttatacagtttttacgtgtataacggcacgcctcatgggttttgctaataaggtccaagtagtggacagaaaagaacttgtgattgaatagtgttttgtattgaaaggttaaaacgtgtttccaaatggattcaaccaaattccaacatgttcagtgtcgtacatgcgaaaacattatcgagtaaaataagttccattatactttgattttgtattgattccatagagtagaaatgtgtgctttagcttatagttaaacactatcttcaaaggggtaatgctggattcgaagtatttaattagtcctgttcgaccgaatcaaagttcaatcgattttgaaaaacaatcatttcgggtatagcttgaaacatcccaaaccacaagttccaaaagcacacatattatcaccattcaactaaccattcgggtttgataaccggtagttggatgttcaaagatctcatcagatttggtgtcaagaggataattgtgattgagttgtgaacccttgtgatggagatagtttccttgtttggatgttaagttgaattttgggatcatccttgtttcaaaaagactggaaaacacacaaaaaaaaaaaaaaaaaaacttgcaaataaatttaatttttagaaattttatattgtagtgaaaaatgtttgcaaattttagctggagatgtttttccatttggaattttttttcttaattttgccttttattttacattgtatattgctagcttcttcttgacaagaaagaacgatgtcaacctctgatttgtcttcttataaatgaatttgttgaaaattgctgtacgagcaagtgtttttgtgttggaacatgtctctatttctattggtgtgcatagattcttcatgataaaatatataaggagacaaataagaaagcagtcttattaggtaggattgcctaaaatattcgttagattcgcttggatctattattcggttaaattgattcgaaaaatctgaatatccataattttacgaagcaaatcaaatattaaaaattgatattcgttaaaaacagaaaaaataacaaatattaaatttaaataggcggatatcctctctaattcggtatacatgaatatatgtatatgtatatagataagtataaatatatatattaataatcttactctttttatatgtaagttttagaagtttatgttcatcaaattagttatttaactattagtttaaaaaattgaaaagagatattttttccaatgaagttttacttattttggattaaatttctaatttttatgtttttaatttttataattgtttttgagatatacttaacaaatcgaatatctagcaaataactcggattttaacggaatatctggacagccggatattcggttactttcgaaacaaatacgaatcagaaaactaattattccgatatagcaaatcggatcacaaatactaccaaaatccatgatatatgtgtcgtgtccacccctattagtaggtataattaattgtaattagtggttttgtaagactaaatcagcccaggaagagttgtagactaagatgcttatactatttgaagccaagtatcaagagaggaagatttaggctctgatgaagttgatcttcttcttcgccttcccaaccttctaggaaatagtatttgttatactttatactaattaattacttcgggattcataagattattaataacatattattcgtataatgtttaacaacttttagattggctttgattgctggtctattggctggtcagaccacaaacggtgtcaaaaattacttgaacactcaactgagtaagaaacatgaaccatgttgtaagatttagataaaaaaaaaaaaaaagcattacttccaatgctaccatactgggctaaaaatggatgtttttaatctcgaccttaatccttctcatttaacagcagtggcctaccaaaagctctaacatctcagttgctttggactcaaaaacaattatgagcgtatattttgtgactaattagcctttatatatggtttgtacataatatagttgaaaacttttggagtattattaatgtatatatgtatgcttagggttttatgaaaaattttctaatacgttctctataattcttcatttcgtaagcaagcattagagctaaatcatcatctgtaaatcttaagtaaatgtacgattaagtacaatttcgattaaaaggtacaatttcttctgttttctttttgtttgttagaaaagtacgattttctatttttgcgttgaaaagtatgagtagttttctattaaagatgttgagtcttatttgtttcagtaatatatgcgacactgacttttgttagcgcaaaaaaacatgaaagctgttgctgtctttcttataaaaaaaaacaactggagtcatcttctaatcatttatgaagtattttttccaagcaagaaactccattttttaatccaacctctctggaaaatatgttcacgtcgttaaatgaaaaaaagaatgacctctgtcgattatgctaaccacaaacctattagtgtatattgtttcaaatttggccaaaagaaaaaaaaagtgtatatattgttacaattttcttcttctttttttggtgtttcttgaaatcgattaaccccagataacaatatagcatgatggaattagttgactacaaaataaaaaaagcacgagggagtagtctctgcaatgtcatgcagtttatctctgggttacaacttacaaggcttcacactccctagccaagttatagctatatcattacatcaatattgcctagccaagttatagctatatcattacatcaatattcaataatactaacgaaattttgtcagttattagtcaacaattaataataacgaaatattgtttcaatcaacaacaaaaacaactagctagtcttgtccaaaaacgatggtatgtcgagcaacggcgattaaataagcaagtgtcattagctcaattggtaaagatcctagccggagcttagaagttgtcggttcgagtgacgcttgaaacgaaactaatattacatattgtggtttcgggcctgggggattacgggtttcggcctagaatctcctggtattcaaaaaaaaaggatctaataaagtgaaaactaacgattatacaatagataaaacgataacttatgagttattgtatgtggtatatatatatatatatatatgtgtgtttctaaaatctatgaaacttttaattctaaaagaaataataatttatttactgatatagccaatcaatatatctcttttttaagttttttgttttgttttctttgttttcggtaattacttaaatctagaaaataaaataataagttttatgtacttcaagcaaaacttttggcaagtatgatccaatttcttcgggttgaacttattaatgcgtaggacaaaaaacaaagaaaaaaacatggaaattttcgccatatcttaaaagaacgtcttgtcgttactatcataagttatggaccataggtattgtcatgtatcaaaattaactttgtagcatatgtgtatagtgaatcaatgaagcaatagagatctaacattaggaaacgtctatatctctttggcatgacatctcaacttctcaccgtagccgttgaaagtgtattatttatcagaaaaagaaaaacaaaatacattttgtacgtatgtgtgtgtataattcgatacttatacgtgtaacagcacgactcatgagtttctccagtccaagtccaacgagaggacagaaaaggactagccagattctagccaaattccaacatgttcaatgtcgtatatgcgaaaacattaatgactaaattcaattccatacaaaaccgggccttggaggtaatgtgaaacgcacccatgcttggggtcctgtgtgaaatattatttgtttggccaaatcttttttttgtttccaacttttcaatatttatgtttgttttttttagtaagaggaggggagacaatgcctcacccttttattaaaagcaatattaactcttttcttaaaaaaatattaaaaataacatatttatgtatttatgttggttaatgctaaccatttcattaactcttttctgaaaaatattaactaataggtctttaaatattaatgatcttgtgaattttttgatcagaagctttaagatgatctatcaattagcttgtgaaaagaattgtggttattgcttagagaaattaagggactttgagatttaagtattgttaaatgcatgacatcacgagaagagtttgtttatctaaagccaaataacaccttaaaactcaccaaagccactaatattgtatttgacagaggatctcctggactttccgtacgtggtggtaaaagtatacacttcaaatgctgggccctaaaaacaatctaaaagttagatctattttgaggatccgcttagccttcaattcgggtatctggtaataggattcttggtttgggctcaacagcctcaacccatttaactaagagagagttatatgttgatgcacattacaacaaaacatgtcgaatttcgactaattttctgaccagcgaaatggtcataaattgtatcaatcaatttttgaccagttattgcaattcaaaatttggtaacacatgttagttcaaattataaggtaacatgttacacaccaggtcagttaagtttaattatagtcaatatgacaaacctttatcccatgagagggcttacgacattacagtttttcgtgactgcgaattacgtttacgattaattatttgattagtttaagaaaaatattaattcattgtatagaatagtcatggaccctcaatacaaatccaagcgtagagtcgatcacggtattaaatatatttgttgaacattataactacacaattgtatagaaactaatcgtgactttagcttgcatagaaactcttccatgtttcaaagctaaataaacgttgacagtataattaaactacgaaaaacaacaaaaatggttcaacccaaaaattattttgttcttgatccgagagaagccacggttacggatcttatgcgtcttctcttctactcggatctcgagaatagaaagttcgttgatacttcggtagagaatcttgagaatcgtctttgcgaattcaggggacggtggatcatttttgtatccatcgttgttcagaaactcttgattatcctcaggaaacctctctcgttcttgggattcgctcttggcttttggctcaaccttccttcttccaatggtggcttcttcaagatattcctaaatcttgtcaaaggttatattttcttttgactttcttgtttagaacttatagttcggttagacattacttttttttgctaaagggttttcaaagttagacattacattatacatagtgaatatagaattgtatacatactaatttcttcatttcgatagtgatggttactctgaattattcttcaaatcatattatgcgtgactgaggtctgaagtagtaagttgctccaaaagtttttttttttttttttgtcataatctttttaattgattgaatatacagaaacaacatctaggagataatcaaaatgagggtattacttaattatggcaagacacagccattttttaaattcattttggttgtaaatggattacttacgaaaatacaaccatattttctgtgaattatcttcttcttttttttgttgattaatctgtaaattatctttgtatgtatatagcaaattcacaccacttaggtttaaattttgtgtgcatgatctgtcgaataattatcgtatcgtgggtcatgtacctttgtttcacatttatattactttcgtaattttttcaggaaggtttatttggccggaaaaaacatcagcgacatttgcatccataaacggaaacctagaccaaaaagtagagttaggtttaggccggagcataaagataggagatgaaagatacaaaccactgttgtcaattatggcttctaagctggcttacgagaacgaacactttatcagatccgttcttcaagaccattggcaggttttattaactaactctttcatttttattaactatatttttccttgattatttttcacaactctttatacagaaattttccatataaaatacgacaactagtgcagagttattagctgtatctttttagttttttggtcaaacatttagctgttgatcgagttaattaactttgtcttataacttgcaagtatatatgaccatgatcatgcatgttgtctttcattttgaggataataatatcacttatgatcactattatttgtttattttgttgtggcaaagatggacttattgggtttctacagctgtccgaatggtgagattgctttccttttcttatagtataagtataatgtataattaactttgttggaccaaaaatgcagaaatcacgtgaaattaaaacaccgtctgatatgtgggagattttacgttttcttaccaacatgattgattcccatattagtcaaatcaataatgagttaatgacctaagaaattttatatatttatagtatctttcacttgttcgggtttacaaatccattgaaaaaattatttagaagtttattcaacttcgtatattaaatgatttaagtttcaatacaattgtatgattttgggtgaatttaagaaaatgttatgacttgttgtataatttgatatatatttattatccaaatatgacaacgacaattcttaaaagggacaagtgagttaaaaagggatcaatattgtgattctttacttcacttttttttttttcattatttacttctctatatttcgttgatttgttttgtaagaaacatatatttcgttgataaatatatgcattatagttgttttatacttagtatctacgattcttaattcaattttaaaattttgtcttctcctgaagtaataatacttgtttttttatttataatatagttctactttttgtttgggcttttcagattttgatcaaacgaggtcaacagaggtgattgttataagggacacaaaagacaatccgaaccttatcgtcgtcagttttagaggaaccgatcctttcaacgccgatgattggtgtacagaccttgatctctcttggtaatatactgaatacttaggtttaggttggtttaatttttattcggttaggttcgacgttagcttctcctaatcaaactaatgctgatttcaaaaataggtacgagattgttatgaataaaaataggcacaacgttatgaatgtgggaaagatccacggcggattcatgaaagctttaggccttccgaaagaaggatggtatgaagaaataaactctgaccaaacccaaaataaaacaagtcaacttgcatactacacaattttacgtcagttaaaagaggttttcgaacaaaacccaacatccaagtttatcctgtccggacatagcctaggtggagccctagcgatcctgttcacagccgtgttaattatgcatgatgagaaggaaatgttggagagacttgaaggagtttacacatttgggcagccacgcgtaggagacgaggatttcggtatttatatgaaagacaagttaaaggagtttgacgtgaagtacaaaagatatgtttattgcaacgacatggttcctaggttgccttttgacgacaagacactcatgttcaaacattttgggggctgcctctactgtgacagtttctacaaaggaaaggttggtaataaattactcttaatgattttatcgtcttgaattaatcactcttgattagtgtttgaaatttgtttcttaagttttatcgtttcgtatcaaaatattctataaatatttaaagatcaaaatatcattcatatatatatataattttgaatataaatgtatatattgagatatgaaaaacgagaattcttgtcttgtttccgcagagttccatgatgaatttctatttatcccaactgatgataactatttgatataatgttcaggtagaagaagaggagccaaacaaaaactacttcaatatcttttgggttataccgaagataataaacgcggtgtgggagttgataaggagtttcatcatatcttgttggcaaggtagagaatacagagaaggatggttattgacgtgttttagacttgtcgcattgttgattccgggacttcctgctcattttcctaatgagtacgtcaatgttgctcttttgggaaactttcctcctcaggtacctgattctcaaaatttacctgatgatgacctcaatgttgccctcttgagaaactaaaggtggctccatcgtttttacaagatttcgttttataactagtgtgttcacactttatactatctttcttaaacactttcttcgtagttgcttttgttttaatataatgtgttgtttggttttagattattttcattattttccgaaaaataaaacaaaaatatgatcatttttcaataaatgggaaaagtataataaaatgggtagtaattaacgtatttgtttcttctttttttttgggtaaagtgcattatattctcttttgtgttcatcttatcttctcttttgtgttcatcaatagtaccggttttgaagattgaaagatttttacaaaaagctataacatatcaaatctacaaaacattgttcaatagaagtatgagttacgagaactaagataaaaaaaatgaattggataatgtgaagaaaaagaaaacaatgtgatgggatcaaacattaaatatatattacaaaattgcaataaacaagactagctaagtttgatataatggaagaggcgaagagcatacgtttaaaaaaagtaatagaagctgtaatgatagagaagcgaacaagtcagtgcaccaagatgcaaaaagaattgatgaaatactacaatcttaatttactatctcaaaagatttgttatttttggacccaaatttgttaaaattcctaccggtttataataacttataaacacaaattataaattcaattcctaggatttgtgcaaaatattaaattatatttaagtcaaataattatacattttgcagatgaactgatggatggaggtcgtgtagaactcaaattgtggtgccattgtaccatggtatctataattcgtgcaaattctcctcaatgattatatatatggtatatctcttaaagtcttttgagtatttgatttttgggctaaattgagtcctaatgtttacatatgaagagaggattgtttgaaggatttgtgagatttctttggcggttagtttcagatattgttatgtaatcctaatatacttagtttcatatattgctatgttttcctgatatacttaattacatataattcaaattaataataaaaattcgaaattgactgaattttctctattaagttttatttttcaaatttagtctgcaaatgtttcctggtatattcaaatgctcttattcacattttaatttgtgaatttgttgttctttttttcttaaaatttccacctcaatccatttattatggtccagattcactttgatcatatatacaaaataccaaatacataatttaattttgtgctcattttctacatctttctatattttataattaatatgacataaaataataaaaaaataggtaaataatagtaaccttatttatatattttaaattaaagtcttagatagttaatgtttttcataatgactttgacaggtgtcccagtcacctagttataattctgccatttttcgaaagttcatgagacactttttatataaaacattatatactacaaatgtgttgaataaaatattgataaatcctagccaagaaaaaagaagaagaaacaaagaaccaaagaagatggcgagtatgattaagataacaatgataatggctttgatcataatggacgtgagagcaaaaattataactgagtgtcaaaaagcagactgcaagtctctctgtcaaaacataagcgatatagcttgtactaattgtctcttcaaatgcatttctcttccatcttttaactactccaacacaagtaatctctcgtactctattaaaaaaacaaagaatagtttctgaagactccctaaaatcggatttcgtggcagggctaaaatatgttaaacactaattttgaaacatatagttatcatgtaaattgtgcattgtgtaacgttgtaaagagaaagtgccgtacacaaccttttttcttattatatacgatttagatagttgtattcaaaaattatgccaatgatcgttctaatcaatgatgtttaatttacagggccgaaccaattgaaaatgaccccgaagatctgttattatatttgctctggaggttgtggtacagacaaaagatgtgaccatcgctgtaagaaatgttgtggttgggcttagacttgtggaacttttgttagatttttaatcttttgatctagttgtttattgtttttgatgtttttcatgttaggatgtaatttgacaataaaagatttaatataaacatactaaaaaatttaataaggaaaccagtttcttggaaaaatgtgatgtacaggaaaactgctagtatcaaaaactattttcatgtgacatttttcaaccgaagctctaattttttacattttatcaacctacacaagttttaaaaaacaaacctaaactatataatcgtcatttgagaaataatgtaattaaataaacagactaatggactttgagatttgagtatagttaattacatgacataatgccaggtgattgtttatctaaagccaaaactttctacatagatcttgtagactcgctggaccataaatcaatcaggaagttagatatgttttgttttacggggtcaatgaagacgtagctgcacgtaattatttaaacacttccatttctgcagtcaaatttgtttttctttttttttctttgaatactgtaaggctatcgaaataatgtcatgatttaagcgtattaaaaatcggtaagtggctattcgaagattacacttatcctgtaagaattagtggggtaagaaaaatctggaccaccctttgattatcaaaagacaataataataatggtaatacattaaatctttaagcgcatgctctcccatacatatggaaggcccaggccttgtttctaggcatcattaggatttaggatgttatatgtttgtggagttcaagttgatctcagctcaagagtacacttattcgactgtccaagcaaatggacactcactaaaccgaatttgcttgaaaattgtaacatacacttatttgactgtccaatcatgatagacagttatatggtaataaatatatatatatatatatatatatatattttgcgataatatattgtagtgtttatattataattcaccgaattatcaattaagtgtaataccagtgtaatacctaaaaggctaaaagctataatttagacttaaattattgaagagttccaaaactacaaagtttattattgtgcagggagctgacgagttgctaataaagagatattgatcattaacctaaccccccaatttgtacgcaccatataatcaaaatctgttttacaattatcgagcataccaagcacacttgattgatagtgtctcatatccgaataatcacctcggcggtctgccagataagcaccttcgagaagcttttgtacagctctgtacgtcgcaaggcaaagaacaagctggttcttgaccagagggttctctgctatgggaataaatttatctctaatgtaattgcctgcacttgtgatgaggtacactgcgttgaacgctgcgatatcagctatggtcttgatttctgcatgggggttaccgagtttcgagatgatactttgctcacaataatacatgttcttggtgttgacacatatgctatcgattagaatcattgttggggcgtctggtgtgattgagatggatgtggtcgatgggatagtgtgcagaatgatcaaagatgtgatcatcaaagagattcgttgaagaaaacccatattggtgctcgattatattttttgttcatttgagaaaaaaagaaaaggtatactacttatatatatgttataagatattttagtacttgttcaatatcactttctattgaccaacaaaaatagaaaagttgaatatcaatttctataaataaaaaggcatttatgattattgcatttgaatgccttgacaatattttatttgcttttgtagaaggacttgccatataagtttatacatcatttttacaaaatttgactagattgtttcaaaatttggtattattttaattagaatctgatttcacttttcattttcgaaaatatacttatttatatatcttttttgtttcttacggaaatcctacgcgagatgatatataaacttgcttcagaaaaatgatttggttaagaaatatgcattggtcttgagagcaaaatcaaaagatgttcatgaacataacgtggacatggaatcaagtctgtatatccttgcagctatggtgcatatttcgtctcttactatgaggaatccgtattttttactaccatgtgtttgatataaagctaattagtaggcatgctttacaacgacagagacaataacaaaaaatgttccaaatcgtggaaattcaagttcaaagacacgctagagatatagttttccttgaggaacaattatcatatagggaagagtacaaccaaacatgatcttacaagcaaacagcttttggaaggagctattgcaaagctgcgggtatcaacttggtaaattgcagtgtcttagccatcatgtgcaaagactgttttcattcatgttgtgcaaggttgtttgtgttctttgcttgggtagtatgtcttacagatttatggaagagaaagttttgcaagaactggtggtttaagtcaaatacaccacaagctgtatcttcacaacagttgctatttcacagcttgagaacaagctgttttcaaacgggggaatatttttttctttgaaagaatgtaaaattatattcaactgaaaaagactgtttttacaatgaatgcatcatgagtgtacaagaaagaatatagcagaggaagccacacaagtgagagaagcttgaacaaactgatgttggcacgtgtgaataataatgactcgtataaaagaatagtttctcatttgttaggcttttatgcattgtttgatgaatgtctagtgatgtatgtgtccctagagagagagaaagagttatgaatcggtgatgtgccggtggctcaatctcttgtgaaacggcgtaaggagaattgtaactcaaggccttatcagattcataaccatctgactctgcaagtgcctctctatatttttaacttcacaaagatgtgaaaatcgttctacattttacaaccatgtgattctaatttcaaaactttgtcaattaacacgaggtgcctacgaactctccgatctctgtttaaggaacaagagccttaaagctcgtgatcgtgagaaactcagttactcaacaaattgtgacaacttcaaacataagtacaattgtttattttttaagaaatctgtgacaacttcaaacttagagcacaaaattttggaaaactttcaacattagtctccttttttcctaagttatataggacgaaacgattcgaaaaccaaactcaagtcatcaaatattttaggatagttacttttcaagttaatttcacccagtgccggcttaactaggagggcacacagtgcaactaccaggggccataaattaagatggcacaattttttattttatttttgtcggagggaggacaattttatttggattttagtaaaacgggaaaaagtatcctttgtaggaaaaaaaatatttcacaaaaaggggccataaaatttatgcatttctttgattctttctaaacataacgaaattcccttttttaatattgggccaaaaaattgatttacgttaccccaacagttataaaactttaattaatatattaggccaaatttgtgtacattcgaatacaaaagcaagagtttacagttcaccaataaattattaattatcccacaaaacttttcaccttctcacaatgtccctatgatgtgactgaatacggataaagactcaagagacaacaatgaatcatttcgttttggatcttatacaatagtcaattcagttcaagttctctgactctgtttctgtaaacttttcaaattttgactaaatgtaaatatgtgctattttctggatgaattctaaaagcatcctcactaatatctttgaggtttacattgttattttggcattcaaataatcagattcattcctcaaaatcaaggtgctattcttcttttttactttgcatctagattagcatcatgactggacaaaaacatggatgttagaaaagaaaaaaaaagaaaagaaaacaagatgaatagtttgttcaatcactcggagtttttcgataaatttgtgacaagaggaagtccaaatgaaaaaaaaaaaaaaaagatgaatggtttattcaatcactcggagtttttagataaatttgtgacaagagcaagtccaaatgaaaatttattgatttgctcttgtcacaaatttatctaaagagcctcttagtgattgaacaaacaattcatctttttttttttttttctgacatctaggtttttgtctagtcatgatgcaaatctcaaaatatctctcactcacttaatagttttttttagaaatttttatatttttcatattcatttattaatttcatgtctaatctttgtttaatagattttttccttcaaaattgctcagaatatctctcactcacctaatacatgagcttccaatcatccactctattttgttgtgatattttgtagaatgattttatatttttttcaatttcccaacaacaaccctaatattttctcaaaccgtttttaatttctcaaaacttctttgaattgtttaatttttgataacaccgtaactttacctatttttatcgtcattttaataatttttcgataagaggttagtgtgatattcattttcttcaagtatctttctactaatatttagatatttttaaaacagagcaaaacaagtttttgaagacatgacaattttcgtacatataatgtgagatgaaagacttcacaccgatgagaaataaagacgttaatatatcatcactagtttttcaaagactaggcagcatgaggtgagtgtttacaaacattccatcatctctaatagacacaagggtacttacaagattttaatcaaatttctaagtacttgtttgaatatgtcattatattagtttaattttaaaatttcatcaggtttcatttccgaggacatttatcgtactcatctgaagaaaaccagtccaaattatcttcaattttctcagacttgcgctaactacaaatcatgcttaccatttatgccacttcatatctttcatcacgagctcctctaatattggacaacctgataagaaactaacaaacacgtcaacatcaacaactagaatgtcttcaagccacaaggtcttctgacaaggaagatgaataacagcttcatcatctccatttatccaaatcaaacaacggttagttgcttacttcaaaattacaagagtagcttacaaaaacacttttgaactcaattggaaaattccttctataccaattatgctaagcgttggctactatattccattgtccaatggataatctaccaaacgagttacaaatcctccatcgatttcgtcattaagcgtcagcgaaaaactatccaacttatggttgcaacttctcagcctcaacacttgagcacaaatctcactaaatgctcttcctcttgatcatcactaaaagaaacattcagcctttaaagattcacatctcaattgtccattatcctttcataaaaagaagagacacaataaccgatgtcaaggaaataaggatgagtttgatttttttgctttccatttaattttctgaagtgcaaatgttaaaacggatcacttggcacgagatatttatacacaaccgcactatattgtctatataatcaatatttttcaacattgactcatttgagttaatttaataatgtcgaaaaaaaactatataaagaaaatatttagaatatccaaaataaaacaatattgttctagtggagattggttaagattttacggtttcgaacaaatacatattaaaatttatactaataattatattacctaataaaattacataatttgcaaaaaatatttagccaatgaagaaaaaaaaagaaagttaaatacacgtccgacaaaggaaaaagaaagtatatacacgtaataatatctcttaaatactaaaagaacaagaaaaagtagctcctcctcctgtcctcgccgcgtcgaaatgtcgacggctttcaattcccgatcaaatttacaagggaatccgtggtagctctttcaattctcctggctccgccgctcctctggtaatttctccgaggttagctcgtctgctacaatgaaatcggcaatcgtctggggaatcagcagctcctgcgacggccacatcttcgccgtacatccgtggataaggaagaagagattcgaacctggataatctatgaagcgaacaaagacagacagaacttggagcgtcaaatctgtgagtggaattacaggataggaccaactaagtcataacatgtatatagtctgttgttacacaattcacagttttgattttgggtttagttaaatgtctggcttggctaatcatgtggttggttctcaaagactgacaaggaacttcgattgtatatacactggtttaagatgctaggcagtttttcatcaactgttagatttcgatttctctatgtagcactaatatacattttggtagtcttagctgtctgtctttgatcatttcacctgactattatgatgatttaccttgaatatttgtgaccttgttgtaagtcctatccagcaaggatctcatttgatgtttcgaaactccaggcgaccctcgagctatgctcttccacaggtagatagatttcattcggttgcgttcatgacattgacgaccttgtatccgtctcttatcaaatttgactgtcctttgttcataatgatggtctcttttttaatgcttccaggataatacaaaatgtatttgaccttggcttggaagttctgcagaacatttaattgtttttgtagctctctctgtctctgtcttttcttgatgagaccaccggaccagacaccctgctgttaatacatttacctggaagagagtggaatcggaatcatagaatcgcttcagttctcaacgccttgagttactactcttcttgctcataaatcagaagggtttcaatgtacaaggtcgattgatgtttgctcgctccacaaactcagaagcctctattgatgaaattgcagacgattttggaagactcaaatgatgatgattggtggtgaggctacctcgctagtgtatcaattgttttctcaaaagctttaaaacgttgaaaataagcataattccacaggtttatatttgtatttgcacttctctgagaatagtggaggtttcagttgttaatgagtgtatttgctgcctttaatcacaagttttttcttaacttttctaagtaagcattcacagagtttgtaatatatctctttaattacattaccttaagaacaagatgcattttcagagccataaagttgaatcattatatgcacacaaaagactttcaactttggtcacaattactctactacacgcctttgcttaagcttggagtacagatatctgaacatttggggaagcttttccttcaagtctccgaagttcagtggcaatgtcgtaaagagcggtaacgctatcttctgtttgcccatatattttcacttgttggagatgtagcattctcatcaaaaaccaccgtacttgctcaccaaatcgggctgcatcctcagtaacttctcctctctttttcccaacaactccttcgtatatctctaggtgagtaacaggagattttactaggtaagagattgcctgctccatgttcctcctgcagggacacacatcaccacacacatctgtggctaagtggaaaagcccctgaaacataaagacatacagtaacgcatatgttttgcttttaaccataaaatcgattcactaagcagcttggtttcttacctccaagacgagggtttccaaatgtggacatttactaagcagctctggaatcgcatcccagcctagttctttgtcactctgaatagtcaggtgagtcaagtatacgaattcaggaattggaggatcgaagtagtggtgaaggacctgaaacacaacacaagcaaatcaattagtgttgtcttgtcttccaaatctcaaacgtgttatcagacaagaaattctcctacctgaattgtgttcgcatacaaatagagtttccgaacacttgttattcctgtgataaaggctgtggcattatcaccaacaatcacttcttgtccctcatcttcttcctctttttcatctatcatttcaagtctgatcttggcttcaataagggaagaaaatttcagtagtggatattgcccagcaatatgatcagtgtactcaagatacaagacattcggagtgtcaaacaatacactttgagggcatctatcatactcatccatttcaacataatcagtccaaacaattttcaatcttctgagacttgcgctaaccacaaaacaggcttcccaattatgccacttcatatctatcatcacgagctcctctagtattggacatcttgataagagtctaacgaacactttaacatcagcaactaaaacgtcgtcaagccacaaggtcttcaaacaaggaagatgagcagcagctacatcatctccatttatccaaatcaaactacggttggttgctaacttcaaagttacaagagtggcttgcgaaaacactcttgaactcagctggaaatttccttttatatcatatatgctaagctttagcttctctactccattgtccaatggataatcaactaaatgagtaacaaatcctccatcgatctcgtcattcagtgtcagcgagaaactatccaacttacggttacctctctgcctcaacacttgatcaacaaatctcacaaaatgctcttcctcttgatcatcactaaaagaaaacttaagacttgaaagattcttcatctcacttctccaccatcctttcataaagagaagagaaacagtaaccgcggtcttggttggtaaccaagacaatatgtgaggtgcaagacacttgggcaaatcacaaagctccgttttcttcttcttattattcgatgtcatctcaacaaacctgaaattaaacaaacacaaaattaaaatctgtataagagaaaatagaaatctgagaactaaaagcaaaacccataaatcatacaaaaaagtaaaaggacgttgaggaaaaatcgagctacttttcatcaggaacaagtagaaaccaaaaagaaatatgagaactaaagcaaaacccataaatcacacatagagaaatcaagcagaatccattaatcatactaaaaatataaggacgttaagggacaattcgagctactaagatacttctcattaggaacacaactcatggaactaattttcaatttgcttccattttcaaatgactttttctatagattaagaaattaaaagcatgaaatcctccaaaacaacaaagaaacagaacgcacctgtgtgaatcgtggttgagcagatttaaaccctaagcctccttgtgtttattaaatcgaaaaagagatggagaaatgagaggactgagacttttttttttctttttttttgggacaaaacattttcggagaaaatatcactaaaatcctcaagttaatgaaaacgttgatttaaatcctcaattctccacaaaacaaagtaaatatcaaatttatattaaccttccaaataaatatccaaattttgttgacctgatttaggcatactattaagtagattatatatcctattaacggagttaattttttttaacagagaacctttaattcaaaacgttattgtttctaaaaacagagcgatatcgtttggtaatagtgtattaactaaatccccaaattcaatctaaaattcttaaatcaaacaaaaattttaaccctaaattttcatatgatttgaagcttgggatttagttgaaccgttataacaaaaccacaatgttttattgttacatttttaatttatttattgtatcatatgggctaatttgttcttttagaatccataattgatctaattggtgcataaataaaaaggattaaagggagataatcagttaacaaatttgtaaaattccttaaagtaggttatataaatagagagcaaaacaatatactttcaattgtaatcttgtagctaggggtgtcaaaatgggtcaaaattcatgggtcaactcaactcaactcaacccatgaaccctaaaccctaatgagttgaaaattttgagtcaaatgagttgatgggtcaaatgagttgatgagtcaattggtttgatgagtaaaatgagttgggttgtaatggttaatggtttcaatggtttacacaattaacccatcgagttttgtaaaattgaattaaaccaactaaaatctctaaaccaatgccaatttaagtttaaccaacacatctaaaccaatttaataaaataaatatttttccaaatttcttaaatatacaagcgatgaaattgagaaaaagtaaactcgtaattttctcgccaaaaacgcaaacccgtaattttcccgccaaaaacataaacccaagattttcccgccaaaaacgtaaactcgtaattttcccgccaaaaatcgtaaacccgtgattttcccgccaaaaacgtaaactcgtaatttttccgccaaaaacgtaaagccgtaattttcccgccaaaaacgtaaatccgtgatttttcctccaaaaacgtaaacctgtgattttaccgccaaaaacgtaaacccgtgattttcccgccaaaaacgtaaatccgagatttttccaccaaaaatgtaaacccgagattttccctccaaaaacgtaaacccgtaatttttctgccaaaaacgtaaacccgtaatttttccgccaaaaatgtaaacctataattttcccgccgaaaacgtaaacccgtgattttgccgccaaaaacgtaaacccgtaaaatgtagaatccgtaaatatcctaagtttgatgataatgaattaataataattattatttattattgttttataataataattaattaaattattactaaaataggttaacccatttaacaactcaacctataataattaaatgatttatgggttgacccaactcattttgttaaatgggttgggtcaacccataactcatttaaccctaaactcatttgattatgagttgagttgagttggattacccattttggcacccctacttgtagctatactaataaatcatatgaaataaaatgaaaagttcaaaaataataattaattgttaataatacttttgtgtactattttaaattttaatataaagatgttacaatttttttttttttgataatggagttttttcttaagataatagttaacagaaataattaaagagatattattgaagagtgaaagttatcattccgatcagtactaattaaagaactaggaatttcaaaaaaaatgattattccaaaatatacttcactatatagatatatatatatatatatatagatgttacacaaataaataaataatgtacttcaacttgcaggacctttttatcttttgttatactgttatatgattatttactaataaaaaaactgacaattctttatttttttcgtttttttttttctttaacggctatttttttcatttacatggttacgttctaatattaccctcgtttcaatccgtgtttggaaagcgttttaacaaggttatttttttttacaaaatttatggtggctagaatagaaagacataaaaagaacgaatactctgtgctttataaaaaccatgtcttcgaaagttggagaagatacttatgaagaatataaatataactgaactatatacgtttgtattctcatggataacaacttaaacaagtatactttacaatattgtcgggagcattgttcctaatcaacaagctagtatatgataagtaaaaacggatgtggaaatttaaaaaatcctccaaaacccataaaaattaaaatagtaacacaatctcatatagtatatgtataactatatggtcctataaacaagtttcaaactaaagcaataagcaatattatagtcatgaagaggcgtatgcagcaacgagctcgatgattatattgtggctaagctgcagatggagctttgacatactgaagcgcaccggcttcagacaaagcttcgataaactgctgaagtgtctgttgcttcttgtggctgtccccaatgacaacattcttgtaatcaagagactcgtcattgtaaatgtcccaccatttcttgaccagcatcttaatgtcttctctgtccatgttctcttcttctccagtgaatctgatataatacaacaaacaacttttagaaaattcaaatccacaacttttctataaacaaattaatattaaaatagctcatgagaggtatgtttgtgattttaactattttcgttagataaaactttgttagaacatatttctaatgtgaaatttttagatatcccaataaaatttgcaacatttagttctacgacttagtggtactttcaacttattgttagttatatgcaaagatattattttctgatacatcaaattgaatatattaaaattttggcctacagaaataaataaacttgattggacgtcaatatataaacttgattgaaaattatttgaactagtaataatcttacctccaaggtttagcaccagcagcacagtagtgaacaactttgacttggtcaagctctatattctctggatgcctccaaagcattgccaagaccaagttatacactggtggtattggcttgtatatgtccttgaagtacatattcaaaaaatcctataacatattcaaatgattataatttttaagttgtaatatccataattaataactttttgtgggtttctataacttaataattttatctatttacctgttcagcaaaaagagtgggaggcacaattttgaccgtctccaagaggttatgataagtggagaggttaggctcgtaaacgaacataccggcgttgaagtacaaaggcggcttaggaccaagcttggcctctggccatgtcaccttgtccggacactgttggcaataaccgatcttgtactgtggcgagtgactccatgtcttctcgcaaaaacagtccataactgcatagaattggccgtttggaagatcaaacaagtgatctatgttgtcgaacacttgtatgtcaccgtccaagtatatcatcttgttgtactccacgaactgcatccatatataattttattatatataagaaattaaagatataaaaataatcactataaggtctttttttatataaatatcaacttcttttggaacaaacaatgaagtacataataatattttggtcatatatagaatttactttgctagattttatattcttataaataaaaaacttaacaaacaatacatatttatatttgtacctcccagatacgaagcttagagtagttaatgacatagtaagccatagcaaactcggtttgattctccggtggataaaccggctctatctccttaacaacacagccttgatccaccaactgtttccggtgatcctccggtacatccggcaaaaccgccaccacgagtgggtacttgctcttagctttccttagccccttagcaagacccaccacccctttcacgtagtctccagttccagcaaggaaagtcacgtacgccctcttttctccgccggttgctgagtggaccggtacggtgagtttggtattgatctcaggtgccatcttctttgtcttttagaaaatacttctgtgtttgtgtttgtgtttgtttttgtttcgtttagtttgtgtgtagtgtgctgagtatgtgggtgatgcttaatggtgctttatataagattttgtcttaattaattaaaagattaatcgctaattactttggataattaaatacgaccgactactaaacgtttccagagaaagattttgatccaacggctattcaacaatatggtggaatctaacggtttaggatacgcgcgcgaagcttcgttttgaattaactatttacagtgggtcccagtataatccaggtgctgccacggcgttacataacgacacgtgtcagtatctagactgttcgactcatcaaggtttttaaatcgagctcgtggtggttgatcggtcatttttatgtgtttatcaatgggttccacttcagatatacgacgtcgtatggggtatttaatacactatattagtgtgggattttctgattggttattatgtggacacgtgtctacgtggaacgtagtaggcggtgatgatacacgtggacaaggaaaagtcttgttgggcccatttcccgtttggtctattttccatgtttaaatttctttcctatggtagtttgtctgaccgatgaccgaccgactatttacggcatatgtggacgttaaaatcatatatattttttaattgcatgactcaaaaactcataaggttatgtttcgttatttttatttttattttattttagtttgtttctgtcaagtaggtattacttatctgcattcaacaaaaaaaaaaatttgtgttaggttccataaaaaaaaaaaaatgtgtgtagttcctctcaatttgtattttttatagctattaaattaacttttaatctaacattttatcaattatacttttaaatttttcggaaaccaatcaagtctatgaaattactcacatctcgagttttatttttttttcttctagttttcttctttttttggtaattgataggtttcttaaagccaaataaatggattttttattaaataaatgaaaaagtccccattctacatttttataaaatttgccccgatgtaccatgcatccgcaagtggcgttcactacctttaattccccaagtaatttagaaaaaaaaaaaaaaaaaaaacggaaaagtgtcgttgtgatgtaaatttctcaatgggccgaccttgtttactatacggatgacaaaatcagaaaaataggataatgttagtttattatggctttatggagtagaagttagtgtaaggtcacttcaattccttcggttagtttttgtacaaactagtctatccacgactctgagtctttgactaattcttgagtgtagaatattctatggaatcttttttttccaactcgttgtgggatctaaaaaacgaaataggcgagtaatgtcaaatgtgtatgactcttgtaatatgttttttttgtaataataatcataatattctattgaaataaaataataacaaaaataataataactgctatataaaagtttaaagctttttcaataaataaataaataaaagtttaaagcataattgtgttttactcaaaacattcaattaaatttagtagaaggttttttatatatagtagtaaatttttatttttagtattttttcttgttattttatatgatattattatcaaggcatgtatattcaaaaaaaaaaattgtttcattaagacaacatattagatcaacttaactaactaaattgtaaagccacatatggatttggtcacgacatcgaataactatgtgcgtggttctagctagctaggatcaatctatttttcaggccattaaggtagtttataatttgtttcttttccaaaattccctttatcttttgaataattgttagcttattgatccttgaatttgctgtatttgtaaattttcaatgttttatcatcccatttttttagtcttggtttggttaactttttggtcgttttcagattgtttttatctcttgattcaagtatgtgttaatgttttaacttagatgacctaactgctcgcgaaatcccaattaaacactaatgggccgtaacgtgacgctgacactcaagatgacgttgatattaggcccatttgagtgaaaagaccttatcggcgataagctatactcatcgtgacgctgacatgcaacgtacgtaatactaggctcattcacgtgaagagtgacccgcattacatcgactagcgaaaactaagtcttgtttttgtttttgttatcagccaaaaaaaaaaagtcttgtttttgttataaagtttctcgttgcttattaataggaaaatattccccttctatgatttttcttctagatatttactttcttgtgtgacaagttgtgtctacggatgacctgtcctgaatctttgtttctgttttcttattcaatcaatgaaatccaaaaaataaaaagagagtcaaaaactacaaactaaaaaattattgtgttgttcctttatgttttgattgggacctatcaaacacctatatcaattcatcaccagtacaagtgatctcagatcgaccataccggtataatttataaaacagtcgtgaggtacgcaaatcggagacgtaataacacgatgaaaattcaatcctatagcaagccaaagttacaaaaactaaaactaacgttaaaaactatagaaggcccatgatattcattgggcctcgccagaaataaagcccaagagccaagataaaatcatcatttctgtctgggtcagagtattcgaagcctctgactgggtcagagtattgtacttccaagccaaatcccaaaatcgacgaagaagagaagaaagctgagcaattgcagattcacgcatcgaggttagagatgcttcaatgtatctttctcatctccgattctgggttagtgaatcttcaaaccatttctgtcctcagactcagatctaatcagtctgaaatgttggactcaattcatcttctgttgtttggttttgtgtttacagagaggtaatgctagagaagcagcttactggtcatcgcgttgatagatccatatgtgcttggttctgggatcaatatatttctcaaggcgattcctttaaggtactattatagctaaagttgtctttttttgttttttgtcaatttgcaatcttttgtcatttcatctacaaatttgattcaaagttcgagactttatcttatctattgggtcatctttagctcttgattttaactgtgttagtgtgtgtcttatgcttctttgttgtgttttggataggcacttccagtgattgcttcaccaacacattatctatttcaaattgttcgtgacggaattacgttcttagcttgtagtcaagttgaaatgccaccgttgatggcaatcgaggtgaatattttgcttcttctttgtagattctaatgttgtgaagtttttgtaactttgtgaagttttagttcctttgcagagttgctgatgttttgtctgagtaccttggtgggctaaatgaagatctcattaaggataatttcatcattgtctatgaggtatttttgttaaacaatatgcattttatgaatgagcttttttcttaaccgaaactatggtggacattatggtttctcttgtgtgttgtggctcatttgttagttcggtttaccaatttgttcaaagtttgtgatactaataaaggcattttgggataaggtcacagcgtgtcttcgtgtgtttaatcaacttgtagttgttgattctttctatttgatctggagaatacatagtaatggttacaaattctagcttgttttgttcttgttttgctatgttaatatcgtactgtcctcttattcctctagtttcactgtttttggattgctttttcacaaagtagacaattgtaacattttcatccttatgattgattgggaaacaaagttttgctatggaaaatacataattttgttgaggtttactgtgttggtttgagagatttgattattttaccttttatgttggtttgcagtaactgagacttgacaatgtgtgattaatagcttctttgtgtattttatcttttgctatggcctcaccctttcttggattgccttaactgaatagttacacaaatttgtgacttgtagcttttggatgagatgatcgataatggtttccctctcacaacagaacctagtatcctgaaggaaatgatagctccaccgaatctagtcagcaaaatgttgagtgttgtaacgggaaatgcttcgaatgttagtgacacgcttccgagtggggcgggctcttgtgttccttggcgaccgacagatccaaagtactctagcaacgaagtttatgtcgaccttgttgaagagatggatgcaattgtaaacaggtttgtgcttgaagaaaattcacaaaatcttcagttaatctttacgactcatctcactcaaatcatacttttgaatacactgactgattcagggatggagaattggtaaaatgcgagatttatggcgaagtccaaatgaattctcagctcactggttttccagatttgacattgtcgtttgcgaatccatcaatcctagaagacatgaggtttcacccgtgtgtccgctacagaccatgggaatctcatcaagttctctcctttgtccctccagatggagagttcaagcttatgagttacaggtgtgtgttttcacaaccaaacgttattcttacactttcttgaagatttattctaatatctaagtatctctgattcaatatagggtgaagaagctaaagaacacacctgtatatgtaaaacctcaaataacatcagattcgggtacatgtcgaattagcgtgctagtgggaatccgaagcgatccagggaaaacaattgagtcgataaccttgagtttccagcttcctcactgtgtatcatctgcagatctctcatcaaatcatggaactgtaacaatcctctctaacaaggtaatatgctgtctggcttttgctttgaattcagtttccagatttagaaacttacgttttttgattgtggactatgttttgcagacatgtacatggacaatcgggcgaatcccaaaggacaaaactccgtgtttgtcgggaacactagcgctggaaccagggttagaacggcttcacgtgtttccgacattcaaactcgggtttaagataatgggcattgctctttctggcctaagaatcgagaaacttgatcttcaaactatccctcctcgtttgtacaaagggtttcgtgctcagacacgcgctggtgagttcgatgtcaggttgtagctttctaatacggtcatgccatgccggtcaaaagtcttgactttgggctcctgtgaattgtttgtgccaaatggttttatacatccaatggtttttgtgatctaagttatgatattataagggctctcatcgctaacaatccaaacttgatgtaactatgaattctcattccatttttttttatcgaatatttcgattctccgtggcaatgaaagattctgccgatgtttatgcgacgaacttctaaccttatttctagagccgttacctttttttatgatggcttcttgaaacctttttgaagcttgatttgttgtactcttgaggttttaatttacgcatctaatttccatagcttggaacatactacaaagattttgatggacggtctaaatatgtgagttttgccttctatcgatttttttttggtttggcaagtcacctttgtattttcatgtagcttgaagcataattagaaagttgctataataaaaatcaatattagcgtgaattttggccgttttccgttttttcttgtcttctacattatcattatagattatttgatctaatcctaatagaaaatcaatcagatttaatgtacatattgatcatgatagcacatataaaaatcgtccataggaaatccgagtgttgcaaagagagctgcaacttatttattgcactgttcatattgcaataatctaaaaactaaaatagttgaagtaaggagtagtataataacacaaaaataaaatagcatttaacatttgtctcatattcaagtatggtactgttgaatgggcactttatactatcaaaattcaactataattcttgttgtcaaaataaatatgctcatttttcggtatacactgtacatacaacacacctatagagaattgtgatataaatttatagttcggctatatattattaattttgctctccggaataccaattctgatcagactcttcgagtttagtaactgcataccaaacattagattaaacttatgtataaaaataaatattttttcataactaatatatatatatatatatatatatatgtatatatcattcaatggtttgtcataatgttgttgatgtgtcataacttggatccaacatgcataacacatgttgacaaggaaaaaagataaacataaataactttttcttgattcacaaaaaacgttatgtatggttaatatcagtctcgtgcaatcttcatcatagagattaatgaccctaaatctgataatgatgtaatgctttttcaccgttaaatgtttatttttccaactacatttttaaattgatagtccttctattatgattttttaagattgaaagcttgccaaatatagaatcaaaataacattatctatgtaaaaaaaaagaaaaaaaaaagttactttcttcaacatttgtttgttcattaggatagaaatgtgggaattatctctaattccacattcactagatagccaaattcaattttcttattagtaaaaaaggttaatatatcagtagattaatttcaacttatacttctttacgcccaatcaattgttataccacaacatatagttaaaaaattaatgttattttatttgatattaatttttttttatttaaatcacacgaaacactagttaattatggttttgccaccaagttattcgttttgcaaataagcccaaaacatttatctatacaactaacccaaaaaaaaaattcttaaatttatctgtcattctattctatgaattatttagtagtttaaggtatgtttgaataatatttctttaaaatataaaagcatgaaccttacgttagttcatgttggtttctttttcaatacttgaataaatagaaatagactggacgagcaggtatatatggtatggtgaaattttatttcatctatatattaaagcatgaacctcacatgaattcatgtaagatttttaaaattttcaatcatgtatagaaatatatctgaagagtttatggcagtagcatctgcatttcaggacaaagtatttatagtaaaaaataataaactacaacatatatctactacttttttctttcacttggtcaacacacacacacacacacacatatatatatatatatatatatatatatatatatatactactataacaatcaatattttttgttgaataacttgtattttatttgttaacattttatttttatttattttgtcaaaattttccattacttttgaatgcatgttcctatacaactttgtttctatgtagtctaaaatgtatttaacaaaaaaaaaaaatctcaatgtccctatgtgtttcacttatcagctcggtttatatttagaaaggttaacctaattacctgaatataatttaattatattgcaatctcgtgatgtagacgaatatatattgcatacgaaaccatgattcatgtacttttgtttgtttttaatttttcctcacatttgcaagttgttacctcacaatgcgattaaataaggtcaccgtcctacctacaaatgaaaaatgcgatttacacatgtcgatacattattggttatattatgtaacgtttgtctcctcacccaagtcactttaatttaggccataaatctgcccaactgtaaccattaaagacctttacactatctacatgcatcacatttttgttacgaaatttttcttttccatttcaatacaataccccaaatattaaattcatcacctaataaattaatctacctatttttaaaaagctaacaaaacattgacataaatgggtggccatttgaagtaattttttttttcacccttgaaaaatattattttctatttcaatttaattcatcaattttttcacttaacaaattatgttaatccattttttcagaaaatttgctagttagggcaataaataaaattggatgatatcttgatataaatgttttgccatttgtagtaatttcattgtgatgtttctgtttttgcagactgaattttaaaactaaaagactcacacttaaggcaatgatcaactactttttgttgctcaaattgtgcaactttttttaacatcccaaggtccttaaatctttgactttataaccataaaccgttgtaggagctttcatattcttaccctaacacatgtcattaaatttcatacaatggcaaattccgtaattaaatagagaatacaagggtgatttcataccacaccacctataaattaaaaggcaaagatctccacaataaacctaagagacagagagatcttaacacaaaacaaagcaaacaccaaaaaaaacagagatgggtttggttacagatgaagtgagagctagggcagagaaatacacaggagatgagatatgccgtgagaagacaaaggagtttctcaaggaagtttctatgcctaatggtttattgccattgaaggacattgaagaagttggttacgacagagagacaggtattgtctggctgaagcagaagaagagcatcacccacaagtttgaagccattggtaaacttgtctcttacgccaccgaggtcattgcacaggtggaggtcggaaagatcaagaagcttaccggtgttaaggccaaggagcttcttatttgggtcactctcaatgagcttgtcttggagcagccgacaagttcagggaagatcaatttcaggacaccaactggtctgtccaggactttcccagtgtctgctttcgttgttcctgaagttgagaagcctgcaacggagaagaacaatggaaccactgaggtcaaagaagctgttgcagtcacagatgcttagtctctctaatcttattaatcttatccttccaatcatgaattactttctgctatttgctgcttaatttccttttatcaataagatgatacaatttcagatttggaatttatagatatctataaaaatcaatatccttttaatacagcagattccgtattatctaaaaacctatgaaaaaaacaaagttaaggttcttattgtctagactctagatctgaacagcttctgatgttaacatttcaacagaaagcaatatctcagcggttacttcatagccaacgatttcaaaaagtttcttggaagctatcacaagtcacaatctaaacacaagaaagaagagttctactataaatagaccaacaacatttgatccaatgaggcaggttaagattgtcctgatactaaacttatccattacctgatctaaatcgaggtatggtgatgtatgttctttatttagtaggacagtctacaatactatatgtataaatagagccatacctaaaagagatttgtccagatattgtctgtcagattctgtgctcttcaaaatcctctgctgtcattcatctttactcacttgatctttgttagttgtttcttgcgtcatcaatctaaccgataacttaaccacaaacggtagcagagtgcaaatataacttaatctatgtggttcatgttcaagttccgacttcttgatcattaactaaggagtctaattcaggaacatatccagcttctctagtctcttctatcagtaaccccaagactgaatacacggaactcgcattaggacacattttatcgctaacggcaaagctaaaaacttgattttccaccaggatccagctcataccggcttcttttttgttccccatcatcctcatcatcttcctcactctcgcgaaatcgacccacttcccttctgctgcatagatgtatgaaagcatcacataagtccccaccatttttggtttcaactccataacttttcttgcagctaatctacttatcaatccattgtgcttatgcgctttacaagccccaagaatcgctccccacgtggattcgtctggcttaaacggcattctctcaactaattcataagcctcacctattttcccagctcttccaagcaaatccaccacacagttgtagatatctcgatctggatttataccatactcactttccatcacattaaagtacttcaatcctttctccactaaaccagcatggcgacacgcacttaaaaccgccatgaacacaatccggtcaggtctaatacccgaactaaccattttatcaaaaagctcaacagcttctgctccataaccatgtgatccatacccaatcatcattgaagtccaagacaccaaattcctcctatctacaatttcaccaaatactctttgagagtccggtatatttccgcatttagcatacatatcgatcaaagcattagctaactcaacgttcttgttaaaccctcttctaaaaatccttccatgaagttgctgaccacagttcaatgccgctatattggcacaagcagcaactaaactcgtgaaagtgtaacaatttggcacaaagccttgcgattcaaaccgctgaaacataagcagagcttcactactatctgatcgctcaagctcggatattaaagtgttccatgtgattaaatctttatcttccatctcatggaaatagtgtttcgcttctgataaataaccacacctgcaatacaagtccaatatagagttcatcaccgggaggttagactgaaacccacgtttaatcacagacgcatgaatttgcttgccggttgtaactgaatcaatcgaagcggaagctctaaccgctattgttatacagtaaggcgtcacttcagcattctcctgaacacataaaacagatccaaaatgtaagaacttcaatacaaaaacgtcaccaaaaacacgaggaatatagctaaattaccagcaacatttgcttgtacatctttaaaccgccaatgccatcacccaaatgcgtaaacccggtgattagagtagtccaagtaacatcatttttcaccttaatatcccgaaaaatcaaacaagcagcctccattgttacagaacaagtggcgtacatattcatcatcgcattgtcaacataaagagaaccttccatgccaagtttaaccacaactccatgaaccaaagcaccataagccaaaaccttcatgtttctacaagacttgagaacactcgagagcgtgaactcattcgggcttgttccttgcttaaccatctcgtgaaaacactcccaagcacgagcattgtagttggaagaagcgtaaccagtgatcattgcggtccaagctactacgtctctatcaggcatttcgtcgaacagtgagcgtgcttcttcgactaaacctttttcgaaatatgaaacgattagatttgttgctaaaatgtgatgcttcttgggtttatatggaggatactctgtgttttgacttgattcgacgccggcgttgcgtagagagcttctgacaaagtttgggattggtttaaacgcattggagcgtgcaagtttggttatgctcatgttcttgcgtttagaccaaaacgatgtctgatcaaaattggttggagacttctgcgttctttagtaatatcaccattgtcggaacgagaaagctcggaagtcgtgattcttccgaggtagacacggcggatttgggagtgttcggataattcagttatgaaataaagatttttggaacttaaaccgaaacatatcggttcaatctatgatttgctgttcgattcggttcgggttcaaaattgtaaaggaatgttattttggttatttctatgatttgcggttcaattttacttaaatttcattcaatttcgattaaatctttgttaattttggtttaattttactgaattcgggtttagtactaaaatctaaagtggcagactcgaaaagttaaagcattatgagatcaagatcgacgccaagtcgcagattagtaagtaacaaatcgagttccggcacaatttcagataataaccaaaccaaaccgaataacaaaactgcaaaagtgaacctttcagattactttgtataccggagaccgaaccaaattttttggtaggttcaatttaatcaggcctgtgcgtgtagaagcataaattactcagggaaatgcttggtagagataaaatgacaatttggtaaaatctagcataagaaaaactttctttgccaactacgtagctgcaactatataaaactgttgcaatcatatatatatacacacaaacagagataaataataataatatgtgacagtcaagtttctgtaatgattttccaatttctgtaagatctatagcctaaaaagcttattgtgttcgaatgttcagagtagcaaaagagactgttttgcattcatcgaacaagaatctgagtcttggcagcgactcgggagcatttcttccggtcagattttctaagaccacatgcacaaatatcgagaagttcgtaatcttcttcccagaataacagtgatgccatctctggatttgctaggaggagtttagaagtcaagaatccagcgactgtccatgtctggtagaggcgagactgctttccaatgaatttgccagatcgggtgtcgtagtactctggccaacgatctgccaacagtctcttctcagccactgcaagagccttttcagctagctctggtcttcccatcttcatacatgctaatgtgaactgtttcgaaaatcacacacaaaagtctattataaaccagaaatcctcagatgttaaggatgatatgcataaccgaggattgttaatactttttctctaatccaaattactgacatatatctgcatacctgccaaagaagtgttggccaggatccactgttgtgatacgaccaaggcctgcaaagtttaacaagtgttttcagggttgattcaccgaaaaagttcaaggcaaatacatatattgtcacaagcccagggagttcacaaaggagaaagtaaagagtaagcgaaactcacgtgttctttgggtcgcttccagttattatacgccaatcatcgtactctaatgcagggtaacagatcttaagaggcatattcccaataatatcgtcccatttagcttcaattaagttcaatatagcttcattctgctttggtgtagccaaggacgaaacaatagaccaaaagttcccaagcgtgaagaatctgaaatccatgtgtgcaggttgtaggttcccaaggagatacccaccttgctcgggtatccagtccatgagccatggaggaatttgctcaggatagatgttgaacttgttagtcgcatccgtggaatactcttctgtcttgtaacggtatatctcattgatcttttttatgtccacccagtagtattctctgatatgaaaggacaaagcacttaatctattgttaatggctcttacaagatccttagagctatcattaacagaaagcatctcacgggagcatcttagtgctgagtagaataacgactgcaatgaatccaaagaggaaatcatgaatcagtctcataaaaagatatatatcaacgctataaacagaaaatgagacaaaagagttggtacttggatttcgagagggtggccatggatacccatacgacgatcaatcatacaagaaccatcagtgaccaaaagtgttggaaacatatcaaatccatctgctaaacacaagttcatgataagctttatccctgtctgaacatctatcctctcttgtaacgagaaatctccagttatctttccatatgccctcaagagaataatccaccacaaacctataaaggacaaaagaaaccaatcagtaacaaaactcccttagagaatacaatcaacataatattgacactgaccagaatccacaggagcaacacgaccaatagctgattcaccaaaatccggatccaaaacctcttccgtagtgttctcatcaagcgccacagttcttactttaaaacttgcaggcatcaaaccctgtccaggactgtaacagtctacagttttctcccaactcttaagaaaacaaacaaatctccatcaatactataccacacaacatcaattctcaacatctactaaagttcctatatcataatacatacctgaagctgtaatgtatgaaggagaaagttcctaacaatatcaccttcacctttaagcaaaaaagccaaagcagaaggcacaaaatctcttataaaaacttgatcataattcaaaggcatcttatctccaggatcattcgccgccactgtcccaaccggagaaccacaatacctaacaacagcgttttccaaaatcctccacgcttctttctcagcttcactctcttctctcacaactttctcactaccaatagaaactgtttctacttcttcttcgtttttgtgtatcctttctaaaattgcatcactttgaacatgaattctctcgaaactcttgtcactgagattagtttcaacggatgttgagaattgtcttacggagattcccgtcgtcttctcggaaaatcgatttggtaaaatctttgattgggggaaacagtaaatggacgaagagacgaatctctggcttgatgataaatggcgaattgaggtggttcgagataaatctggtggtgaatccttggagaaagtggagaagaagaggcttctgtgaaatcgtgaaggagttttcgtggaaattttgcggaggagatagattgcgctcatggttagagatgagaattcgaagagggaaacggaaatctggagaatggagaaatgaatcaaaatgaagagttagggttttataaattgggggattagatcagttaagcgatggagaagaaggagataaaattgggaatgagtatattcaatttgggaaaataatggggttaaggttaaagtttcgggattggggaagaagacagattaatttctttcctttttaggaaaagcggtcttatatttggattattattttggagtaaacaacaatcaaacgaaacaaaatgaaaactattggcataattagcattcaaggatccaaaggttgatcagatgaactctgagattcaatgaaccaacataaccctagacacaatgagttatgcttcccaaaaagttgtgaattcactagaacgtagcttacgaatgtgtctcgtgttataaccctagagaatgatttattatttccacttgataaaaaaaaagtgaagagttgaaaactaatgatgaaaggatagtcgccacggctgcacatttgacagatacgctcgtggtcgctgcgccagtggccatttgggtggttctctctcttgcaacggaactggcggttcacgtcggccaagtgttggacttctatgacgtcagcaatgatgtcaaatgatgtttaacaataagtaataatgtaagttccaaatcaaaattaggctatacatcaacatatggagtgaagcgaatgataaaacttaaaacataaattcaattatatatatatatatatatatatatatatatatatatatatatcttcaagtataatgaaaggatcaaattattccaaacttgtttaatttcttccgctgattcttgatcttcttcttctccctaaagtcgcccactcttacaagttaaccatatcttcatcattgacgatggattattatattgctgcttgttttttgttttccttacattttgagccaaagataaactccaaaaaccaaaacatgcttttctctttagtcgatcaaaaaaagaaaaacacagaacgagaacttcaatgtcctatcaatatctggagacgattctacgattgcttggtgaaattattagccacacaggccttgaagaaagtaacacttggccaaccacagaaacttggtaaagttgtatcaaaggaagaaaattctgatattggctctaataacacatgtaatgttggagaaaacatggaagaaaaggaaacattatcagtcgatcgagaactagtagagttaagtgtacaaaaagaaaaggctccaagaaaaattgtgagcataaaggatgaagttgatgagatacgaataagttcaaggagaatcaagaggaggacatcgaaaggaagttttagttccttcgatgagcatgaggttatgtctttgaaaccattgaagtcgattctaagaaaggattcaggagtaagcaaagatccatgattacatattggatctgttttaagaaattaaaattccgtatgtaagttacgtaattatgtcgtgattgatatgtaaaattaaaaatttacatactatcccatgcacgtatgcatgggtttaagtaaaactttttaaagtgtaagataaattagattttttttaaaattattgttgatatttaatcaatattttggttttggggacttttttagtttttaggcttataaataatagtgttcaatgtcaattataataatttaatatggacgttttggtatatatatatatttttttttcagctcagattcgtatttaatcaactacgtaaaaataactaatcaaagacacaaactcaagtatcgatctccggttcggtatgcttgtccgacctctctggttacatgcgttgaaactcatcccctaagatttgacgttttcaaaactaaaaagactcattatcatcacagctgactagtattagcacatatcctcaacaacgtttgacatgttcattacgtctatacattcattctccttcttactcaaaaatatgtaccaataataatacgaattttgttaatttgacatagatccaattctttgatttctttaattatttaattttaacttcaaactttccaggctctaccattcctccatgatggttttctcttcaaagttttgataagcataacctcttcaatagggaaaagtacccagagacaataatacctcgaattgtgtttcagtcagatcatattccaaatagctcctcagctcacatggcaaggtatcttcataatcgggaaaggtaatgattgaccggtgttgtggttaaatagctatccgttaaccaataagacagacgaagctgttgataggatataagatttcatattggacttggggaattttgcaagatgactagcagacgaatatatattaagtcttaaaacttttgcatgtttattattgaaggaaataccgatacatttgattagattaattcatcttggacacatatttatcttttaaacatttatatgacagcaacatgcgtagatcttatcacatacgccaaaatcatatttgtttggcaagcttctacaaaaggtagtgcacttgtcgttcccaccaccacgaggacaatattcaaatcctccctcgcaagccacggagtcaaataacattccataacctgtttataattaaacaataaatcattaaaccaatatgcacattaattaattatatcaacaaaatcaaattaaacccataattaaaaagtgaggtataaaaataaagcagcacctgaagttgttgtacgactgtgaacaaaagatatgatgaaaaagatagtgaaaacaaatgccactaaagttctcatggttatggccatttttatgatatttgttcttaagattggtttaatgaatttttctagcttagatgactgattatatatataacacaaacatatgtaaaaaggtaatttttctggtaaaaaataaaaaggaacatgaactttcaatttatttccttatagatatatagtcaaaagaaaatattgtagaattgatttcttacgaaattagtcggtcaatgaccaaaatatattcaatgaatatttcagtagacaaatataatgttcgatggaagaaaaacaattcgaaatattgaaagtgatacatattaaatggttcagtttgaggttgctagagacatctataaatcttggtttctcaaaattagtcattaacataatcacaacatatgttaaacttaaattataacattatatactgtcatttctcaagtctacatttgttaataaatttggcagaaaacacataattacgttttggcgtagaatctctctataaaatagctattgccgtaaaatctcttatatatatgttcactttagctgtagatctttttgctagctttgttggttgtgacttagctattttatccaaaaaagaactatgttagttgtagatgtagatgttatttttttcctttaaatttcaaaattttttaaaaaatatatgattaagagagattaaggattaactgtatatgtaaaaattgttatatatatatatatattttttttttgcatttcatttattaccataaaagttttctcttttaaaggatttttacaaaaactaacatttacaatcccatacgacatttttttgtcagtgtcgtacaactaaaaagtcatttcggaaaaccgatccaaaacttgaagatgatgcatgtacagatgtactcatcaagaacttgtattcgacatctggatcaatactgcaagatgatcaagaaatatggttctgtcaatctgcacgagtgataccaaaaaaaaaagaaaaaaaaacaaagttttgcagtaagattttgacttgaagttaattaaaaaaattaaataatgaactctagtgttacttgtttctttattttgtaataagaatctaattgggttaaataatgaactctaatgttatctttttcattattttgtaataagagtctaattgggatgttgatcttactgccaaggtccgagaggcgttccacaaagaggaggcaaaccactactccccatccatgatcaacgagtggagcagttatgggtcaaatgaaataagctaaatggcgcaaacgaagatatttttgaaagttttaaaatggatatttccgatgcattaaataatgcgggttccgatgagttgtaaaagaaatcggaaaactgattattgtaacattttttttttgtatcaaattgtaatgctttatgattcgatctacacaacataaaacatgataactaattctgaccaaacacatatataataatgtaggttacctcttcacgttgttatagtttaaacaaaacaataacgtagattgagtatctctacacgttgtcattcctgaagagtgtcgttgactttttagttttttgttcttttcctcatattttccaatttttgaatccgatcaaacaacttgtgaaaacttttctttccaaatttgtttccatggcgcagcagagccaacgtccaatctcaaaccgtcacatctctctcctcaaccgtaacggtctcatcctccttctccttctagctctctttgttatcctcggtgtattcttacctttgacaaaatcttccttgttcatgtttccaaacacaacatcttcttctctttctccttcttcttctttatcggtctccgactggcgcgactattcccttgctcaagccgttaagtttgttgctaagaacgagactgtgatcgtctgtgctgttagctaccctttcttgccttttcttaacaactggttgattagcatttctagacagaaacatcaagaaaaagttcttgtgatcgctgaagactatgctactttgtacaaagtcaacgaaaagtggcctggtcatgctgttctcattcctccggcgttggatcctcaatccgcacacaaatttggttcccaggtacagagagagttttcaccttttcgtatccgaagtctgaccctagcttgaaataatatccttaactttaaattcttaaaatctagcttagaaactcgggtttttatgtacatgtgtttttgataatttagatcaaatacttagttttctactttacatagatctttgatctttattagctagatttaacttacatttaagaatattattatatcgagctaaggacacacgtgggatataccgattgctcgggtcataaattgtaaaatgattctgcatcccctgttttatggtatagtcgcttatgggatatgtttgaagttataccacaaagacgctatccatgcatagaccaaactattcttggggtagaatagtatcccatgccagctagtatgtgtttttgtctctaagtggtgttataggatattatggttggaggttaccgatcatacatctgtaatagtatgtcccatattaggtcccatacttctaatctctcttcaattttttccaaaaagtcgatgactattcataactatcacattaacatcataaaagagttagaccaaatgtgataatatatgcaaagaatttgaatactgcaatccgatgttttacctaatttattatattatattagggtttcttcaatctgacatctcggaggccacaacatctcttaaacattttggagctaggttacaatgttatgtacaatgatgttgatatggtctggctacaagatccatttgactatttacaaggaagctacgatgcatacttcatggatgacatgattgcggtacgtaacatatttgcatcttttgcattttaattctagtgtttatgtaattttattcttggtttgatttttgtgctgccagattaagcctttgaatcactcccatgatttaccacctctaagtcgaagcggagttacttatgtatgtagctgcatgattttcttgcgttccactgatggcggaaagcttctaatgaagacatgggtcgaggaaattcaagctcaaccttggaataacactcaagcaaagaaaccacatgatcagcctgcttttaatcgggcacttcacaaaacagctaatcaagtatgtaacgttgctcctccaaattccacatttgctttatctaaaattttcacaagctttctttacctaatcattggctagacttagtaagatttattgttagttttaaattgtgattcggttagtagttagaccaaaactttttggtactttaagattctaattttatctactcctaactcctctaatatactaatggatgtttgattacgactttttggtactcaaatgttatttctttcgtgatcttctattgagcaggtaaaagtctacttgcttccgcaatcagctttcccatcaggaggattgtacttcaggaatgagacatgggttaacgagacaagggggaaacatgtcatagtccacaataactacattatcggttacgacaagaagatgaaacgttttcaagactttagtctatggctagtcgatgatcatgctcttgagtccccactcggaaaactagagtataatttaaatgcaccgaataacatttcctctttttgttgctatctttagaataacatcgatatcaattatttgccctttctttttgcttctcaggatatatcaagagcagaatactactactgaagggaaaaatctgacgaaaatagtgagaaaacagaggaaaaacaggggtaaaaaacacaagttaccctagagaggacttctccttacgtacgacaagtgtaggatctcgaaattgttgcgcggagatttattcaaactcgattacttagatatatgttcaaagtctcccattataatatgatatttatacataaatactcatcagcactatttcattaataacttttatgtaaggtatggtcaatacgaatatccgaattaacatgagattttcttaagaataaaaaatctctatgataggtataatgactaggatcttcaaatcgctttagcaatccaagttaccgtcagtgaacacaagatttgaacaagcaacgtacacaaatagcgtccgttacatttttctattcattctccttcttcccactatgtaacatgaaaaaatttgttacataatttgtcatatatacaaaataccctatcacatatataatccaaaataacataatacaagtcttgttcatctccatatgaagtgagggaacttttactgagctacttactactaacctattatagcaaggaattacaggcatatgttagaaaagatcaaagtagatggagaatttaacaaaagcaaaagagaaaaagaagaaaagaaaaagacagagaaaccatttcttcagattagtagtagcacttatcatcgtcctcttcctcggacggttctcggatatggattcggaatcactgtgttcggcgatatcctcatctttgtctttggttgcttcctcatcttctttttctgacgctccgcaggattcagatttagcgacgctatctttatctttttcttctttgcgtaacgattcgctgaattcatgtatataccagagatcatcttcatctgcagaacccacattgttgtttcgctctgtttcatccgtcaagatctggacaccacattcaacaatgtcgaaatgtttgtgtatgctgctgaattcgagcactatctctctgctagaggggtagaaaaaggacaccgggttcaccatatgaaatataaatagatgttccattcgatatttatagacatccgttagtacaaactccttgtcagtggagtttactgagttgctgatgactatgcaacgacacagtagtcttgaaactatggtagaatctctgtctttatgatcaaactctgtagaaatcacaacgcaaaccttataggaagcagaattaggaattgttaatgaatttcctctggctcgatgatcgaacagtgcaggtacttttcttcctggtaagagagctcgcccatcaacaaaccgttgttgaaaaatcgcttgtcgcgcttgtcgatccaatttgaaacagttgctgaaatcaaggtctgcatttggagtgtttaaaggttcacttactctctccagtgattcacaatggcttgcccgtagccatttgagtgaactaggaagcttcggcaatgacgtgagttttttacagtttgatagagcaaggacacgtagattatgaagacctttgatgcaatctgtaatactctcaataccactgttgtctatgtgtagctctgttacactcgtggggagaagtgttgaaaaggtcttgagatttacactgccacttatatcgaaagactcaatatgcgagaaatgcctaagtgacgcgggaaattctgcaatcgtagtctccattacagagagcctaatgatgttggcaggaatatctggaaaacttttcagtcgtaagcatcccatcatcttgatatcttcgagagataccaagttggtgagagttggaatgacttgtagacgtctgcaatgattcgtctctaagaagtatagtttatgaagattagaaattgaggatggaagctctaacaaagcaacgcattcatgcaaatccagacgctccagatttttagcatttgaaagatttgggagttccttcaaacgagatgacctagagagcttcatcgttttgagatttgcaagcagctgcacgtaaaaatcataatataatcaataagtaccgtttcaacatagtttatatatatttttctatgtgaatattcctaacatcaaatatcagctgtatcgtctcatatcagcacaaataataaataactaacctgagttccttcccatagcttctcgagctggctatccggcatgttgagttcgacgagattttctgggcagaatctacgaggaagggtctttctcgtgtatgcatcccaacgaagtaagcttaggcgaggaagaaaatccatctcctctggaatgtgcacttgtccttttccagtaaaccacggatcgtaaacttttagcaacaaaagattgtgcattctttcaaacgccttagcgcttattgttaatttgttgatctctcctacgtcaaatgatatacctgcgattgatccattaccctaacaaaaaatattccaaagcaaaacttgttattggcaagatctgctttaaacagcagtgaataaacatgatagcgcaaacagaaagcttacttctgcattttccaaaacataagaaatctcttgggtatctacaagaatctggcgtttccaaggctcttgtttggaaatgacttgtctagccattacttttagcaaacggtgcattaccactatacctttagcgccatgacctatatgtataagatgtctattggctaatatttttaacccaagtctaacattcaagttagtttttgccagcatggatgtcacataatcagcatgttgataattgaagaagactgcaatgtagagaaatagagcttggtctttctcatgtaaactttcatagcccactttcaatacactctcaattcttccatcaagacaagtttgcaatcttggtagttcttctatccagtcagaatagttctttccccgcaatgatgaccctaaaacatgcagagccaatggaagataaccacaaagctttgcaacttcagcagcaagattcataaaccgatcaggtggagagagttgtctaaaagcggatagacaaaagatcattaaagcttctttacttgatggaaaacccacgtggtatatatcactgataccatgttgctgtaaaatctctttgttttcagtggtcactatgaccctacttccaggaccaaaccactcgatattagccaaagcatcaagttgatctagactctccacatcatcaagaatgataagaaccttctggtcgtgtagcctctctcgtatcacacctaaatgggctatcctaatgccatctaggttcaaaatctttgaaagaagttgctcttgtaaccgcaacctcaaaccatactcaacaagaccaatcttatagctttcatgaaggttgtccataaaacaattatgctgaaaccgtttagatagtacactatgtaaagctctggcaatggtactcttaccaatgcctgcaggaccagagattccaacaatcttagctccatcataatctaaatcaagcaaagactctatttttctcaaatgagcttcaagtccaatcatgccatcaaaatccctagacggtgtggtattgagtttatctgaaacatcacttgcaatcttctctatcatcttcgcttcattgtccctaaccaaagacaaagaaaaaaagcctattcatgagaaaaacaaaatcaagaattgatactataattcataaactccaattcatcacaattaatatcctacgacataaaagtataaaacgcaaaccagttttggaaatgttctccagcgatgttgcccacataggtcaacgcttggctccatttttgcctctgctcctctgttttacgagcacatgtttcattgaaagcaatcccgaaatctccagtttgtttccttacatcagaaggatgtactccgtagaagacagtcatcacaatctgccctaattgttctttgcaatctaaaatctccaacaactcatccaaacaccaactggaagaagcatagttcttcgagagcaatacgatagcgatccttgattctctaatcgcttccgtgagagctggggcgatgatttggcttctctcgatcctttgatcatcgaacattgtaattccattgtagttaaattgtttgcgtaaatgactgagaaatgttttgcggacgtctggtccatggaaactcgtgaagacattgtatctccaggtgcgacgtgaagaagaagaagaagaagaagccatgagaggttcaaaatcacagattcccagagagcgtgaaatgtttctttggaacgtaaacgaaagtagagaagaaaaattcaaagtcaacgtgacttcgaagaaatgggaatgtgggctccggtaataatgcaaacgcgcaatggaaggtttcttgttgggaagattaatgcatgctatgtgacatatgtgtaaaacagatttatcgttagaaaaaaaaaaaaaaaaacagattttaatctatttagaaatacagctcacaagtggtgaactcgtaaacaccaagttctcttttcaatctcttctttcaccttggctcggtgtgaagaggtgattcagtttcttacaacgagctcaaattcttgtgattcacgtgttgtttctaggttgatattttgaatttgcgttatcaaaactgaacacagagtcacatagaagttctcattatatactgtctagctattgttgatatatatggaatatggttacatgcacaattgatggctcagatgatatatattagagatgggcttatttacttgtacattaggtcaagcctaatatttaaagttttagaagaagattattaagaacacaaaaatttaagaataactctcatattagatatcaaatctaatatgtttattgtgactggtcatttttttctaaaatttataagggtgatttgcatgaataacactttttgagagaaaaattaagaatatagcactatatatgtaattattaagtaattaacttaaggggtaggtaaaatgatctaaggtggtggtggtggtggttccagcgacgatggcggtggtggttccggcgacggcggcgacggtgattccggcgacggcggcggtagtgattccggcggtggtgattccggtggaggtggttgtccggcgatggtggtagttccggcggcggcggttgtccggcgatggtgcggtggttgtccggcaacggcggcggtggttgtccggcgatggtgacggtggttgtccggcgatggtgacggtggttgtccggcggtggcggcgcggttttccggcaacggcggtggttgccggcgatggtcgttatggtggtgattccggcggcggcggttttccggcgacggtggttgtggttgtccggcgacggcggtggttgtccggcgacggaggtggttggccggcggtggaggtggttggccggcggcggtggttagccgccggcggtggttgtagtggtggttaatggtgttagtagtggggataaaactgtaataatatatattacatatgttatattgttaggttgtttttattggttagtttgttaatttataaaaattttaaggttatatctgcaaattatccaattaataatgtatttttgtttttataatttaattaaagttgtatattatttttggaaagatatctttttgttaatttcttttttataagatgaaaataacttggtaattcgatttgaatacgaaagtaacggtatattgaaattagtgacacccatacccgatccaaacctgatgggtggttatccgaatccgatccgagatctataaatatccgaacggatcctatacgtctacacccgaatatccaaaaacctaaaatatccgaaccgaattcgaatgggtatccgaacatccatgcctatttgttacttttgatattttattgacgtttagaagaaaaagaaatattagtagaactggaatttggtaatttgattaggagaaggaaatagtggtattcaattgtaaaaatataaaatcttacatttttaaataaggaattttagtagactcgtaaattgactatataacacttctttttccaaaggcattgtaacgtaatatcttacaaaaaccaagattgtttttaattaggtacttccctaacattaatatagagatttaagaaaaatcaaaaactgccagttaaattcaaaacatatcaacatatcaaaatgtctagagtttctttttgtatattatatgggtcgagacataagatatccagcatgccatcttatgtgtgtacgccgtttgccaaataatcaacctagacaacacttgaatcaaaagaaaatcacataatcgcaccgagtaaggacgaatgaagaggttgagaacagaggttggtgtttatgataatgagttctatcaagatagcttccacgcatgcattaatcttcctaacattttgttaaaaactttcccaaggaaaaaaacattttcgaaccatttaggaagttaagaatataatacctaatatggttgtggtttactctgtaaatgacaaaaattcttcaaaatctcttcgcaatttcttctctcaaaccccacttgttttctaaaaccacatttaactcttctgaaatttcttttactttgcaaagaaacttcacatccatgtctctcttaacaagtgaactcagctttgctagctattttctcgtccgcataatggtaaaagaatgatcctaaacacatctggccaagaatggacagtatatatacaaattgttatgtacgcttcattatgacttttcttttctttctttttgtttttctccatattcgtttgtaataatacatttaaactttcgaaatttctttaactttgcaaagaaacttcccatttctctctctctattaagtgaacactattttcccattcttatccaagactcaaaatctgtgattttgaaccactcaagatcatctctcatggcttcttcttcttcctcacctcgcaactggagatacaatgtcttcacgagcttccatggaccagacgtccgtattaaatttctcagtcatttacgtcaacagtttatttacaatggaattactatgttcgatgacaacgggatcgaaagaagccaaattatcgctccagctctcaaaaaagccattggagaatcgaggatcgcgatcttattgctctcgaagaactatgcttcttccagttggtctttggatgagctattggagattttaaagtgcaaagaagatatagggcaaatagtgatgactgtcttctacgaagttgatccttctgatgtccgcaaccaaaccggagattttgggattgcttttaaagaaacttgtgctcataaaacagaggaggagaggcaaaaatggacccaagctttgacctatgtgggcaacattgccggagaagactttaaacactggtttgtatttagttaagtacagtttatttttcttatgatgaataatggtgttttatgattttatgtgggatgacatgggttgtgaagtttggaatttgattaatctgataaatttgaaacttttaagtatatttgacagggattttgctatggtatgttatagcgtgtaatgaataggagtttgattactatagttataaatatcaattctttaagtatatttgatcaaaatttgttgtggttctaattactgttatatttcgtcgttatgaatatcagatattaattaatatctgatattgcattctattttagagtaggtttaattgttgaggggaaccataaatcggtagtgtccatgcaaggaaacagaggaatggtctctttatgattttttctcatgaattttcttttctttttgttaggcccaatgaagctaaaatgatcgagaagattgcaagagatgtttcagatatactaaacgtcacaccgtgtagggattttgatggcatggttggactaaacgatcatttgagggaaatggagtctttgctagatttaaagaatgatggagttaagattgttggaatctctggtcctgcaggcattggtaaaagtaccattgctacagctttacatggtcgactctctaacatgtttcagcgtacttgttttgtggacaatcttagggaaagctataagattggtcttgatgagtatcgtttgaagttgcacttacaacagcaacttcttgcatatgttttaaatcaggataaaattagggtgggccatttaagtgtgatgaaagaaaggcttgacgacttgagggttcttattattcttgatgatgtggagcatctatatcaactagaggctttggctgatatcaggtggtttggtcctggaagtagggtgatagtgaccactgaaaacagagagattttgctgcaacatggtatcaaggatatataccatgtgggttttccatcagaaggagaagctctaatgatcttttgtctatctgcttttagacaaccctctccaccttatggttttttgaagcttacatatgaagttgcaagtatttgtggtaatcttccattgggtctgcatgttttggggacgttattgtggggaaaaagtcaggctgactggattgaagaactaccaaggttgaaagactgtcttgatggaagaattgagagtgtattgaaagttggctatgagagtttatatgagaaagaccaagctctttttctcctcattgcagtctacttcaattatgattatgttgattatgtgacatccatgctagaaaatactaacgtattggatgttagacttgggttgaaaaaactagctaatagatgtcttatacaaatagatatagaccataatcgcaaaagtagagtcgtaatgaaccggttgctacaagtaatggctcgagaagttatttccaaacaaaaaatttccaaacgaaagattctagaagatccccaggatatttgttatgttctagaagaggcaaaggtatgttttcttaatttaagggggtttgcattacttaccatgttattgtttgagcatattatctctggccactaacaagttgtttggaatatttgttagggtaaaggatcagctttaggattatcattggacgtagcagagatcaaagaattagtaataaacaaaaaggcttttaaaaaaatgtgcaatcttctcatcttaaaagtctttaatgggacggatccccgagatagtaaattgcacgtaccagaggagatggagcttccatctagcataaggttactacattgggaggcatacccgagaaaatcttttagatttggtccagaaaatctcgtcacactcaacatggagtacagtgagctcgagaagctatggaaaggaactcaggtaagttacttacgtgtgttgatgggaaatgagatatttgatgttggcaatagtctaatagcacattttgttctgattttcacgttcagccacttgcaaatctcaaggagatgaacttgtgtgggtcatcttgtttgaaggaactcccagatctttcgaaagcagcaaatctggagagattggatgtggctgagtgcaatgctttggtagagattccatcctcagttgcgaatcttcacaaaatagttaacttacacatggaatcctgtgaaagtctagaagtcattccaactctcatcaacttggcatctcttaagattatcaacatacatgattgcccacggttgaaaagttttccagatgttcccaccagcctcgaggaacttgtgatagagaaaacaggggtacaagaattgcctgcatcatttaggcattgcactggtgttactactctttatatatgttccaatagaaatctcaagaccttctcaacacatctccccatgggtctaaggaagctagacctaagcaattgtggtattgagtgggttacagatagcatcaaagatcttcataatctatattaccttaaactatcaggctgcaaaagacttgtgtctttgccagaactcccttgttcgctcgagtgtctatttgcagaggattgtacatcactagaaagagtaagtgactctctaaacattccaaatgcgcagttcaatttcatcaaatgcttcacattggatagagaagcacgacgagcgattattcaacaatcgtttgttcatgggaatgttatcttaccagcaagagaagtacttgaagaagtcgattaccgagcgagaggaaattgcttaacaattcctccttctgctttcaacagatttaaggtttgcgttgtgttgtcaattcactagacgatgtcgaagaattc

SEQ ID NO: 29 - DNA, 86014 bp, Arabidopsis thaliana
gaattcttcagctaaacataatcaaacacatcaatgaatctgccaaaagaaggaccaaaatcaaaccttgacaaagtttccaagagttttagtagatcctctggaagaagtaaagacatcatcaataccagcgaactgaagaaccttcttaggaaccctagcagcaacaataccagaacctctcggagcaggaaccattctcacagtaacagagccacacttcccagtaaccttacaaggcacagtgtgtggcttcccaatcttattcccccagtaacctctcctcaccggaacaacagagagcttagcaagaataatagctcctctaatggcagtagcaacttccttagaacacttgacacccaaaccaacatgaccattaccatcaccaacaacaacaaaggccttgaatctagtcctttgaccagctctggtttgtttctgaacaggcatgatcttcataacctcgtctttcaacgtaggaccaacaagatgatctatgatttggtactcctttactgggagagaatggagatagatctgctctagcttcgttattttattgtcagccactagacgacctagtttggtcactggaacccatttcgtttcttccgaggcacggcctccacgtcttccacggcctcttggaccacgatcacggccacggccacctccacgtccaccgccgaatccacgtccgaagtcaccacggtcaccgccacgctctgcgccgccttctcctcctctttccgccattttcgatgaaattcagagaaatgaaacgcttcttcctcagagaaaaaccctaggaacggcgcttgagcaacaaaaaggttattaagattctttgacaaatatctgtgggcttttttaaggctttaatttctgcaaaccaaatattgggccttttgctattcttcttaccattgcccattgtactgctaaagctatctatgctttcaaattcgaattgacgacgattaacgttaatgatatctctaattatgtagatagcttggcttgtttaccaatttgacagggctagctgacgcctaatggtaaaatcattaataagtggatagtaagttaaaacagtgagtgaatttgtgcagaaaaaaaacatggtatcaaattaggaaaaagactcgaaaattttacaacaaaaaaacacaatactatagagaaattttatctcaagagaacgaagtgacatttattaaatgcaaccgactttaatttgaatctataacaaaaacatatggatggaaattaaaaaatttaaacaactaatgactagttagtaagtccaagttaaaggctaaagactagagttgttggtaaacttgcttgtaaacttggttctacggggtaatgatgtctagaagtaaggtataggtgtaagtgcaagtgtgtgtatgtataatgaagttagtataagtaaactagtataagtatatttatgttgtgttgtgtcttgcagaaacagtcctttgatccaatattatcaatgtagaagattaaagtaaaaaacgtttcttgttttctatttagaacaatgaaactatcaagagagacttttattttgttttcaataaataaacaccacagtttcagcaaactggaaatctagacatacattagcacatgtacaagcgtcacaatcacaaaccttgaagatcaacagtaataacctgagacgaatcttccttatcaacaccaaacgtcttcagaaccttactagatgaagtagtaatcacttcaacggcataatttccactataccctctaaacggaaacgcaccgttttgatcaatatgtccattagcatgagagagccaatcttttttcacagccaaaaaccttttaccagcttcattaacatctccttctgcattcaccaaatgagagttgtctctgctcataaacaactcccaaaatccccataacattataccttccaccgcgggatgtccaaaagcttcccacatcattacttccaaatcatctgcccttatgtgctcattgaccgaggagacatccaattctgtgaaccatattggtaaaccgagaattcctagtttgtctagggctgaacatacaattggacccaccggactgtcgatatggccttgaatcccgattcctcctaccggcgcacccttttcttgcaagtcaagaatctgttccgtgtacttttcggggcaggattttgggtcacacccgtcttctatgtggtagtcgttcacaaacaatgtcgcagatgggtctagttggtgcgcggttttgaacatgttgactctaatgtctttgcctagcttatcttggtagaatgatccatgtaacatctcattgttcacgtcgtaatgtttgaattttcccttgtaccggtttagaagatcggttaggcggttttgcaccgcgttgtttaagtcggtttggttcatattttggatccattgctgaacagttgcttgaacttcccaaaagatacaatgtcctcttgtttctatgttgttgctactgcacaagttgagcatatcatctgcgtcttggtaattaagcttcccttgttctggttccgtccagtaccatttcaattcgttagcgaaaaccgcccaattaaagttctttaagaagaaatcgacgaaatcttcgttatctatatttgatctgctaatgcaagtccccaccgggaagctatttcttatctgtcgaactctaacactagctccagaaaatttgctagaatcaacaccagcaaacttgaggataacgtcacgcttacggatctgcatttcaagaaagttactattaagtctcattgcttgtttgaaagcagagtttttgtgttaccttgtcacattgtcttttcaaatgttttattctcgcgagtcgatcgacgggaaaaatctgcaatcccgcgaccatgagatcaatgccggaagaagggccttgaacgtaaaccaaagccttagatgggttcttctcaattcgaaaagaaccgccaatttcatgccatctatcatcgttgatctctacctgtcctccatttacccattggctatcgataccaagtgcgacattaacattttgcggactattaatgccagaaccaactttgacccaaactgatatttggtacgtcaagaaaagcttaagtttatcagtgatcatttgtgctggacccatccatgtctgtgttcggttagtcacaagtatatagcggccacttagacgctcgtgtgctccaagcgagtctcttgccatcggaggaaggatccgaggtgacccttccgccacacttagcgtgcagttccctaatgaaaaccatccgttggtcgtatcatcacttaaatgactatttgtgagtatgtttactccaaatgcaggattctacgagaaaaaaacaaaacaacacggattaagacatcgattatttgtttacgttttccaaattaaacaacagtcttcagaacaaaattattttgctaaattgtttattctttagaaaatgttatatttgtttagaatattttgttcacctataattttacggcggtgaaaatgtgaactggatctttggacttacctcaatagacgggggtggtgaaggaggaattttctcggcgtgttttacagttaagctattgagaagaatatcggttcctggaggtggaccttcgatgtaaatgactacccgcgatgcagaaccgttgaggaggaacttccctttcaaatgtatccactctttgtctgttgcttgcacacttttaaggaaacaaaaagagaactacttcagcagttaaccatgattcatgaataggagaatgtgatacattaaatactaacgtggaaatgccaatgtattgatcacgttgatttggattttggacccatagagtagcttgtacagtagctgttgtcacattgtttccataaatacgaacaaccgcggttgcttcatatacacgttttctctgaactttcccggtgatctcttgctgaataccgttccagttctgcgtgcgttctgtagccgaagcgaaaaccttcccggattctggtactatctttccatcagccattgagtcatgcaacacaatcttgcagcttctcccagaccagttatttagtccatcttcaaagtttgggttcactacaatagtctcatcttcagcagtaacacgctccagctttaaagtgttaacacaattccaaacaggaaaacaaatgaaaatttatttaaattactaattatactagtgtgatcatttggaataattaacctattgtaacatgttacatttatctttgagttttacatgttacaataggttatttgattaatttacatacctcaggctcgctttcgcggtggatggtaacagactgtatgagaagatcgatccccggtgacgggccttccaaatagaatacaactttttctggtaagctaggtaacgagaacatgccttctagtctcacccacttctccttgaagacacaagttctgcaaattcaaaataaaatgttatctttttgtctcaacactaattaagatcatagaaaaaggccgtactttgctatgaactgatagtttgtttgagattgttggctttcgagcttcaaggtggccataacctccaccaatccatgcaccggtccagagacagcaacagttgctgaaactttataaagactacaaggttttactctgtttgtgatgtcttgctccaagccttgccaagtttctttcctgttcttgacaactacatagctaccacactttgacgggtctaaaacaccgtgagagacattagactcagcggtgacaacaaaggcctcacagcaattcggatgccacgaatgcatcccggaagagaagtcatgattcacaattacattggtgcgatcagaaccaattatagatgctacattgttgttgttctgtttttcaggctgttcaagaaatgattaaacagagaaaggtaagactaaaagattcaaaagtttaacttagaaatgaagaaagtgtctgaaaagatgaacaagacttggcaacgaagaaaggaacatatccaaaccctaacctcttcattgtcttttcttgaaacctccatgctttctcttgatttctaacataacataacccaaaaggagaatcagacccagatcaaatcaagagaaattggctaatgggtaacagagaaattctaagaaaacacacaaagatttaatcttttttgttaagggaaaaagacaaaccttgtctggatttcgatctccgttcttatgtattttgtttgagaagcagcaaacagtgaatctcttcattatatagacgcacagagatcagtttttgtgtgattcttggtggatttttcaaattgatcgcaaggatttaagtgaactccaagaaaaactcgcgggaccagctaaccaaccaaatttttttatttttttctttttctttctaaacctcttaaacctgaagagcagataaagcgttcagttttctgggttttgatgttgtctcttggaggttgtgctctgaaaaagtcggtaaagctatttaaatacggcagacattatataatttttaagtcttaattttgtcttttgtttttttcatatttttagtagtacttaagtataatttaattatatttattacttttttgcaaaacaataaattatttccttttactattaaatttcctactccgtctgttcataattaattcaagttttggaaaataatttgatcatattggtgaaataaattatttcatttttcattatagaaaaatgaaatgtcatcaacaatatattttttaaaaattgatatttgcttgatggtctaaatatttaactaattaaggtgagttctacagctaaatactgcaagctatgaaacttatacatagccatacaaatattcaaccataatttaaaattgtcagaaatacgcttgagttcgagttcaagatgtcatattttacataaccgttcacgcattggaaaaagaagaagaaagtggatagctgattactttaagccatatccatgggtagtaatcgtttttctttttctttggaaaatcattaacccttgaaaaaataacaagttacaaaagggaaacattgtttgttaagtattacctaattacaaaaggtaaagattatttatttgttaagtatacacaattaacaaacccaacacccactagctgaactaatgtactagatgattcttttataagaaaacctcaactttggacataataacttaacatgctcgagtcctagaattaaaagattatgggtaaaaagacaaaaagtaaaagcggacggacttacagtattataatggacttattttattatttatttttatttttttaatactaggaggttttgcgccgaaatccataatccttcgagattcgaaattaaagcatgtaatattagtttcgtcacaagcatcattcgaaccagcgaactctaagcttcgtttagagtcttaataattcgaaccagcgaactctaagcttcgcctagaatcttaacaagttgatataattaacgatacttggttatgttttattattgactaaaacccataaaactttaggaccggccaagttgttagttttgttgatgacttaaagtaaaatctgttaacaatttgcgagaaacaaaaggggaaaaggaaggtaagaggttatcatcttgaggaagaacaaaacttcaaagattggtttgatctcccaacttgctaatttcttctaattgattatacttggatagcttggattagaagcaaactattgctttgtactctaatcattcgaggaacgttagtttcgaaagatctttattcaaatggctagtatattagtacattgactcaaccttttgaagctttatctacaaaataagtatttttttttcttttcttttttggtttagcagtttaggttaactttcaagtaattgtgagccaaggacccaagttttacttaaatatctctgtcgaaatgcaagtttttcttaaatctcttccaatgggtacttgaactaagggtactaacaaggtcctaggaagcgccactaaattaagagctagttggttacaaaatgagttatcttcaagaaaaaaaaatataagtaataaacatcatacaaatagtcttcataattgtgtcgatcttttatagattaggagtaacggacttctacaatgctttcctcgacgtgttcattcattttggtactgttcttttagacgtttagatgctacaactagatgcaaagaagtcatttcgatagactagttgccttctgacggtggtaggttgttgtctaatggtgcgacatgcataaggatgtcaaaatgggtaacccaactcaactcaactcataatcaaatgagtttagggttaaatgagttatgggttgacccaactaagtaataatttaattaattattattatgaaataataataaataattatcattattaataaattattaatttattatcatcaaacttagaatatttacggattccactttttacggatttacgtttttggcgggaaaattacgagtttacgtttttggcggaaaaatcacgggtttacgtttttggcaggaaaattacaggtttacgtttttggcgagaaaatcacgggtttatgtttttagcggaaaaatcacgggtttacatttttggagggaaaattacaggtttacgtttttggcgggaaaatcacgggtttacgtttttggcgcgaaaattacggtttacgtttttggcggaaaattacggatttacgttttcggcgggaaaatcatgggtttacgtttttggcgaaaaaattacaggtttacgtttttggcgagaaaattacgggtttacgtttttggcgggaaaatcacgggtttacgtttttggcgggaaaatcatgggtttatgttttttggtagaaaaattacgagtttactttttctcaatttcatcgcttgtatatttaagaaatttggaaaaatattaattttattaaattggtttagatgtgttggttaagcttaaattggcattggtttagagattttacttggtttaattcaattttacaaaacttgatgggttaattgggtaaaccattgaaaccattaaacattacaacccaactcatttaactcatcaaaccaattgacccaataacccatttgacccatcaactcatttgagtcaaaaactttaactcattaggattcatgggttgagttaagttgagttgacccatgaattttgacccattttgacacccctagacatgcatcatgcatgatggctgtagaggtagttttaagtacgtaatatattcggattctcttttagataactctgagtggttttcttatactcaagtctcctttcatatcgcgtgatctggtcttttgctttctttctccggtaccgctagaaaagaaaaaataattgatgaagctggagttagtttttgtaagtaataaaatttagatgttctcaagttttttcataagtgacaatcggcttgctatatttgagagttgaatccacatgaaagggaactagcaaaactgatatgaaattcaggttttgttctaagatgatttgtgaaaagttggttgtcacatttctaaactaatgaagcaaaatgtaaataataacttttgactaaaattaaagcttatatactctaatattaaaaagaaagaagaaccgaagcaaagggtttttacaagatggagattcggagtggcgcggacactaagttttggtataataactggagttcaaagggatgcctacatgatatattgagagacagaggattttggaaataaaagccacaactgttgcggagctcatagctactatgataaggtcattatgactttagaagttcaagttaattattgaaaaagaaaaaaagaactaacggtgatacgttacaatatgatggcatctattaagagtcatcaaaatgtttttcgttgttcttttgtcttttagtattatggtggttacaacgctgcattcaacaccaatcaactgtcaagctgggaatgacatttagaggaagccactaggctatcaactcttgtcaaatgtcaacaaaatgttaaaaactttaaagaaattgtcagataaaaatataaggccttatggccaaaatgttggctagtaagaagtccaccaatgcattagttactgtttagggcctaccaaaactaatcacttttactcgaatttggcttgttttcagttaaatctggtctcaaaatagttataatatatagaagtgtatattattaagctcttctggtttgtatgatcaaattatatttggaagagctcatatgtattagattgaaagatgtagatacagagagattcatgaagttttagcaataaagcattctcattggatttagacaccagatagtttaacagaaagaccaaactactacatatatttttgactctcttgaggatctcaaactcactcatgcatagtccggaagggcttgtaggttttgacactacttataagtcctgcgatggatccggctgcagctaagagcgagacgatcaagcaaacatagcacatcgttttcagcgcaatccatctagcagagtacttcttaatcttggtttgtgcaatgtgcatctccacagggaaataaaccgttaaaggccagaaggaagctgctccgataagacctaagatcgcgttgaagaaagggaatatcatagctacaacagtggttataaccacataagctgtcctccacaccaatctgaagaggctaatgttgaattttccaaggaaaggtacgtttactgaatattcagaagtgatgaacttgttgtctggatagtttctgttgcattttttctcaacaaactggaatatcggctgcgcgaacacctgaaaatgttatatggttcgtttcattagccaaccatgagaaagtgagaaaaaaaaaacgatctctcttcttggttttgggttttacctgataggcaccaataaggtggacagcgatgcaagcgtttgcaaagtcaatgagccaaaagggctcgaaaaacccgaaatctgtgaggaaatctccaggggcattgtttccaaatgcagcatagccgatgcatccacataagatgtagaaaaaagtggtggttgatactcccacaagacttgctcttttcatggctttgttctcagctgggctagatcttagtgtatcctgcaaaaaacataaaactttcaccgttagtgatacaatactccaatctttaattttggtaaacagttttgaactaggtccattatttccttgggtcagagaccagaactaagttagtcccctccccatcagccatcaccgatgcttaaactcggggaccttcccggctgatccacatctcagacactttaatccaaaaatattcttggttaatttgtaaaactattttttatcatactgccgctacccggtcgacatatacacaatggtaccaaataccgtacatgacaagtcattaaatggtgaaagctacgatcattaagagacaaaattttatgagttgtagtgtcaactcagtaagctaactctgttgataagaatatcatatcattgtttgttgtggagaagagattgacaatatctttgaatgtgactctttgtcctttataagcacatgttttacctttaagctaaaagacagattctttactttttgactcttttgggtaaagaaaaaaaaaagtggtccatagggaatcgattgtcgttgtcaataatctctacccacaattctattaagaggtttatattcaaagcttaaaagactttaaaaattgactgagataacttgcctgaatctcgatgagaaccgtggcataagcataggcgaacgctatgtccccaaccgcttgaaacgatctccatatcttttgagctgcggttacatctactccaaccgctgtgcccgtcatactcgtcttacccactttcccacctttttcatattgtaacatatgaaccgttagttttgtaaatggtcttatgacttttaacagtagataaattggtgtgcaactaattaatcatgtcaagattgttacaactattgaaataagagtacttaaaaaatggcagctatgcaactaatcaaaacttttaagaattgcatgtacctgcgacggttgcgatggctagaccgattccaatagttgcataagtaaaggacatgaccgcggccataatggaaagaaaagagagcttgtggaaatttgggatctggctaagaataacctgaataatgccaaaaaccgccatatacggataattcgatatagtacaatccgcagtgtgccctttatcgtggaagcagttcgatttccctaccgctctgtttaaacaccaaaccaactacatcagtatttgttcatagcttatataactcttcttatcaaattgtaacaagaaaacaatttacattaaattttgtaacggtataaagtaagaacatattcacattgtagttgacttacaccaaactaatagaagcagtgatggtgtaaccaacagtgaccccaatcagattcccatattgtgccactccacagagctgcactttcctaccacctgtcatatgtacaataattgcaaaagtattatttatttattacttctgtttttaagctattaattaattttctgtttcataaagaaaacacaaaacactccacggaactatgttataatatatctatttgttatatacatcaacatccaaaaccaacaataatgctaatactacaaaaacggttgcctcatatgtcaaaatgttctttttttttctgttttccttggttttcacaatttggctcaataaacagtccaaaatttaattagtaaatttagtttgacaaccagctaaagatattattgattgactaagataaagtttcagcctaattaattatttcaacaaacatagaccatagtgtataattgggaattaaatggacggttaccaaagttttatatctagccaaaatatttatgtttaaaatagaaatagagcaatttgaggcaattacaatccacagttttttcctctgaaattgcagggatttaaaggaaacacagaaaataagaaatttccatttattacatcttcaattctatccacaaacaattggttgcacaaatctctaatttctaatgaaccaaacataacatatggagtagaatattttttttcttaataataatagaggccacaaaaacaaacaatttttcccattagatatatctttgagaaaagatataaccaaagcatcacattttttgtaatatcaatgagtatctcataaacaccaaacttgttgtatctcaaattgatgcaaaacaggactgtcgctattgatcgacatcaatctttaataattatttaattttgcttttctaacctcaataattcttccgacagaagtcatcctaaactaaaatactacacaaagtacagtatcaaataaaacagaaccataccttaaaccaaaaaaaaagttacttttttaacaaaaatgaaaatttcgtaaagaaccctttttgacaaaaaaaataaaaaaattggtgtataaagtgttgatttttaaaaaacaatctgtttcacaagaaaacaaaagatagagaatcttatgaagtcatggtaataaattggtcaagaattttgtgtttgctttatgacatatgaatttttttcatatttttgatattctatcaatttactttacaagaaaaactaaataaaggggaaaaaaatataaacataccgaggtaagatcgaacaacgtccatgtaagtgtaattccgttttccggtgacgggatccggcgcacggtagcaatcggcaagcatggtggaggtgaagtaagtaatgaacgagaaaatgagtaagatcgatgtccctgcgatccaaccaagctgagctatagcccatgctaaagacaacactccggagcctatcaccgccgtgataatatgcgcactcgccgtaagccacgtcccggtacgcttctctcgaccatcttcatcgacgttctttgtcgggtccgacacggtgtaggcatcgccggattccgccgtggagtggttgtgtccttctgtgttgaaactcttcatagtgatgagagaaagagaaagagagaacaagaagaagataaaataaatgttttaagtcagagagagagtaaatgaagaagtctaattatagtcaacagatttgtgtttgcataatatcatatatatagacatacttgtatatgtatgtaatgaagtttttaagcatatatgccaacaagacgtatacgtaaaaaaatacgttatacgtgttcgatttttaacttttattgttaaatgttataaatgttttagttaaagaaaaaaaaatgtttatttaatatagtttcggcttgggatgtgtaaattgcttttggactagacagagaccacatatggagggacgattttaatgttcagattctgtaataattattcttcttttttattctgacagttaatttggagtaatatatagaaaaatattttatatttagatttgttgatataatgactttttgtaactacaaagtacaaaatacaatatttttatcatatatataatgtagaaaaaaatcttcaaaattaaatgctatatttttcctttttgaaatttacagatacatttctaagaacttgtaaaactaatttatagtgttctaaataaatattatttactccttaaattcataaaacactttataattttttaaaaatgtcaaaaaaaaaaatttaattaaaaatatcttaataaacaagttatacaaacttttgggtttacagatttttgaagatgacaccaaaagaaaatgaaaacaaaaaacaaattattatattgttatgcctaaatgagaaaaaggtattcaaagatgcaacctaattatgaagacttcttgaactctaatgaattccctaaattggatatacaaaatctctatggtttggtttttttaacgagttgaagatcatcaaatttggcattacagattagaaattatggacaatcgaagacgacaaataaaaataaataatggggtaaaattcatgtatgtagatcatttaacaatttaagttgatgttaatataattttttaataagataacatcggtttgatatttgacactacagttgggccaagagaatctaataaccccgataaaacagatttgacctaaatatatatcgtttctgcgagaacccgtcctgttaagtgctctcccatgttaaaaaaaaacactatttttaaaaaaaaaaaaaaaatgttaatatatcgagaataaaataacaaaatactttcgtatcaattaccaagtttcataaatccatatataatgaaaatttgggtagattcatgaattattccaaattctcataaactcattcatacaagaataatagaaatcatgttggaactctcattctcttaatgtttttttctcgtttagttaggagttagtttttcgtactacttggtcgaacatacctagttgtttttcaaacggcttatatataatgtatcctaagagctaacaaatccttgaaccattctttcagttaattgagggaatcagaaagtcagaagatactacttatttaagcatcttgaaacgacgagagaagctacttatctaccataaataactttgatttatttgatcttcaaattttggttttcaatgttctaccaaaataaaactaaaaaataaacaaatttaaggtttgagtttgatgaagagtaaacgtgtgttgactgaaacaaaaagtaaaaagttgaacaaaaaaacggatgaagggtaaaagcgtaaacgtaggttttggctattaagagattacattatcttataaaggttaatcatgctcaatcaggtcaaataatgcaaatgccctttgccagtaaaaatgttagaccgtgacatagatgtccatcgttctttaatttatatatatattcatgttgcttctttagaaacaaatggtgatttatttacttgtttaatataagaagaagaaaaatcgagttgaaatatcatgttcattctttctcaaaaaacaaagtatcatctttattagcaatcaaaaatagttcggtttaactagttgttttaattacgaaaaaaaaaaaaaaatttatctaaatatgaaaaagcttagttatagagaaacatggtacttaagtctaataaagaattaaattgtgagtaagcgaatttggaaaccaataattaaaaacatttatagttttctcaaaagacttctcatttttcatctaactctaaccacgtttgaaaagtcaagttgtgtcgagtgtttaatataatttaactctttcaacgaatgagcagcaaatcattgaaattgtatatatgaagatcatcgtctttttgctctcgtttatattcatgatgcttcttataaacaaatcgtgatttattacttgttagttaaataagaagaagaaaaaaatgtgatttgaaatttcatctctattaacaaataacaataaatagtagttcggtttaacttgttgtttcaataaaataaaaaataaacggttcctcaacatgacttggaaggagaggaacaaccgtttgcacaactatgtctcatccacgatcctcaaggttttcaaagacgtcgatagacattagagacacaattttagctcgtcgtaaacatccatcttttgcaaatctgcttcaacaatggtttgcgcatgagtaatctctgctttttcacaacttcttttcataattaggctttttaatcttctttttttagtctaattgtaaccactagctacgccaagctcttgtaaagaaattgttccttttggtaataatatttacattttatcccaaaaaaaaaactataattatgaaaatatatcccggacgaaaaaaacttacttttagagaaacattgtactaaaattctaataaagcagcaaattgtgagtaagcgaatcgggaaaccaataattagcatcatttatagttttctgaagagatttctacttggtttaccaaaaaaaaagaaaaaaaaaaaaaaaaaaaaagaagatatatttctcctttttctcatagctctaatacgcttgaagagacaagttgtttcaattgttcagtgaaactcttttcaacgaatgaacaaaaatcattgaaatcgtatagaaaatggctgaatgttttttgattggtcaaaggctgattaattttataatgattaacaaaaaaactttttatgtgaaagtttgacttctttgtctacagttacgtattaggtgaatcacatattcacatggttttcattgatttataatcgataatttctagaaagattcgaaacctaattttttttaataaagctttaataagcaataatggcacttaatgaatctttcaacaaatggcatatggagacaggtgtaacgtctgagaatctgaggttccttgcctaaaaaatcaaaacttgtggtggcgaatcttcacttaacgcaaaattgtaaccaaaagctattaggttcatgcaagataattaagtctaatcaactataatacttaggcttgataacatggtttattttattatttggaaaagtaatggtccagaagaatgttttatttgatctcacgagttgcctcgtatttgaaaattctttgtatttgaaattgttctgaaagaaacatttatattaatatgtgtatgttgactatgtacacggatggagaactgagcgtaaagtagccccaattttgaaatcgatgtaagatataaactttttatccattataggttttaaaatattagagagataaagatggaaacaaagtggaaaaataaatttcaaaaagaaaacagtgattaaatccaacattgcaatgctaaattttgaatgtgaaaattatggatttaggtcattcactgaattttctcatttattttttggtccaacgaattctcaaatatatgaaccttcactcgtaacctctttgataactataaacaatctatgtggtttgcaaaccttgccttgtataagtaatcaaggatttctatagatttcggtttatatttacctagtcattgacaaaaagagggaatgtgattaataatgcccttaaatagttaaataaatagtaaaaatctaacaaaaatttatccgggatagattttagattgttatgccttggaatggttatgtatatatatatatatatatatatatatatatgttaattagtagttcaaaacaaaggaacacctgagtgaaacaggatttcaatgttttttttatcaaaaaaaaaaggtttttgatgtttatattatttctttccgaaaggtttgtagttctcaaagctatatataggtgttatggtgtgaagactgatcaacaacaaactgataggtgattttatttttctgtttttcctttacttttgagtttggtgtgtagtagtgcaagtttgagtttggtgtgtagcatgaacaaatttgataatttcaagttgaatatattgaaatgaaagtacctagattgttttagtagtctttaacaaaaaaaaaaatgttgcaatattaagtatatgttagtccatttctacgcccaaatttccatgccgatgaaataaaatatagtgaaaaatgtttccttttcaaagctacaactcgaaaatatagaactgccacttaaataaaatgcatgtgtctttttcgcaaatttttttttttttgagcaaattccgcaagtaaactaaattgagaaatgaaggtcatcgggatataatctaactaacattaaataaaaagtgcataaaatatggttaaaataaaattttgaaaataatgaaaacaagtgcttaaaaataaggataaacttttaatataaagactgtataaaagtaagatggaagaatttgtaatttgaagttgggaaaacatagaaataatatcagaagctaaaagaaaataatataagggcgggtcatacaaagattgggtatctatcttaacggagtcaaatggtgctttttttaccattttatgatcatccactaaatctaaccaaatttgaataaaagaaattaaaactaaaattttaacggtgtcacatgacctcataaagttcttacttcttagtggatccgctcatgctcctacgtcgacgatcatctagtacattctcaaacctcttctctaggaatatggaatatcgaaacaactaatgcatggctttattgctaggatcagtcttaaccgataagctctcgtcactagatatcaatcattctcttcggtaaatattatataaataactggaaagtgatattgcatgtgatttaaaaaaaaaataacaaaattttgtacatattttatataaataacatgattttggtattatatcatgtttatcatgttttgttttttttaatcagtcaatcataacttataagtgtgctttattaacatgttaatcgaacaccaaccgctacccgggacactacaatgatacaaacccaagcggcctgtcaagcaaagatgacaacgaataatcccaaaagaaaaaatagtatatgagaaaatcaattagtttaagagtaatataccgtaaaagaaaacaatttccaaaactagcatttaatgcgattgaatacatcttctccgacaagaaagagcaagacacttctatcaaattaaattcaaaggataattaagtgaccgacctacatgcaataatccgatccgtcgaccaaactatacaattacccacatatacctctaaaaataacagtgtgaacgaatctcttctagctataactaattttttacatttgttacacgtctttattcgaagttatcacattttcttcttctggcacctttttgtatttagaaatatagatatacgcccttcgagcaaccaaaaactgactgcaaatactaggaagctcctcactacaatcttgagtagatttcttaaagtacttgagcacactcttttaagtatgatcatcaactagttcaactcacaaatagcagattgaatctttaatctcatactatctttggccagattcgacatttaattacaaaaattcgctttttgaaagtacctagttgttacaactagttgttgcaacatgttagtactcgtttaaaagacgttaaattggcgtatgcgaaactcatctacatcttccatctttttcattttaaagttaagatctcccatttacgaacatcaaaaccacaagaacatttttagagtattaaatgagaagatcccataagaagttggttgtgaaaaaaaaaaaatcccatacaaaagttggataatttgcacatcattaccatataccaaataaattacatattatatgcattgatttattttgttggtgtcgttttcaacttaaacaacacgtcttcctaattctagtattttcaactgtagttttgtgatgacattttgtttttttctaaaacgtggttgcggttatcgagagacagaaattaatttctgaatcaaggacacaattcgagaagataattctaggtataggatatcaatctgcgcaatatatttaccagaaaagatttatagcgataccggtaaagaaataagcaaagtggctttggcaatgcaaaacatggcaaagtaattgcccaaacgaatttcattctttactttatttagtgcaatgtctatttcactagcttatactatacgtgggaggttcatattttataaactttaggatatgatataatttatgaaattcaaagacacgtgaaagagtttggcctataaagtcgaccccacaaattaaattccacattatcaacttatgcatgattttgagtatggagaaaagtactttgaatttgtatgacaatttgtttggggaacccaaattctcatagtccacctcccaaaaagaacttttgaatttgtaactgacaaaaaaacactcaataaaataatgaattcagagagacagcaacaacaaatctaaaataaatgtaaacatagactgttatgtatttgttgagacaattaactctgaataaaatggacggtgtatcgttaagtaactttagtgccgacttctacgattaataatagtcacaaaataataaaataagtttagtttaaaactttaaataataaacttggtgttacaaatatcactaaagctcgggatcttattttcaggtcatatcaccagcactcagaccctatcgactggagtagttcaaacacgactcaaataatactttagttcattgttagacttgtctagtctttgatattgattgatttaatgtttgttacatttatttcaaatgatttatgaaaagtttcaatgtcgttgacaaacaaatttcaaactgtttggttgactaagaaaaataaaattcaaagtaattaagaaaacaatttatattcaattcaatttatgaatgttaaaacgtttggatattcatcatagtgaaattttcttttgtgtactacatcatagtgtacagatattcatatgtccagtaccgtctctcgatttatacatatttttttgtactactaaatatagtattcaacaaaaacaattgcattaaaagtggaaattatatgtttcttttttttaaagggtttattatatgtttctatatggtcatgatataacatgcgaagatatttttcattagaattatatccatttatttaagttttaatagtgaatcaaaaatagttgatattcgtaaaatatattaataagaacattctccgacctccgttatgctttacaaaatgtaatgttggagtagcatggtctaaaaggaaagggaaactactagtggggcttattgggtgctccatgatcacatgtgtaaggttttgatgcatgatttgctcggcccgttatactttatttgtttaccacatctttgctaattaaccataagttccgaatgtaactctcgaccgctatttttaatactacggccaaaaactcgtgttattacattataggtattaaaacgtttccagggttttatcattccgagataagggaaggatataattttctgaaatgctgcaacaaaaccaaactacgtactaggattttagaagctgaactaaattgaacgttggtaaatttttctttgattgccattatcaaaatcgtcacgaaattaacttcaaccttactcctcacatttttcacaactcttttccttataccaaattttctaagaagactcttgggattcatctgtagacccattataaacatatggcaaatatttggaattatgttgttgaagggaacatagtaaggccctgactcctgagaatgtctctcgaaactttggaaactacttagaatcagcctatatatggcaaagtcggaggtgaataagattggctaaaggcttcatgccatgacagaggagagttcgaatgaagaaaatggcgacgaatttaagaaaaaattcaaagcctctttaggttaatttgtctaagttaaggtaccatttgtgtccacatatgacatatacgatttttgttctagttgtatatatatacaaaataaatcttatgggctgaatacacattcttatctactaaattaataaaatgacaaaataagcaaattaaagaatcctaatggaatgttagattctacatttgaaaataacattaaaatttaatcttgctaaacaaatttgataagaaatagatgaagatgccactcgtgatgctaacgatattcttcatttagctttacaaaaagatgtgtctctttctaacactttgttctttaaatctgaaggaatctacaataatggtccatgattccatatacaatttaattcatttagtactactacattatcaagtccatgtacaattttaggataaaacggaatttgaagataggatacatctaatcttttggccttttgaagatgccgtgaatatattttagcatcaaatgaagatatatcgacttgataaaaccgatacatcaatacaaatgaagaaatattagttttcgtagttggaggaaggtttaatttgatcatatgatttgggcctaagataatagcccattaagtataaccaaaggcttaaaactaacttagtcaaataatccgaaatttggcgggtcaaatcttttaccgtacgaatcgaaaaaacaagacagcttggatcaaaggtgaacattcatccttccttacccgacaaatttactcaaaaatccgacctaaagttttgatttttataatcaaatttcctcgaattgctcgacaaaagtttattcctttaccatcacaatttgtagtttacccagatccttttctcctctgttttttctttcgcattgttatcttcagtgtctgtctcattgttcccttttcccagaagctgaaacaaatctgttttttttttttttgttttgtttctgtgaatcttcagatcttgatctgagagaccctacaggttctgtttctgctctgcgattgatttaattacatttttgattgatgattataactaacaaatcatgggtctacatttttcaagaaaaaaattatgttaaagaaatgtttttgctaaatctgaaatgtttgtgaatatgtttctctaagtgtgcttattgctttatctgcagattctcttagtgttttggttcactggaatgatcaaggatctagttatgtagaaatttcttagtttgggagatttcatgagattgctaagagttgagtgatactaagttcaggattaatattgtttttgagaagaacacagtcaaagatttagaaagtgatgtgattttttgggttcacatatgttacaccgtcttagatggtttattggattgagtaaaagaagtagagaagccaagacgcttgatgcgaaaccttacatatccaaggttaagccagtactgatggttgacacggttcaagagattgcgatttatattcataggtttcataaccttgatcttttccagcaagggtatggaacatatttttatatatatatatctttatacttcaacattgttttgaaagcttctgactcttttaacttcatcagatggtatcaaatcaaaatcaccatgagatgggaggatggtgataacgtaactcgtggtattccttcacgagtcgtgcaatatgaaggtaatactatagctttcttatgaagaagcatgaatgcctgagatcagtatcctataattactatctgaattctgtattattagagaatttgttttgagtagaattggatattgaggattgtttttttttgttaaagctcctgattccggtgctaatgactcatatggagtgtggaagatagttgataaagataatagtttcttaacacagcctttccgtatcaaatatgcaaggcaggatattcgtctgtgtatgatgatctcatttactctgccactggaacgatatgaggtaacaatcccttaccattatgcattccattgaaatattctccgaaaggaactgaatgagaaccatccggcgtggatattgcgttcctgaaaggtttgaaatgattctacgtatgcaggggtcagctacatctgctgctatattaaagtttgagctcatgtatgctccctctgtagataatgcatcagcgaagcaattagatacttctcctgttgcagttcatgagttccgtattcctcctaaagctcttacaggcttgcattcatactgtccagtgcattttgatacacttcacgcagttcttattgatgtgagtgtccacatcagtgtattgaaatcggctgcttacaaacgacctgcaagtctatcaaggtttgtcaacataatgtttggcttcgacataatttactataatatctgcttaggttcatatttctatttagttgatatctcaaggtgttttgatgcagtggcgtaagtaacagtaaaaatgtcagtggcagcagtgctcagtcttttaagaaagtatgtgataatgattcagtactcggtagtttaatatttttgcagtagactagattttaaagacgtcttattgattggttgccaactttttaattcactaggcacttggtttgcttgcttctgctgacaagaaactggtgtcatttgttaaagcattacttggagctcgtggtattttactcgaggaaatgcaaagacttagcaaggcagttggtcagacaatagacttgtctgactttgtatcaaatatgaacaatgttcagttatctaactcaacaagtaccggttcaggacaaggcaaggaacaaaacagtcttgaggtccttgctttaattttgatgctgactggtttttttccgattatttttgcgtcgttttcttctgcttatttctccattcttttggcacagaatttgaatattacatttgatttaacaagtgatgactggcttcatgaactctcgaaagatcatctatcccgtatattccacttactgggcacccaactgcattatctttggaacacacttctgggatttcaccggtaattcttttgtacttcaatgatctaattaagtttcagaccaagatcgtttctttatctatctactgagagactctgaaaatatcaatattctaggcatttatcgcatatgtcctttttagggataatcacacaaaaatacttgaatatcttcgtgatatctggactaaagatcggagagctgaatggtcaatatggatggtgtactctaaggttgaaatgccccatcattttataaatagtggaatgacagatatcttaaaccagagcgcgcacaaaagggcctcaggcgtgttgaatgaagtgagtttagcgttctctctctatttatcaaattttgtgaaaacacaagcctgactcatccaatttttgctttgatgtagccggcccaaattgcagctacacgtgctgaacttcaccgtcggagtattgcacagatgcgggtttgttcttctctttttgatttagttccctttcttggttttatcaactcttagtttatttggtcaatacatttgttggtgcagattaacaaccgttcaatacaagacatgcatatacttggagatcctatgcgggttcctattgttatcattgaacgtgtcttgaatgcaccaagacgcactttaagtgataattcgtatttgagacatatggatctgcttgattctagcttgctaaatgggcacaaggatgaagcagaaaaaacaaaagtcactaactcccagcaaagtgcccgtgaactaaaaatcgtcgtatttgttcatggttttcaggcaagtatcactgaactataatagcaattttcttaactagctttccttttgatctgtttttcgcttgcttgatcgaaatttgctcatattggttaccataggggcatcacttggacttaaggcttgtccggaatcagtggcttctgatagatccaaagatagagtttctcatgtctgaggcaaatgaggagaaaacacatggtgatttcagggaaatgggacaaaggctcgctcaagaagttgtttctttccttaagaggaaaaaggatagatatgcaagacaagggcatttgaaaagcatcaaattgagttttgttggtcattctattggcaatgtcatcatcagaacagcaattgccggtaatattctttgaactctggtaaatattgaatgactcttagttatgtttcagtgtttttgacatctcttttgttctttcagatagtttaatggaaccatacaggaagtatctacacacatatctatcgctttcgggtccgcacttggggtatctgtacagtacaaactccttgtttaattccgggctttggctactgaagaagttaaagagtacacaagttatccatcagcttacactcacagatgatcctgatctccggcatactttcttttacaaactctgcaaggttagagaaaaatacctcaacttatattcagtttcaccacggatacgcagaactattcgtctgttattcggttctaaaatcggtttgaattctttttcagcaaaagacattggagaatttcaaaaatataattctcctctcatcgcctcaggtatgcttccatgttttaaaacttgattgtgtgaagcagttttagccataagccttgttaatgaataagggaaaactgatacttattttcaacaataatgtgactgtgatgtaatgcaggacggttatgttccatatcactcagcaagaatcgagtcatgccaacctgcttctttcgacagctcgaaaaggggagttgccttcttggaaatgctgaataattgtctggaccaaatacgtggaccggtccccgaagcacctcatcagcaaagggtgttcatgcgctgcgacgtcaactttgacatgaccgtttatggtcgtaacctgaactcattcatcggacgtgctgctcacatcgagtttttggagtccgatatatttgctagatttataatgtggtcattccaagatcttttccgctgaattttgtaccaagttgaagaaattttgggatttacagagagatataaactgttgtatattaactttgtagatagttttgtctacaattgctgtcgcgagaaagaaaaaacagatagttggctttacaagcaatgttgtacgttcttgtagatatagatagattttttttttttttctttattttttgagaagaaatataagcttgttttgatgttactcaattgtaggcctggcataatatttgatcttgaaaaccgatccgaacacgtacccaagttttaaaatattataatggattctaagtttcaaattctgaaaaccgaacaagtatctgaacatacctgaaatataaatatattgataatatttgtatttgtaataacctaagtgtccaaaatattcggatttagagatattttgtatattacgatatttttgctacttgtgaataggtttaggtaaaaataatcagattttttttatacattttggatacttttaagtagttaggatatatttggatacaacattttttggatactttaagtaaacccaaacctaaaatacccaaacggattttagatttctaaacttgaaatacctgaactcaaaaaattgtgatccgaacccgaacgaccagacctactcttttttacttttaagtttgcgatccacacccatgggctagagttgggccatgagaagaaacttgtgtactactatacatcatgtatacgtttttctcttttaactctgaaaactggattcaagattgaaatcctaacgattctttctcatcaaaacaaaattcttttaacaattgtttttctaatcaatacgatcgctcacaactgctttctagcatatcttcatttgatatgctcatcaaaaaacttctgattatagtcacattacgaatccacttcacaaaaagagatatatttatattacataagtatatattttcatagataacatcctcactattgggtcaacatttgggggataagatgttggatttagtgagtaagacttcatgaactgtttgatggagattgttttttttcgttgtcaatttatcgcaccacagaggtgactaatggtttcgttgatttttctggattacttatcttcggcttctacttccagtccgcttgatttaaacctcaccgcgcctattgccatttctcatttagcaccaaccatgtttcttaccacaagcaaaaggaaatcacctactcaattacatgattatcactgttacgtactcattacaatccaatatatctaaagtgatgtgtaaatttgataggagtttaggatgatataaagtttatcgggtaaaggatgattggttggcatttaacattaaattatttactgtagaaaatagtctgtaaattgtttctgttgttctctaatattttggctgtaagaaaaaaaaaaaatttgactgtaaaattaatgttcttgtaagacctaatgattaaaaatgcattaaaagtaagctttgacgacaaacattcataaacaaatactgtaagcaacaaaaatatttatggtatttttaaattttgaaattcattagcaatgtaattgatctggtggtatgatatttggatccacataaaacgttattccttttatgtcagtttcttttctaattcagtagatttgggtccattttggctatcgttttttctcttaaccaatttcccgcaataaagtttgtctatttacgatagggagctgcctacgaaactcttgggccatagtttgtgtaggttttaggtttatcatcattatttaaggttctgtgcaccaataatttaggttatattgcgttgattcaatgattctcttttctcggcccatcctaataataaggggatgcatgcaattatttgaaaaaaaaaagtttgcggcacatgcatgtgatattacatgcttctatagtttccaagcacatgtgtttctttgtctacatcaagatagcgtcaaaggggtaaatagttatcctcgaaattgtttgtttctatgccaattgtcaagagcgagagttgtattgattatattcgttttgggaccaaatctaagtttagaaactttttgactagtcttatgagatatttgatattacatatttgcataattgttgttacacgttttggtaagcctagagatgatgtcaatctcaaaggatcgagaaaccataatgagaaatctgcaaaacgtatagacgtacgcaatagacccgtacgtgttctctttcaaaaatctgaagtgcaataggaccaccatttaggtattgcacgtacagctttgaccagtcaatgttttagcaagaaagctattgcgatggccttttcatagagtcagaccggttcaacactagtaaaaacaattatgcgcctggtttgaaatatggatcgtaatcatgtgcgtctcctttgtaggtttaagtcaggaatcgaatctgcgatcaactatttcaagaaaaatcttgccgtttagtccgtagacgctttcaatggcaagaaaatccataatctatgttatgtgtcttagagattagtctggatttcggtatataattcttccggttaacaaaagaaaaacaaatgttaaaatatactatatagctatactttcccattcattgttttcttacgtgagaatagaaaacattaggattctacgctagcttatctagtatgttaccgatcaagattcacactggatgaccatcattctcttggccttcgaaatatgtgatcgtggcttataagggatattgttttagaagcatattattttctcttctagaagatagattgcctaaaattttaataatgtgcgataggttccacgattcgtgtggtcttagacgacttttgcatgagaagaagaccgtcagcttatgttcgacagtggattagtctacatttgtcatatattcatgaaagtgaaaggctattatagttttctcatccttataattacatatatagttgatgaattgcttttcttaatactgattttcgttaaaaagatcttaaaagaatatcaccaattaatcaagtgtcattagctcgactagaaaagcaccaaagacaaaacttagaagtcacatattaaattgatacttgaaaatagatcagaatgcatgtcctagtctccggtataaaagattatacgggcctaggctaataatctttaacacaagttaaggatttttttaataacatgaatcggagccttgttcaactagtcagttaaacatgctaaaaacgaccatagactttggtatgccatggctcgtggatatatatcttctaaacaatccctgagaatgttttcaaaagaaataaaaattaagagttatagacaatagaaaaagcgttgaccaataaagtttaattctgagttgaatttttcttaaaagattgactaacatgggatttttttgaatatatcattttcggataaatacaagactatagatcacattccccgacccacttattagcaaatataacacaatggagtctttgaccaaaccatcaaaggcgttatcaaaacaaaacaaaacaaaaatcaaagacgttatcaaaagcaaatccatttggcaaatgtatagttaagattttggtccataatatgaaactgaaatgaatgtttcttacgtgtttctttgttcttctgtagaaagtttgtggatgcatttagaatgtcataatgtatttatcctatgaacaatttttctaattaagcataccactaacatcaacaaagcgaggtaatatagtgcacaattcaaaacgcaaaaagaaatgaaaaaaaaatcagaactattaacatgcttccttttaatagtgggttaattagttctgcgtaaaagcgaaacataaatcaacttaatctcaccgaccagcagaaaggaaagaactatgaatataaaaaacaaattggtgtgtcaaatattcattgatattagattgcattgaacaattgcagtaaatcctctataaatcaatactcgatgagataataactttttaaaaaaatatatatataaatatatgatctcattaatatcataattaaaatcatataaatttataatatatatatatatatatatataatgtatagttttagtgtttaaaaatattgaatttattgttagaattcacctctaacttttattgtatcaaaagtgtattatgttgtgttttgaaatattgtattgtagtatatattgtctatagcttcgatataatataaataaaattcttatgtaagtttcaaattttgaaaatgcataaattttattgacatagtcttataagccgttattttaaagtcattaatcagaaaattgaatttacgtttatcgtttgtataagtgaattcatttctaatcttggttaattattgttaatatgtttttcttctaaatattaaattttctggtctaagacttcacaatttgttttatctattagcactagtgacaacccatattttatagtaataatttaaaatataatagtttcgaaaggaggtaataacaattaagtgcctttatcttacatttttacatgttcatattgtataatttatgtaagatatcttttgagtttgatgattttgtgtgcaacgaatgataactcgccattattatttcgatatacaacatttgaacgcggtggcaaaagagtggccttcttttcttatcctgataagtgataaactgaattttataatttactttttttgagtctttataattgacttttattttttatttcaataaaataggataaagtaataacgaacaatccaaagtgagtaagaaaaggtataaccattggtaaggattcatccggacggcagagccaatgagttatgtttttcaaatatttaatcatatcctattttggggcatgcttaaggcgaattaaggtcggttgagagagaaagctcatgcatcacgagttccttttcttaatttcaacgaagtaaatgtttaagaaagagaataaagttttcttaggtagtagtttatcatacatgtcaataattaagaaactatatcaaaagattatactatataacaatcgtacatgtcaataaagttttatgaatatcatatgtttttaatcttcgtcggcatttggcattatagatttttaattatgataaatacaatatatgaattaacaaccatatggttgaacattatttgtaaaataaccataaagatttttttttttttgcaaaataaactctagcgagttattgatatatagccatataggtggaaaacacatgtaaaacttgaatttgacgatagctaatttttcacggatgaatagagtttcgatctcgacatgcttggtccattggtgacctaatgaatttgaggaaaagtagatggtatataagttgtcacaatttacaaacactattgttttaacgtaaaagaggaatgcacgttccaagtggcgtcagaatcaacaattgcaacaatcttgcatttaacctctttgtactcaatcatgatatgattagttgctgctttgaggagcagaaaatgagatttatctcatggttggaatcatgagaagatgatgttgaaaaagtaagtaggtgataaattggattgtaaagctattattttacaataaagggaaatcaaacgctcatgtctcggccgggtgagggaccctgcctattctctttctcctccaaactcgagctttaccacacgcgacatttatagacttgacatctattaattcgatttttcttagaacacaaacttgtctacgactctctctactctctacgtattatgaactatatttatatgtttgtgatgcttcatgtggctacaattgaacgtttgatccagacaaaaacagtaagaacatgtgattgatgtacctactccactttattattgcatacttgccatacttattctaagtatacatgaacatatatcacctttcggatctaattctatgatgtataaaaatatgtcatatattagatataataaatgctcacctcctaggatagtttgcagggttactttgcaaaatgagagaaaacaaagagttatttagggaaatgacaagtatttaaattgttgcgaacataagagtagtgttaaaaagtacgtagaaagaaaatgtaatgcataattatatcaaatgacctttaaaacacactccctttgttttgaaataatgtattttcttgagttgtcactcacacatatgaaaagttgattataaaagtatctgtttttttttgtgatttacaattttctataattctactgatagtattcaattaattttcttaaaatttatagagtcatcaataataactaaaaaatattacatagaaaatttaaaaactcttatctttttgaaacaatttattttcctaacaaatatatcatttagaaatccataatattttagccaaaatagcaaaattcataaataccactaaaaatggcaaaatacgtaataatcctgtttactgttagtattattattttctcattttactatagttttccatatatagatataattaactgtgtacagtactgaaaaacaacttctatctacaaaatatactttttttttaccgtggttaatcatctacgtttgatatctttaaaatttcgaaatagcttcaccagtaaatttagaatgagtatgattgacctcatagtgtttaccaataaaagacaaaaaaaaaaaaaaaaaaaaaactattcacgtgtaaataataacaaaaggtagatgtccaaaacttataatatagaattgtcttttctttcgtcataattcaaaggccaatgaaattcgaactttttatcgatggccaatgaaaatcaaagatatttcagcaagccaatggaattcagtttactaggctttacttattttatttcttaaaaatatctatagaaaaggaatatcaaaggttgaaaggtaattcatatcgtcgacacgtagacgcattatcgattccactcagttttatttcattttcttgtcatatttggttttattctttggccacatcgctgtgaagttcgtataaattcatgttctggtcccaggacaaaaaaaagtatacataaaagaaaagatgctttctctctgctcaaaggaaacaaccaaaatcaaaataaatgtgatctcaattaaattttaaaacgtatcgaatctcaatggctttgagacaaagaatatgatagaattaaaggaaattgttttccatttttggctacgaatataatttccttttatggaacatggaaccaccaaaagctcaaaaataaaacattcatcttgcctgtccttaagaaaagaattgattgttaaataagcaaagctttcacaacacaaatacgaatacaaaataaattgcaaaaaaattaacctattatggaacatttttactgtatccttagttattctgattgtcttcggccattaggtttgatctactagtatggtctttctctagatttcaatggcctagacacgtctagtatcttggaatctttttatatatatatatatatatatatatattaaagttgtattgaggttaaatttttcattttgatttatacttagtttttgtgacaaaaataaaataaaataaatttattcttagtttaacaaaaaaaattcacattctcctagaaaatggacaaatatataaagataatcaaaccacgagttattacaaaagggaacacataaaatacaaactgctgaagtcaaagctaattagaactatcacaccaatacaaccataaataacacaaacaccactaaagcccacaaaacaaagtcgttcttaaatcaaaaagtagaaattaaggagcactataaactccaaaaaatgatgacaagaacatatatgtacgtcaatgttgatggcaaatgcctccagagaatagctatcaatctaaaccaacatggttctcatcatatcttctgtaccggaggtagaccggctctttgagcttgcgatggggagaaggggcggagactttccgggagtttgtgacgtcagctcttcagctctctcggcttggactttccaatctgttctcaaaagtgcacacaacatgagagaagcacaagttgcttgagctgcaagcaacccgaaccagagacctggaaacccttgtttgaaaacaaacccaaacagaatagcgactggcatgcccacaaagtaaaatgaacccaagtttatgttggcaccaagtgtaggtcttgcacagcctcttaaaaccccacaaccggttgtttgaggacagtttccgagctcacataaccccacaatgggtaatgcgatggaagtcagctgaagaatctctgcatccgtggtaaacaagcgtccccaatggtgcctaaccagcacagcaaacaccatcgccattaggcctaaggcgatcgcgcagaagagtgagatgatcatggatacccgagctttcgccggacgtttagccccaagctcgttgctaattcttgtagagacaccaaggctgagagaggatgggaagacgtagaccaaagccgtcgtttggatcaagattcccatggaagccacggtggctcttgggttagccaaaagtccacacaaaatgatcataaactcgtaccaccaccactccaaacaaacagatacacaagtgggtatggcaagtgagagcaaagccgaccaacctttaagagagtcaatagtaattgggacccatgtatcactatgcacgctagtgaaatacacaaaagaggataagaggactacaaggttgagatttgtcaaaaccatagctatagcgactcccgctactcccatctcaagtttcaccactaggaggtagttcaaaggaacgtggaggagaacggacacggccgtggagtaagtcacgggcaatgtaatgttttgtgttcggaggtaaattcgaagagggtgaagcagagagagaaggaagaggtcagggatggcgaatagaaggaactgttgagcaacagaggagatctcttcatcttggccgcaccataagaggattcggcgcatgttgagccacgagaaggagatagggaccgagcaggagaggagtaggaggacggttctttgaagggttagtcctaaaagcttcatttgtttagctccgtatgcttggccacagattggttccatccccatggacaaaccggagatgacggagtagccggtgatattggcaaagcctatggagagagatcctccggctaactcaagctcaccgaggtagcctaagaacagcatcgatatcatcgctcttgagtacataagaagcccggtcatcgccgtcggcccagagatttttccgatcgccttcacttcctctaagccctgccgccagataattaagaaaagaaaagtcaagaccaagaaccgtccacgtcagtagatcgtttttttcttttccctggttaatggttaattatattaatcaaataaagcttatcttaaacctttataaaaaaatgacaaaaccaaatcaccaaccgggaccaaagatttaggtatatatataaaaaggattgcgaaactgttgtttctatttatatatatgtatatgtatatatgcttttggtatagttcgtacaatctagttttgtcaagaactagattcttgaattattatgttcatatctatgtagaaaaaaacaaacatttacgtataggaaaaaaaaagaaataatttacctccagaaaacttggccatcttttaaggtctagagaatcagtatccctgaattcagaataatgaggattatctgtatcacaggtttcgagttttgagatatgggttttgtctttacaagataataaggaagatgaagcagaagatggttttgaattacacatgattcttaagaggagtaaactggttttgttgggagtagagataaaaggacaaagagacaaagtctagagcttttagtcttttggaggcaaaacgattttatgcaaatgataaaaggaaccgagaggaactaatatttttaatatggaattggttgggccttttggaggagaaaggctgactatttatagttgtaaagaagcgatatcgtttctacacgtggcgaaaattagttttaatttctttttaacaaagaattgattttctaatagggaagtgggactttttttgtttgctttgactaaacaaatcgtgtgtccaccaaataagtctgtgagaagaacgacacacaggtttaggatagctcaagagttcacttttgaagaaagacataaaaattggtttagttaactattttaaaatacatcgcattacctttaataatagcaaatctctttcctaatctttaactcaactttgggcttcactatatattgaactctttcggttatgtcggctggcgaattcacagtcgtcctaagtgctagaatatcaggctgttgttacctcttaggctgagaggataaaaagcatttattcaataacggttggtcacataagttgatggggttagtacttgttttgaaaaatacttgggtgaacttttttattctagccaatcaaaatctaccacctaataaataatattaaattaatttaattagaaaatataatttgccataaaaaaattatatatcagttataagaaaaagttaagatttcaattttatgattgatgagattgaatatcggtttgagtttataaacagatttaaattttacaattaaacaagtttaaatattgatttaggtttataaaagataataaaggttttaaattttctaattaaacgagattatatatcggtttggatttatataatagtagttaggatttagatttataattaaatgaattttacatttttatggcatttatagatattgtatgctatttgactcaaattttacggatttacaatttttatacacttaacaatgtatatacatttatgatttgtttttgctaaaacacatactccatagcaaatattaaaaacaaacaaaaccaactaaggtcggtcctattaatatgccaattttgcctctctctttttttttttccttcttttttctttttttttctttttttttgataaaaaatgaaattttatatcatttgtgatttgtgacacaattacaaattttatgccattttgtttttctttaattccgctgaaacatttagaaacagaggtcggtcctattttataactccgaaaattttaaggttaggtgtaatgatgtcaaacaggaaactgcactagattagtctatatactttctgtgaagataatcctttctttttttgcactaacggttaatttaagttttcctagtcaatcaagataaaatttaagtttttcctatgtctaaaatatcaaattatgctgtaaaatggcatgagatttaatttagcattttcttccaatttcaaattgcatgtctattgcaactttagcatatataattttaacatttaggtttaatgaatatatgtaatgtaatgtaatgttaaacactattatgcagaaaatggcttgaaagcatgttcattgccaccataccatgaaacctaaaaactatttaaaataaataaatctttataaaagtaaatgtaaaatattaatagtaacttatttattatatataacttattaatgttaaaatagcttgttttctatcaaatgattacaattaattaaaacgttgtatcaatattttaccacaacatgcaatttcatttgttgtatatgtttttggcatatgatcattttctataaaatttggcgtgaaaaggatcaaaaccgttatcggtagatcagcatttctattgaccaaatttctcacgtgtatgcaaaaatatatcaagtagactaaaggtcttatcgcaaattaaccaattctaaatacttttcttgtacaacgtaactataaatactttgtacaattgtatgacgagttatttatggcttaatatctatatggtaacatgtgttgggagtctgatggtgagggaacgacatgtggagaagaagagaaattaaggcaacggagaacaactagttgacctgcacattttgtgattcatatacataatacatgatctgaagctataatttggttttggagggggcaaagtttttccggagttaatttggttttaagaatataacctttgtctagtaaatgaggatcgtatagtatttgtactaacttgaatttgaaaaatagttgtgcgtgttgagatgatcaaaattattaatttgatttttcatgtatcaccaaagtgtaattaactttttcgtgactcattttgaaaaacctacacattaagtgtgtctaagttagagatatctaaagaaaatgacctattataaatgattattaatatcatgagatgtaaaaacacgtatttttacgtttgtggtgaaatatatgaccaataacaagtttcttagaggtttcaaaagtttgacatcggtggtcagacgtggatgaagcctacgggctaggagtgaacagaaaggtccacaaataattgtagtcggatctttccaagtgatatcataaccaaacttagatgagcgtcaagcattgtatgctcacatcgtttgagggtaatagtaacatttttttgcaatatgcaatacgttttatgagtgaagtgattgtaagacttttttaaaattgacgtttgcatgtggatgtctaaacaattggtattttttttgatcgcaattttttttttcataacctgttcctttgttaattgtgtctaaactgtagtattataggatggatgaactatgattttcagtacaacgtaagtgaaaaaacacacacggtgaagtatctcttggtgctttgagggacaagtaaagaaaattttcaggtttcattggctgccagacgagaatgaaaattactcggtgacctatattggacattatgaactaagaatgagatgatcagaagattttgaagaagagaagaagggaaaccaacaagtgtacttttggagaaacgagacttatgatctgcattgatttgtaaattgacttcttgaataatatttagtccctctgttagtcttggataagtatgtttgataggaatattttccctagatctaggactcatgtccttagatatgtcgttggattgaccctccatgccacaccggtttggttgttggtattaaatgagaagtttgtgacatggtcggaattttttccgtttttgcatgttgcgctaatgtatatccacattgaatatggtactgactaggaatgtctggaaaagatcttgacaacatcttcacgtctacacacttattgaactatgcatgtttggattatccatggtatttttctagtcggactaacgacgtttagttattaattcatggaaaattgcatggttcttatgtggagacttaaaaacatgtcataagagcatgatcaacattcaaacattatataattaatgtgcatatccaactcttttgaaatggacatttactctataagacagttcacaaatgtttttaaaatgatccgtgtcaatcaacatatagttttgttatatatatatttttaattaaactattttttattagtacttaattcatatgctgctgattacttctagtaaattgcataacttagaattactttgattcaaactcacctaatgttggacttcttcttaggtttatgcaaagatagatgcatcattttttaaaagactcattttaaaatggtagatctttttggaaatatgaaagatccttctttcagtgtgactaagtagttccaattagggaaagagacaaagggcgttatagtaaaatgcttggagaagtggtggctgtctcgtgtttcaaggcaaaaacactgccattttttgttaagtagtgagcaacaaaatccatgtgaacaaaatcaactctcttcttgtctgcacaaatattcaagtgtcaagcataacccataacaaccagaggacatgcttctctcattttgtttatctttctggtcccattgatttgatattttttctctttcgcaatcgaagataagagttatcttgaagatagcaaggtgactgtaaaagacaatgcaacgagaaaattgtgttattatcttcgtgtgaggcaaaatccttatccaagttggcttcggttctgaggaactcgttccatattattggaagtgacatacaccagaaagattggaagtgacatagttgtttgatatgaagatgctatgtttttttatgtctattaaacctaagtaggttagaactaatttaaatgacgcaactaattttctgtctagcatttgaaatgttcaacctataagacataagaagttcgagattttatattgtcatttaaatgatggctagtcacaaaaagaatttttttatcttccacaaactttcaggaggtaacttgtagaatcttacgatgacaaaaacaatattaagaaacaaaatcttgggtgttgcttgactatttggacccgtagtctattgttcaaatgtcctttgtgcattgatataattctaaataaatgtcatgcatgtgggtcacttagttttcatatgtttataagttctagatatcattatatagattttgacaaaacatatctataatagttggattaggaacagacgacgagatctacaatagcacgttaatgacaacaacatcttcaatagttaacaaaaagacaacatttttattagaaaacgaaaaagaagaataaactaagtactaggttaattgttttctatacatagagaaattcttaatggtagtggttaattatattgtcatttggggtccattatttggattcgactagattctaatatctctcatcattactaaggttctagatataagatttgtggagcattttacgaaaataattttttttttatgaaaaatgagccatgcattatttacttagttagttgtacgcgtagccccaagttacatgttgggcggctattaaatcttacgttctgaaagtattggtagagaaaaatgaagtaggagtagcatagtgataacatatttggggatatggggtcaacttgctctctgctcagattttatatcatgaaccatgtgtaagtaggttcaccgaccaggcttctataacacgtcattagtgtatgcaagtgagtaagttggtgcagtgagaaattcatgttttattttcttgagagatgtatcatgtatgtattcacaagccttgtcatcatatgtcgactcttaactattatacaaaatcatgcatgtttttgggaaaaaaaatcaaagacgtgaaaccgattatgtgtcaaaaatggtaatacaatacatacataattgagaggaacacaaaagactagcaaaaaggttatctttaaaaaatttacatatggacagacttttatgaagatttagtctcatccaaaatcttctactatctcttttcttttatcgtttcttcagttggatatcgatatttttgttatatattatttcttgctttctctctgtctattgtatcctatgtgatttccatctgtttctatgaatttacaccgtaattggctaattctcaaaaattcctgaaaatgaaattaaaccttgttctattcagtattcactaacataacttcgaacatttctaaatcgttgtaagatatttactttcttactatacgtttcaatcctcgtcatctcactttttatgagtcggtatgcttaagaaataaacgtaagtagcataaaaatataacgtattaaatcgtctttagtttctaactttgtataataggttaataaccatatatttatgtatgatattttaaggtataataactctctccttttcctaaaattttcgagtattaaagataaagtatgattaattgaatgcttctaaaactctagaatgtaacgtaagagtgaccagcgagtggtatttcttagcttttgtagtctcagcagaactccataatagcagaatacgttgcagacatgcaggtcattcttctgcttcagtgtggaaattttgatggttctctttgtcttttttttttatttaattttttttcttttacttgaacgtgagaaaaaaaatacatcattatttcaaagtcatctagatgcgaaagactactcgccaactagaatattaaaccagcttggatatgcttctcatggtatagagttgatgttaacaaaactctataccgattggtaaaacaatattttttgtggagatatgcattccaagtaggtagcatcatataaaatttaaaaagaaaagtggtgaggaagagagaacacgatccactagcaattattatatttgtgaacagaaatgaaattggttgcctggaagagatagactaatttctctgccttgcttctggggacaaaaacttactggggaaacaagacaaaagcaaatcatatatatatatatattaaataaataaatatacaaacaaaagctgccttatcaactatcttcactattttcttctttcctatccattcttcttctggaccgtggcgaaaaaactgtatatataaattacaaaagcttgagttggtactgtaaaaaaacacttatccaaaatatatctcaactttatattcttaagaattttgtttcgtcatgaaattatgtagaataatatgttatcaagtacataatatttaggaaaaaagattacccgctttacgaattatagcagaatatatgatcatgtcaagtatattattgtatatttagctacacgaagtattctcctataattcgtgtagctaacaataatttttttctaatatttacatataatttaaaaaacattagcgtaacaaaaaagaattaaatttacttatttagaatttttgcttccgtcatttaaaaaacaaaatgaccatttctgcacttgtttgattaaacaatggtttttttttttttttgaattttaaacatttgtttcctattgagacttgcaaaacatgttggaagagaatcgataatgatcattagaaaattatataaaatttgtggggtggctgtttgaagtttcatggtaaaggggagagagaagacacaaaaccaaacagacattagtgggccaaaaactgaaaccggctagcttcttcatacttctagtcttggacatatcacatatgtattcttgtcgataagcaaatgtggaagagaaacagtatgaaagttgtggccacatagtgccatatcagttgtggtgcgtttttcttattatatttctctcttatatatgaggaagacaaattgttctgatagtggagatcaagcggagtgatactgtcggcttcacaaaacatccacaatcaaatttaaaaaaaggaaattattcaaaagtgcaaagttctatacttatcagaaggttgaatattatatacaatagtagtgtgtaaaaatgtgaatgtggtaagacaagggttatgaaaaggacgaaaaacaaagagaaaaagcatacaaaaaattgtccacaaacttgtggaacaaattcgcagaatccactatacgtgtttgctgccactttttgtgataagttatggccgaatattaccattatttgcctggctgtttcaaaattggaacactatctttgttttgctgacaaatacaaaagctcttttttctttttcttgtttttggttgcttttatgttgtccataagcaattcctcaaaattttagcgttttgccgtttacgtgtaagcaaattcatatttatgattatttttttggcagttgtgatgttgagataataaaaagctccttaaacttatctgttaaaatgaaatcacaaaagttgcagaattgttttctccaaagctgtattttggtcaattgtagatatcagtgactgttatagcggtatttactattgggtgaattgtgtttaaatagattgtaaatgatatattagtttagaaaataattaaataatttttaatcaatatttaagaatcttaaaaatcaatcataaaaatacggagagagtagataacaatagtgttttaaaaaattgtcaaaataagatgccattgtgtgcctttttcaaataaatgttttttgaaaataatgtgatacaaatcataaaacatacttgctagcacataaacaaaatattcgtaggaaaaaatacttgaaatccaagtaactaaaaatatggagtaaatattaaacttatttacaatttgctattttgtaaacataatgtggttgttagtgcatactgtatctataatcattaacaatttgtaatacaaaaaatgtttctaatataatattaaaacatagaaaatcaaaactataaggtttttactttgttttaaaacttatttttattttgacaactcgggtgatccgatgtaacggacaccatgcgctccgagccaggttctcgattgggtcaacaagcatgagatccgactaatcttggggccagcaaaagcaatgtgaaaaatcctgaaatccacacgtttatgaaatagtttttagaatcgaatgaattgtttgtagggtacgtaaacacacaagtattgatagttttaaaaacaacaaaaaaccactcgagtaaatactagccttcggttcctaatttcccatgaacatatctaaggaccgaaaatatgaattcttggaattcatattccatttagcattgtatgtttacttgtattcgaattcaaaacaaacgaatagtttcttttttctccttctgcggattggaaaatcgaatgttagtatccactatttaatatgaaaaactattcttcttatgcatgtttgcgtactttgctttttgtttctatgcgacgacgtcctttatgaagttgtgacgctatacaatgtacatttttggaaattaatagaaagccaccgtaattatgcgaacctttctttaaatatagtgatgtgatgtccatttgcctacatccaacgcacaataatgctgtcacttcaatattttggaagaaccctaaaattattagtatctattacccgcatgtttaattttaatcaactgttggttaatagtgacttaatatcaaatatgcgtcgaaggctagctagtattttctcaagagttttgttctttattatgtcggattttgggacatatataaatagatttaagggttgtcatttatcactcacaaggtaaatagaaagtaaaccatagaagtaagaaagtatcagcctcaaacaaattaattgtttcttcttgtttacgagttttctagttttgtccgtatagtaacacaaaaatagtattatgcttaaatgatgactacaaaaatacgtgacactcgtcacaagttttgttttctataattagttataggtatatgcttaaatttttacttcgtatcatagtcatagacctatacataaacagttggttatttatggagtcaagactcaatagtaacctaaatactataaattatataatctaatataatcttgagttgacgcaactagtgtcacgtagctacaaaactaagcatcaaagtttcaaattaaagtagagatgcattgcatcaatctaatatgaagttagagagatgctctgattctgccagactaaaaagttatgagtgacaattcctgaaaagcaaaacgaattagttctcataactcatgaaaatgttgcctaaattaattcgaaacataacattaagccggaaggaattgtctcatccaaggtgtctatcaccacaactgcacatacgaatccgattcttacaagccattatggatggtttcccaatctcttaaccaaaatctgcaccacgaaaagaagcatctttaggtatcggttttttccgacagcaggcataaaccgaagttgtatcgtcaacagttttttgtcaaacccaccaatgctttttagtttttacatgtagtcatgatgaagcaatcgtgcactaagtaatgcactacgtgtggaatcgaattatgatccgttacataatgtgaattccagaaagtaaaagggttagtgataataatggaagacaattctatttcatttgtacttcagtacttgttgtgctcccatggtgcaacgaagaattggatggaattttgattattaaagacttaaagtatttatggagaatcagttttctacagctttagaagtttcaagtcaagtgcatgagtagatagtaagatggtctttttgtgttcttgccgcttaaatattttataaatgaggcaacttcatgggagagtgatcccttgagcgcctctgccaataaacactattaagttgaaaaaacatgatatttagtacctcaatattagtgaagaagattttaaattcgacggtgaaacgtgaaaaacatatgagaagcatggactatcgaaatgggtaagttaaattgttattatcactggccataacaagagaaagaaaagcaaaagatactaatttcttcattttatcctattaatttttttttttgcaaaaatggatataagaatttctaatttttagccaatagatcatatgaattaaaacatgatactgttcaaaacccaaaaatgggcggacctagacgctgaacaagaaaagcctatccattcgccaaggcccaactagtcaatatgtatggaaatcaatgcctactgagaactgcaagtaatcttaatataagctacatgtaacaagagcaagagctagaagacttaccaccaacttgaatgccatgaattgtaaaaattaattttgtgttacggtaagttgtggactgtattgtttattcaaaggcttcttacaatcgaacataaagaagaagacatttttggggaagaaaatgaagaaagggatagaagattggctgattaaataaaccactatctttcttacatcattcatcaaaatctgactatcatttacaaagtaggatcaactctcactagagaactaaaagtacgatggcatgaaacgtaattacatacaaaactcatgtccaaagcccaaacctatacataagcactaccggatttgtttttattgtagaacaaatgttgttcacttataagaccaaacctgatttcgaaatacttagaacactcaaaaaaaaaaaaaaagaacattaaagtcctagcaaagaactgtttctctctacacacctaaatctctcagccggagataaaactctccagcggctcttagcagcttgatcgactgccgtggattcagaacctccaccactttcccaaccgtcacacaccggagttgatcagcgttcttcatcgctttaatcatctctaccttcaaaacctccattgcatcctccatttctggctgctctccttcgccaagcctcaacactccgatgcgcctaaatggaaccatcagaagtggatcccccacgctctgttgtagaagcgcgaaccttcgcatcaaatctctctccctccgtttagtctctaaccgaatgctctcgagttggtctatttggtggctcgtaaggtcattaacagaagtggttatgagcttaaaaaccatacctggtttaaaacctccgatccagaggatgagtttctcgtatgagctgagccatggtggagagaagaaatcatatatatcgtcaccggccacggacatggcaactgatttctcttcgtagtattggagatagtgagaaagaaagttactcacaagagattcttcttctattggagttacaatggttgtttcatcagcaaggtgtgcaagttgttggacgaattgcctgtgacggcagagccagtcattgaagaagctcgcaaaagtttcagagctgctagtgattggcatgactcatatatagttccaagtgagtcaatgaatatagacgagacatgcatgtgtgtctgtttaagtatttatataagacaaagacatcatcgttaaaaattataggtcgattttggtgaagttaagtagtaattagaatgtttaattttaatagtaaatgggagcagtaagcggtttcagaatggtacaaaatagtacaaaatgtacgatctctcatacagataatttacgtaatttgaaacattttagggcatgtcatttctaggtaaatttttgtttcttatagagacatccaaattatcaattgaatatctaaattacttcaacaaataaataaaaaaggactgggatgtattatcttgaccatctacttatcatctaaaaccatctccatcagtagtctctcacatagtttctcattaactaaaaaatataaaataataataaaatagaagagagataggagagagattgagaatagtttctttgcagagaaattttagagtaatgattgagagattatgtgtatatgtgtgtatttataattgcacagaaactaaatcataataaaatattattatattttttttttgagaaacttttaaagtatgtgaccaatggagatgaccaatggagatgacctaatgtcttaataattgttctagccatctattaaattacgaaactatatatttttgaaggtgtgatcagtgaaaataagagttaagtggctatatacacatcacataagaaatatttagcaaccattttcggttatttttatattgatttcagaaaagttaacattattggagctaagtgtttatagacactgtagaatgccatgataatttaaatttatccaaaagtgaaacgttttcaatttaatagatggttatttttatattttacttaatagactattaatgattttaacataattatgatgattatcagtattggctaatatattatgtttttgaatcatagtattgatgtataataatgtgtatggagatctaaaataaaaggtatatgtaatgtaatcacattgttcatattcatggatataaaaaacattttttctatgcatagtaataaacttccatacacaacgtaaaattcactgtcacaaaacaaaaagggttacaatcatattcagagctgcagatttaacccgcaaaaaaatatcgaagtgctggaggaggtcctaaaccggacgtagcatccattgacaagctacattgatctatcatttcaagttacaattttttttatatttttttgataatgtacaaaagttttatgttacgttgataaaagaatattaaggctgacgatcttaagaaattgtagacatgtgtgaagagaatctataacgtatattcttttcttcttctggaatccagacttttgtctttacatttaaacttcacacttgtgttgtgtggtaatgttcaagtagaaaacaacaaataacaatagatataataaaccaatcgtagtggttaagaaacaaagacattgaatgaagcgaatgtcgctacactgaacttggaaccattgtaggtaagattaaaaaaggaacaaaaaaaaaaaaacttataaagttttgttaatcagtagtatcaaaaaaataaaagatgtgttattaaattattttattttgtacaaataacacactcaatgtttattcaaataggtatgtttttattacaaaaaaaaaagaactctttataaactaaataactcaaataagctgctggcaaagataaacggacttaattaaactcacagagtcacatgtaaaagtaacactttttggtatgattataaaaataatatgcaaatccataggtaaaaagcctatttcaacatgtataattttcgtcgtacgtgcttgtacaaattcataggagaaccgaaccaaagtgtatatataaaagattaggcctttcatagaagaaaaaagatcaagagctagcttttgttttaatcttagaaagaaggaatttactttgttcgagaagcaggcgttcgtgtgcatggattctgaatgatctatggattctgaatgatctcaatactttgcgtagaataagaaattggttggtgagaagctaagtatttgttttagttgtctgtaagcccaataagtgtgtgcaacaactttaaaagattttctattgaagtattttttatataaggtgagccgaggcttggtatatctcgtctcgtgttacatacatctttacttttttcattttctcacctctaacttcaccgagcttgtcaacgatctcatatccttggtgtggaacaaactagtccccatcatacaatttgagaattttgtgacgacaatcatatttcctagtgataatcccctagctaaaaactcatgtataaagtgtttcataaacaaaagttgtttctcattaatggatttctagactacgactgaagtgtgcaaaaatcattttccatcactgtataaggtcgcttttcgtgatgggattatttatatatgaattggtagtacttatggggctaaggtaggccaagcatattcactaaaacttttggacttcaaatacgagtttcctacgttttatgttatctatcatctttttattctttattgagttcgtgttcctacttcaaacacttttttttttcactcaaggaagaaaagagtgaagaaagattcttaaataagaaactctaagatatttacgagaatcccataaaacacatgtctctcctattttgattcaatataattttttaaattaaagtttataaaactaaaatatatcaaaataataatgactttttgtttaaaaaagctttagaagttatgatggatagaattctcatatggttattatcagtgaagtaaaagagtggtttaatcaactaactgttcctattagtgagttccacgtttttctctcgtttccgtagttttacctctgtctgatagttggtaagctacgtttgggagattttaaagccttgttactgatcctaaaaatcaccacataatttttccatgttttatcctcagttacatggttacaacaatcactttctggaaggtcaccaattttgagatttttcagcttaagcacacttaactatgaagttatcccaaaaagtttcaccgaaaagataaatgcacgttggtgatataaatagtcaaatcaattctattaaacgttttcgcatgcaccaccatattcctaaaatcggagtgttacaattcatccccacaaacagaacgtaacgttctcgtggcacaccaagatcgtaaccccggatggagcgagctttcttgatttcacactcatgtgaattcggatctgatactacttatgacgttctgactgtccctactagtgggctccacgtcttctttcgggcatgtgggttcacctctgtcccacggtcggtacgctacgtccgggaaattttaaagacttgttaccttccctacaaatcaccacatgatattttttaatgttttgtcctcatttacttggttccaacaatcactattcggaaggtcttccataatgagactttatcagctcaagcacgcttaactgtgaagttctctcaagaatttgacaaaaaagataagtatactttaatgatatagatggtcaaatcaattcatttaaatctatgcgcatacactattgtatttcttaaattgaagtattacaccgtataacaatatttaaaaatttaaattttgtttttaataatttattcattggcatatagaaatctatgtttttcactaaatattataagcttgatgagcaatattctcaacaaaagaaaaaatcaaaataaatataaagagatgaggtgagtaaattaacaaaatgacaaaacatataccattactacggtataattgcatttgattttgtgtatttcttcacattgtattaacgtacgggatgataccaaacgtaatcgtagcttagcctgaaatatcagaattcagatggaggcaatgatcatccaaataaataaagaaaatcaaagattgaaaaattaaaatattgaatttaagcaatttcatagataaattatgcaaaactcaagaataaatcttggtcgcatattgtgtccagttaaatcatggatggaaattccaaagatatttacaaacaattttgacttttcaattgtcttaatcagatgacctatattctatttttcttcgggatattttaaacagatacatatctaataaatttacattataatttcggcgtgaattgtgagtatgttactcggtctttggttatggtttgaacattgatgttgtggttttgatttttacaactcgactaatctttctaaaatgaatataactgtcgagtagttcacttaccggggttttaatggacctaaagagcacgacatcattttaactggtcaaataaaatgatttagtaattttttttctgttggcttagaagttgagggtaaaccgtataaattgagattagaacatgtaatgacacaatttccatatgaaatgtttggaaaaataaggtaagtgagacgagatttgtttatatatttgtttgtgattatccaaattggaagtgagacgagattgagaactttttttttttttttttttttgttgtctaaaacgagattgagaacttaagtgataaaaaaacatggattgagatctacgacgaaaatattagattaatattttatttaattttatgaaacttaatatgatatcaaatcaaagttgttgactcaagtagaataacctaactaggatttatcgctgatattagagtaagatttagattgaaatgaaccaataagattttcatttaaaagagcatgttaggaatattaacatctgagaaaaaaaaaacttgggcagtaatatgcaataaatagcaccaagatagatacagagacatggaaacatggacaaaaaaaaaaaaaacatggacaaaacggaaatgggaaaggcaaaatcaaaaatttatagaaacaaatatggcatggatatgtcaataacaatataaaaattatatccatatttaaaaaaaaaaaaatagtttgatttaagaaaaattacaaaataagctattcaagtactaactcactttctagagagagattagaaggcagtgactagaggggtgactagaagaagaaaaaaaactagtactgtattcacaattataactatctttttttgtgtgtttatgatttttgaaaatatttattggactagatacatgtttataatattggaaacctatgtaatctttttaccgtctttgtcaacggcaagctatttccgtttggttaaaatgtcttggagacattttgaagccctttccaaaccttgatcgtccctacaacgtttatgaaatgtgaaacgtctataaaatggagtatctttttagcttagttaatttattcattgtcgattggttttacttcttttaagtttgaagcaatatctgttaaaaacatctacacctaacaaaatctaaagaatcagaaaaacaataattaaatttttataaaagataagatttttgaaatgacctggaaagaacagtcttctccttttgaacaagtgaccacgacgttgcattctctatttaattgtttttattgtgaccagtaagaaaatatatgtataaaatttggagtcaacattcaaaatgcagaccaaacaaataaaataatttaaattaaatagctatatatagttagagtataacaaacgatctaaacaccaccaatttgaatcagttatctcttcaccaaaaaaaaaaatgtccgaacaagaaggcaaaaatgagaagaaagtaactgaagggcaatggactaccggtttatacgactgtctctctgaagatatctctacatgtaataatttcatttaactttataattctttcttacacaagtttaaggaaaattaaaagatcggtttagtcataattcttttttggttttgtttgtaaattgttatgaaggctgctttacatgggtttgtccttgcgttgcatttgggaggatcgctgagatccttgataaaggagaaacaagtacgtttctgatttccattatacagtactactattaaaataaaaatttcacatattcgctaatgagatgaaatggaattaaaagaaaacatatatgtagatcggttattatcaatttattttgaattggaatttatccactttctacttatcttaatagatatatttttatgaagtaaaagagttagtacaacttttaaatgagatggtagataatttacgcgaaaatgacaataataatgttatatttacagggttgatagaatatcatactttcaaatagttcattgttacaaatactatataagaaatagaagaacaatcttccaaaacaatcttgcagatgtaggaaatattacttatgattaaaaatataatcaaaggtgaaaagtactttgaaatttaaatactagaaactcaagatggctttataaagaacacgtgtaatgttttttgtatattcaaatcgtgttacaaagttgatttattaataaaaatggattaaaaaggtcgaggacttgctggattaatggtggtcgcaatgtctagcattgggtgtggatggtactatgcttcaaaatacagagccaaattgaggcatcaatacgctttgcccgaggcgccttgtgccgatggcgccattcactgcttctgctgtccatgtgctcttactcaagaacaccgcgaactcaaacatcgaggtcttgatccctctctaggtaaacagtctctattcgtcctttctctttttagtataatatattaatgatggtcgttttagtgataagttttgttgtttttgtcaccgttgcaatcattttactacaaacaaagggtggaacattgagaatggaggattaaacagcaacacgcccccgtttgtagcgtcaggcatggaccgttaaggaacatcacaaattaatgcaagtaattgaattccatgaaaagtaaataaataaataaaccatgtgttatatataattgggttcacggaaatgataaatttattcttatatgataattttgttgtaaatatttattttatatgtgtgaagttgtaagttgtaaccatgaaaatttatgatgatatctaatcttatgttcttacaaataaatgtaaaaccaatttctatagaattggctattggtttccctgagcgagttaatttatttgtgagtactgtgatatccccgcgaattagatatgtgaacctttctctttacaaaataaggcagaaataagagtcatgtgtacagtttggatcatttaagcaaccatacaaaacttgcagccgagacacattaatgactgcaagatggtaaaagagctatagcctataagtgattcaaaaaacacttgagaaacttttctaaagaagaggacattagtcgataccgaagagagcgcagtctttagatgataagctgaggttatcagagataagttgcagtttgcacttggatgaagctactttaggatgcctccgaagttgctggtaaactttaatcacatcttcatcaactggtgtattatagtgtaatatcagttgctcaatatccggtatcttctctagaaaatgcttgacttggtctatcctcttctctatctcgtcatcatagattttaccaaattccaatatcttcagcactttcactggacatgatgataagcaagtaggagtctcctcgtcttcctcctcttcttcatcctcctcccaaggtttgcataaacacatatctccacatttatccgtgaaacggtggacaagtccctgaaatgtgggagaaacatctcaaactttgaaaaatatgtcaacaaatgcttgaaagggtttgtttcatactttaaagacaagagtttccagatttggagaattcttgagaaggcccgacacggattcccatcctacttccgagttactctcgatagttaaatgagtcaggttgttgaatagcggtattgcttcacaacagtaagtaagtacctgaaacaaaatcatatcaaatagatcatcaatcatcatcactcattaacttgaatccttaagcaatgttaaaaagattacaagatgagagcaatgaaatacaaacctcaagagtataaactgatagataaaggatcttcacattgcatattcccattattaattctgttgcattagctaccatacagccttccatattaccttcagaatctgaaaaacgtgtctgctcaacctgatcttctgacatctgaagattgatatgagcttcaacaagcgaatcgaagttcactgttgaatactcgtccgcaatagcatcagtaaacatcaagtagacaaggttcggagtattaaaagacacacttattggattctcatcttgcattacttccccacaaaaagttagcctcttgagagttgtgagagacacagagacaaaatcccataggcaccaagatatatattcaagatttaactcctcaagtatgtgacaaccagaaagaagcttgttaagcccaataccatgcttttcaaatttgactgacacaatatggagagtcttaagcttaggaagatgaacatcttcaacatcaatgaacgggccacgttccacacttagcttcagcctaacgagtgtctcactcaaaaagatctttgaaggaagtgaagatttccatttcaaatgcatgtctagttcaagatcagatacaccgcgttccaaaaccttgagtatccaacaaatgatacggactatatcaacacaatctctgatctttagagagaacttgtgtagaggagaattgtcttgcaatctcaacacttgatctacaaaatccataaaacttgtcgaaagctgatcacttctttcattaatcattttcaaataatcctcaccactaactgcaggattcctttttccaagacgtagatgaacagagtcatcgaaatcaagattaggaacagaagcaaagagataccgccatttttttgctagaaccgatgtagaagcagcttctttggtgttaaggaaagacaagatgtggcaaagaagagaatctggtaaaccgctgattatatctctagacctaccaaaatccatctttttcaataccgttgagttactacaacctgaaaatcaaagacatgagtaaaaatgttttgtcttttacacaactaatagggtttctaaatattcaaaaaaagaagacgttcccacaaaatcaaatttgctagcttgaggcaaaagtcagaagagcataagatagatattgaaacttacttggagataaaagcttagctcaccaagatcacttaactattgttgaactttttttaggagttttcgcgagtgtgagttcttaaggcgaaacatttttactttctagtttctaaaagattttgtaagatattatctggagctgatgacatcattagtttgagaagactattttttgtaaaaaaaaaattttacttctgacacatagaggggagatttgttcaagaacctaggaagtagatatgtgacgttgttcggcggataattaatgctgctcctgtgactataatcattagttgagaaaattgtgtttttctttaactaattttggaaaaaaataaaaagctctttaacaaataaatcagagatcaataatggccaaacttgataatttataaggaacccaaatcaaagtgaaataaagttcatttagttaggtgaagtaaatatttttcgttttatatttgtatattattaagattatgtccatgtttgttttgagtgtaccatataattattataaaggccattttaaaatttatgtttaggacccaacttcgttaagcaaaatattataatgatttgggtgaaactcttttttttttttcattggaaaattaatttttattgatgggatattacttgaaatacaagaagccgacgatcaatagatgatcccgaaaactaagccgaaggatgacaagatattttcggaaactaagtccaagaatataggcagtaaataacaatactacaaacgaaacaagccaaaacatcgacggctaagaaagcaaaacatcagaggaaatcaaaactctgaactcataatctagcacgaaaacatcttgcttactatcaatccagaagcgagaaacgcttgaaatagtggttagccgatagagacgagaaaatctacgacaccggaaagcgactcttcccataccaaatgaagactatctcacaaaaaaagagaaccaaagcatccataccagcaagaatgagagacgaatagaaatcctacacaacttctggaaacggcgaaatcgaagcaaacgaaaccacagtttgttcacgcctagaaagataccaatgcaatagagagacctcgatcaggtctaagctgtaaagacaaggaccgaactcaaacaattcacaacaaaccgaaaaaggtcacgatcttttattcactgtcttttaattgaaaaatgtcactttttatcaattaaaatttataaaaaatgtagactagaattcaattaaaatttgtcaatttaaattaaaatttataaaaaatgtaaattaaaatataattttccacaaaattgaacactttgtagtttttttgctcttcttagtctattctctctattcatgattttttaattattgttaataagattctcatacgtcatattatagctttattttaattttcctaatcttctttcttaataatatgtaacgtgcttcgtacgtaagaccaagagtacttctattattttgtcaagtggcgcggcggtggcatattgtcggaccgaaccatcttacgatcgaagctttctttgtcgtaagccattgactagacaaataatgtctttaaattaaagacttaatgcaagactacatacacgttctattaaagtctttaacttaaagactttatttgtctagtcaacggcttacgacaaagactatatataacacttccttagtctttctcttacaaaccctaatttcatattgcagtttgcgtgtctattagattgcaaactcatggctacatcaagacttaatgcctcttgccgctttcctgcaagcagaagacttgactgcgagagctatgtcagtctgagagctaagacagtgacaataagatatgttcggaccatagccgctcctcgtcgccatcttgtccgaagagcaaacgaagatcagactttggtggtgaatgttgtggcagcagcaggggagaagccagaaagaaggtatcctcgagaaccgaatgggtttgtggaggagatgaggttcgtggtaatgaaaattcacccaagagatcaggtaaaagaaggaaaaagtgactccaacgatcttgtatcaacatggaatttcacaatcgaagggtacttgaagtttctcgtggacagtaagcttgtgtttgagacgcttgaacgaattattaacgaatctgctatccaagcttgtgagtttttctcatcattttttcgtatgttttccttcttatgaattgaaatattggtaacttttatagtcaacttgatccgttcagttttaatataaactttttcaaaattgaagtgattaggagaattgagaaacattaacagtagttagatgctacaattaatatatctactaaatgtttttggacttgatttacatcgaaagtccgacgaatcttagtgtcagtaggtccttatttttggatcatatgcacatagataagattctcaaaacaattctgacggatcagttctttcttcttggattttatgctagatcggaattacaaaccttatcttcgatatatcaataggagaaatcggagaaagaacactaaaatgttgatgtgtagcatttcgaggaataagaatttgtttatgttacgtctataattatacaatttagaaataaataacttaaacgttgcaatatttacacttgaaaacgtaaataaaccagtttcaccggccctaaatactaaaattaggtgtggatgaaatatcttattagttttaaaaaacatataaattttggtattaactataataatctcagtttttaacatggtaatccgatttcttgatataacttttgacactaacttttttttgtattaatttacatgcatattacatattagtctttatagtcttcttaattgggtgaatttaatatatatgctcagaagaatgaaaaataaagaatctgaccatgaagttttgttatttagttctctttcatctgattcatactaatgccaaatatacctttcgtcacatatacacgttaacaagaaaaatatcaagataaaacaatttatatgcaacaacaaaaaatgagtttcggcaataataagtttaggtagttaattattcctcttcttgtgtatataaccttgtcaaaacctctggttcttttatatttttttgtagatgccgggctcaaaaacacggggttggaaagggcagagaatttgagtagggatttggagtggttcaaggaacaaggttacgagattccagagtcaatggttcctggtaaagcatattctcagtatttaaagaatatagcagagaaagatcctccagcattcatctgtcacttctacaacattaactttgcacatagcgctggtggtcgaatgattgggacaaaggtagaaaatagtacaacttaattctctaagaaagtcacttaatgttttttataagtttacaatttgtttaggtagctgagaagatactcgacaataaagaactcgagttctacaaatgggacggccaactttccgaattgttgcagaacgtgagtgaagaattgaacaaagtggctgaggtatagaacataaaatcaatgtgaagaaagaaaattaatgtttggtgcattctaattctaaagcatattttatgatgaatgggcagttgtggacgagagaagagaagaatcattgtttggaagagacagagaaatcgttcaagttttattgggagatttttcgttacttattgtcctaatttgtgatgagcttccggtggcaacaaaaagtggcgggaaggccatcaagtgtacgtatgaaaacaaaatctaaaataattggactaagtctccaagcacatgtctttactctatggcataataataataataggaagtctatgtggttaccgaaatgtaggaatcccacttccttagttgttcacttgtttcttttccacttccacgtttatatgagctaaacttcgattctagtttaattaatcttttggctctacaatttggtcaattggttagcatccagctaatgccgtcaactattaagaaaactccaacaaagagaaatcaaaagagatgataccaaagaaacataagagaagaaagagagagacatcgtgatgagaaagattggagattccaaaggaatcgaaagaacaacaactatttggtcagagcctttttttttttttttgatcagatttgatcagtggcttaaaaaacaacaacttctacggtctctcttcgctgttctagatttgtttatctgttgaattatattcggtattgattaataggatctcttcgtttcatgccactttcctaattttactacggtcaaaagtgtcgagtatgaattttatgtttctaatggcaatatgttgtatgagtgttagcgatctgtctactagctagtttattgtttcagagttatctgagttaatgacatattatttatgccactatattttgacatattatttatgccagaaaaaaaaaatatatgccactagcttgttttctctaatttaatactgttttaagttctcaaaaatttcaaaaactacaagtcaaacttttctgtaatgcatgttacatacataatattttactaattaattttatttttatagtacgtcttaggtacataatcttttgcttattagttggactatcttactataataattattcgtgaaagttattccacaaatctatccatcggttgcttcatgagattaaatatctccgctttcgttttaaatatattagccggactcaacatatgtaagaaacaaatataattacatgttaagaagttagtaaacaataaattaaaaaataataattaattttaaagattaattttaagctcatatattttgatatatgtataaacttcgcatattataatcaatatattcataggttgacgcatttacaatgttaaaataagagaaattttgaaaaatcctaataacatttaattattttattcagaacttttcatataattctccttaaatctacatagattcctttcagatatcatttacaatttttttttttgttaaagcagatatcatttacaatgttcaaatataagatatcatttacaatgttcaaatataagaagaattttgagaataccaacaatatttaattattttattcagaagttttcatatttttcatatggttctcctaaatcaacatagattcttttcagatatccggataattcctatgcacacatatttttccaatttatttcctcatcagaaacaaattaattaatttcaccataaaatctcataactcataagagtcacaagtctactaagaaacaaataaataaatacttatatgttgccgtgtaagaacaaatgccaccaaatacgcaaaaacgagtgtggataaaacgtgttctccacccgccaatcaaattccatcaaaatctcaatgcattcctcattacatatctttagattaccatccaatcataatcctcaatttccagttctactaaaccggttttgacccgatttgatttttcagcctcaaatctgacaaatcatattcacagcgatctccttcttccacatcgcaacccaatccctctctgtctcttcctcaattcttattctctctcgcaaaggtttggttttttgaagacagagaggagatttgagattttgggtttcaatggcggtttcaagtgctttcgttggttgtccaaagcttgagactttattgaatcaccataatctatctccttcttcttcttcttcgtcctctgtttcacagacaccattgggtcttaatggggttcgtgttcttccgaagaacaatagaaccagacgaggtttgatccaaaaagctcgttgtgagctctctgcttcttctgattctgcgtctaatgcagctagcatctctgctcttgaacaactcaagaactctgcagctgatcgtatgagtctctatctcttaatctactcaaatttgaatcttttgtttgatcaaagttataaagtttgaatctttgtttagtgatgtcgtgattatactgaagacagtttttgttatgaattgttgttctgacttttcatttgtggttgttaggatatacaaaggaaagaagcagtattgttgtgattggacttagtattcacacagctcctgttgagatgcgtgagaagcttgctatacctgaagctgaatggccaagagctattgctgaattgtgtggtttgaatcatattgaagaagctgctgtgcttagtacttgtaaccgtatggagatttatgttttagctttatctcagcatcgtggagttaaagaagttactgaatggatgtcaaaggtgtgacttttttctactatagtgttcttcttgtggtactttggtgggtgactaatgctttagaacatgttaagagtggtcttgtatttatatgtttaattctgtggtgtctactacagattgatcataccatatgcagagaatctatatataatctgttcatatactattgagtgtttaacgtggctgttttacagtcggtatcaagggctaactaacgagtcttatctcttttttcagacgagtgggatcccagtttcagagatttgtcaacaccgttttctgttgtacaacaaggatgctacacagcatatatttgaagtctcagctggtcttgactctcttgtcctaggagaaggtcagatccttgcacaggtgaaacaagttgtgaaagttggtcaaggagtgaatggctttgggaggaatatcagcgggctgtttaaacacgcgataactgttggtaagcgtgttagaacagagacaaatattgcttctggtgcggtttcggttagctcagctgctgttgaacttgctctgatgaagcttccgcagtcttcaaacgtatctgctaggatgtgtgtaattggcgctggaaaaatggggaagcttgtgattaagcatttgatggctaagggttgcacaaaagtggtggtagtcaacagaagtgaagagagggtttcagctatccgtgaggagatgcctggtattgagattatatatcgacctcttgatgagatgctagcttgtgcttcagaagcggatgttgtgtttaccagcacagcctctgagacgccattgttcttaaaggagcatgtagagaatctccctcaagcttctccagaggttggaggactgaggcattttgttgacatctctgttccgagaaatgttggatcttgtgttggtgaagtagaaacagcacgggtttacaatgtggacgatctcaaagaagttgttgctgccaacaaagaagacaggatgaggaaagcaatggaagctcaaaccataatcacagaggaatccacacagtttgaagcatggagggattcattggagacggttccaacgatcaagaagttaagagcttatgcagagagaatcagagtggcagagctcgagaagtgcatgtccaaaatgggagatgatatcaacaagaaaacaacgagagcggttgatgacttaagccgaggtatcgtgaacagattcttacatggtccaatgcagcatttgagatgtgacggaagtgacagtagaacgctgagcgagacccttgagaatatgcatgctttgaacagaatgtacggtcttgagaaagacattttggaggaaaagcttaaggcaatggcggaacaacaacagaagtaaaagagaaaaataagaagatgttcatctcttttgacatataagattagcttccccacaaactctgagtaaattgcatagatcctatagcgatggatctatttgattcatttaatttgtgtgcaagagactaacaattctatcgtcaagtgtaagtgttgtgaagctataagcgagcttgttgcatgtttgttgcttcatagactcgagtgtaatggtattggtcccagtatcgttacatatatgtaataatgtataaactttggttcttgcaatatagagaaatgtttttttctttctaatcttataaactttggttcatggaatttaatggatttgaaaatccaaacaaaaattatgtgttatttaatcattgattttagtgttattggttctatgatttacaaataatagttaaaatattgagtttacgtatagagcaaataataaaaaccatttttcgttcatagttgtctttaagatcacatgccatgtgcatcattttgctgtcacgtctccaagattgttaatttgtatgtgtaatatgttttcgacctgtttcagtacctaagtagcaattcaatcatttcaccaaaacacacacacaaaaataaaacttcatctctaaaaatctaaacgacacctatgtcattttcatagcttaacttatgaatattcattgaaactatttccttacattaaccgaaatatatataactgaaactaacgatatatgatctattcgtagagatgaagaagaagaaattatccaaatcagaaatatgggggaaaattcgcaatttcatctgaagcgggctgatcaaacttggttaagattaatttggtttaattccaatttccccggtatggaatttaatttggtccactttcctagaatttttttgaactgtcttattgtacattttttgttatgtatttgtcaataataatatttaataatattttgaactgctaaaaattgtttcaaaagatagtgtttctaatcataattcttcttgtttacaattttattcataaatagtttttaaaatcttttggaaaatattaacggtataacattaaacattgatataatttatgtaataattcaaatattagaatatatcattacaataatttaataaacataataatttctgtttttataatttaatatataaatacaaaattttattgaaaatgagtttcctgcgatgcgggattcataacctatatgtaaaaactaacgtaaaaatttcattgcgtacatggaaactatttgattagttttataagtggtgtatgagtgtgcatgactaatagttcagtcgggcttaaaactatttcttagaatttctcattattagtttcttttcttttagtcatcacattaattcaagtcaaacagaaccacaacaaatggtgcttgccgcttggacaccactagttggaatttcgaatattccaaaggttctactcatgtaataaacaaaagttataataggaaagttagtaaacattaacaattaaagaaaagcagaaaaagttaaactcggatctctatgattcaccaatcaatgacctcaaatctttcattttacatttcttctgtgtctcatctttcctctcctcttccatcgcttagtcgcctctctcttcgttgttgcagctctcttcctgctcacggtaactctccccttgtttctcttacattctcatttgttgtcggaatcttgaaaacttgaatccatagtcaaagcgaaatgggtttaacttgtgtttcattactgaacattaattgttgttttttttgtttttgttcgatgattaaatatctagatatggagacaaaaccaagtcaaggcctttacccacttcaccgttgcaaaaccatacatctggtttgtttttgttgtttttctcattattctgatttggtctctgttggtactcggattttgattgagttcttgtattttaggtgagacatgctcaagggattcacaatgttgaaggagagaagaaccataaggcttacttatctgaggatctatttgatgcacatcttacacctcttggatggcaacaagtaagtaaattagccatactcgatttatcggtttttatcactataattttgcattaacttatagtattattctggtagctctaatgatatagactatgagatatgaataatctgttgttgtaatgtaacacataaagaggtttctgtactattttggaaaagggaagtaattaatatgaattatgttattgtaggttgataatttacacaagcatgttaatgcaagtggtatttccaatagaattgagttggtagtcgtatctcctctgctcaggtaatatacttaacccgtaaagcttattgatattatcttaacgctattgcttggattcttgcttgagaatagtcatcttgagttaaacgtccttatagatttgtgttatgccatttcgttcttttataagcagttttgtatttacctcaatacacttgtttgttttaggactttgcaaacagcggtcggaacttttggtggggaaggttacaaagatggtgtaaatacacctctgcttatgaccgcaggtgctggaaacagcgatcgtcctgctatatcaaggttaaatcgtccaccgttcattgcggttgaatcctgccgagaacatttggtatgtttacttttctaccttttgcatgattggcattttcttgagatgaaaacttttgcaatgttcttggttcagggtgttcatccttgtgacagaagaagcaatatcaccaagtaccgcgaattattccctgcgattgatttttcattggcaagtacctaatctatagaaactatgatttttttttggtgttttttcttatgttttcacattttctcatattcatgtatacagatagaaactgatgaagatgtcttgtggaagcctgacattagagaggaggataaagatattgcgaccagaggcgtgaagttctttaactggtgaatatatgcaatgcttgacatctctatgtgcatgatgttttatgatagtcttggcatgatctttttgattgatatactaactgaattcaggttgagtacaaggaaagaaaaagagattgcggttgtaactcatagtgggttcttgtatcaaacattaaactcatttggaaacgattgtgatccatctgtgaaaaacgagatttctaaaaagtaagagttcctcctctctcttttgatcattttctattatttatgttgtcattatctcaaagtttttttgtgttgcagatttgtcaactgtgaactccgttcatttgttcttgtagataaatggtaagttttgttgtttattcagacaacgctcacatttgatacaattaaaaaaaattaaaattcatattcttctcaatttcaaaaatgcagcatgagcagttcggatcctccaatgaccaactatcccggaacaatacttaccggagaagatgcttctagtgatattgctgatcagaagtagttatatgtattatgttaatcttatatgaatctcaaagctgtatatttctatacaatggaatagaaaatggagttagacgtaactattttatttaacgttaccgtatcctacggattcacacttaaatgttatctcgattaagcaacgaggggaattttttgaccccatttcaatttgtttgtttggtttaccaaattaattgctaccataatgcagacttcaaatattgtacactctgcgaaaaataatactttatcaaaactaaatttgaatcatagaaatggacataacttcaacataaaaccatagcatcacgacaaaaatgattgaattcagaggtgataacaaaagtcgtctcccaaaaaccaaaaattcgtcaaactgaaccattcacatatcgactatcgtgagagaatatcctggaatactgatcttggaataacaacacataacacattggcatttatttaaaaccccgatttcatccatcaagaactcagtcacctttggttttgcttgcacatcatctgagaattcgcttaacatatcagtgaacatgtagtaaagggtatgctttgatcagctagttattcagagaaatctccttgagcaagattcttatgagagattatttggcaaagtccatcattgccatcaatgcttccccaatatatttgctactccaagacacttatttccttcttgagtggtatttctttcgacttcatgcaaacatgaggcaataaacattgccttaatttgtactcgtaagctaaaacatggatgcccacaatgtcacttccaatcatgaacaacaattgacaagtccagttaactctcatccaaggcttctgacatggacataacctattgttgattgaagccccgccactaaataaaagctattgttgattccagcaatgttaacctccagcttggtaaggctggcaaggaggaccagctccaaggcgtagttataagtctagctcgacatgtggttgtaaatgttgagtaaaacgttttaagatttgggagaaccttaaaacaaaatgactatgaacgagatatctcaccacacgagaacgtcttcctctatgacgccgttctctaccatgtccctccatcaccatcagcttgaataggcacacgatctagaccccaacaagcatgaggctacatgttcagatgttcttggtcaatcataataaaaactgacaatatgataataaaacactaactatcactttgtgagatgaaaacggtatgaccttgagggaatgattggttaaaacacaagtgttgtaacatctatagaaaatgtagcaaaacatcacgtcctcgtcatagcaagctattagggtcgggttttgtcagcaagtttgatataaaggtgattgcatatgaccctgctcattacgaacgtaaaggtgaatgcatatgaccctgaaaaattcgtggagcttgattatgccaacaatagttcatggggaagagacttctctcggctgccatatcgcaaaaggaggagccggtagtaaattgaaacaagaggctccggttttgaaatttacgagagagtctcttacaaataacacaaagcttacacctcatatggcctcatgattgtgcataattgatcgcaattatcacaaagaagaatcttcttgggctctataaatgacattgtttgaagctatccatgattcactctccaatgcaaacatccatctctcgcaatcattgtttaattaatacgaagtgacaaaaaggaaagtagcaacatacgggaagcagaatgacttaagttgcaacataagagacgagaaattaatcacaattaatttattatgttgttctataccacatcaaggatcataattttcatttctgcactttataatttttaatcaatattttaaaacgaattgctcggaaaatcgctgattaaaaattttgatatctaattgttacgactagttgctatataggtagctggatatgaggcaacaaagctcatatggtatggtttggtttggttgttgtcattaactagtggtcgtagagtctctatcttcactagagaagaacaaacaaatagatcaaaattcaaaaaatcaaaaagtaattatagaaaattcaaatgaaaaaggagtgagaaaaaaggttaaaatctttcaaattcttaagttacactaaattaaaaagatgtaaaaagaaatttatagtaaatagaataaccattgcatttattttttggtgcattgatatagttaatattgcatttattatgcagtttgttatatatatatatatatttttttttgtttaaatgcatatttgttacgatacttatacatacctctgtcttggagttagcttttttgttatcatgttcttgggtgtgtttatcagttcagtcggagtggattgatcagaagaattgttgagggtttgttcccatgttcgttattaggatgcgtttatgagatggtattaggtgaagaggtatctactagccttcctctgtgcatgttttggagtagggccggattggtctcaatacgatgcattaggattgatattcagttcttatcttaagaaagatggtcaaccttttgtttatagatggatgaagctaggttttcgaacggctccattttctagatgttagtcttactagagtatcaccttgtcggagtttcaggttttttcctcttgccttggtcagttaaatagtgtggcactttgatatttgttttggagctcgggtttgggcattctgtggatcagccgatccttggattttgtttggatgttggttctcaaggctgtggatcaaagatttttagaagaagaggtgaattttagatttccaaacttggtttaaatattatatttggttgaaatattggttataaatctcgaaaataagattttaaatcctttcatcaaaaagaatattattttcataattctgtcggacaacagtgatggaaagaataagaatttttattattattaacaagatgatgacgtggtaacaatgtcatcaaaaccgtgacatccacgtcaccaacgttatcaaggacatgacattcatgtcatcaatgatgtatgattttgcatgattggataaattcatgtattggaacttaaattatttaaaacgttagatatatattagtaaagagaaaactgttaggtataaattgaacactgatactttgtttggatatgaaaaaattgactttcctctttgtgcagctccggcgtctactactttgatgggaaggtatgtgggagttttcttggattgaattgtgggggcttttgtaaaaataggaacattttggcccaataattagaaaaaaggaacatttagaatgggcttataggtttgggcatatgtttgcaacaaatatgacgcttttgcccttcgtcttcaacaccatcgtcttcaacaccattgtccagacatcgattttgacgattcatagtgttattaacaacaccatcgtcttcaacaaaattttccagccaacatgtctattctgattaacccaatcaatcaaaataaatgatttttgattgaagaaatctaaaccctaaagggatactatctagggaacccttgggttctaatcttaaacactccaattcattattaattctaaaccaaatttgatttttattgtcaatagagttcatcatcatcgtcaccaactaataacagaggatttggaaaagtaattctagagatccaaactatcaccttcgcttctcactatcgctcaactcaccatcgtcgttgaaactcaccatcgtcgccaacgctaattggaggtcgagatcttgccgtctttttcatcacgagacatgattcatgagtcaccgccgttgcttcttaccgttgtcaaaatcgttgttgttgcaggagctcaatcaccattgtaggttcagtggtaagggtaaactcgtaaaatacttgcatagaaaaatacttaaatctataaggcatatgagatatgtctgttttcataaagatataaacttaattgtgtcaatcccataattaatccctaaattgtgagttgcagttttagagtttatgagtcttttttaaaaaaattattatgttccattttaatatattttagtaccaggtttacttccccttttttttgggttttaacttctttcttgtttgagttttgctttagagattttagtttttgtaaagcaaaaatttgctcctgatgaatcatgcctaatgctacctgttcttattgtcgatttggtagtctttcattgcagcaaatattctttcaatcacttctttcaaaaaatctacatatacatttttgcagccattttaacaaataaatcctgaatttggacttatttacaactcaatgccattagcattaaatcttttctccaaaataattaattttacttgatttaaattgtcaaccacattatcaatcaaatttaacccttaaaattagcataaacatatttgttaacaatattttaaaacaaagttttttgttaaaacaaatattattcttactaaacattttttgtttaaataaataaatcatgtatttgaacttatttacaatctcatgacactgacattaattatttaggaatgaaaatatttaattaaagatttaaatcttctaaatccttgcttttagagttattatgtcattaccttaaaggctcaaaatataaaataaataaatataattatttaaatattttaaatttataaaacattattaatatttaaaattataaaaagtttaatatatcataattttttaacatcattatataatatataaagtttaaaaaaatctctattctttccgccataatttgtgattcgaaattttaaaaataaacatatattaaccaattggcgaaaaatgtttgagttcaacgtcccacatcgactaaaatatttagacaataattcataaacatatcataaataagattaacattaataaaataatggtttttttacgggacgggtttggcgtgacgggtttggcagaacgttacttaataacaattgtaaattataaaataaaaatattttatagatagatacaatttgcaaaattttatatatattaactttaaaatataaattgtccccgcggtgtaccgcgggttaaaatctagtattgaaatattttggtttcaattatttatttatcgggaattgattttgaattggtagtgtgaattattggtgtcactgttataccgcgctggcaattaaatcgatagggtcatatagatgtcattaggtaatcgcaagagtaatatattttatggatatggtaagggttgatgctttgtcatggtttttattattattattatatataaatgtaaatattaatgaaatagtgtgtatatatatatataatagttttggaattacatgatgtataatgtatataggggttgagagacctatgaccggtcaaaatttgggggccaaagtaacaaattatatatttggggttattataaactgttttgaaatttggatatatttttcttagaactaaatatatttggaagcctatttataaatcaggtttgctgtaaaaaaaagtttttaaaaatggagacaacatacaaatgtttcatgttgcttctttcagagccggcccgggagaagcgttgccaaaaaagaataaagacaaaggtaacaaataaacaaagaagacacaacagtgaattcatctaatccaaagttgtatgtggtttccgaaatgcttcctttgtcttgttccgaatctctctgtcgatgaacttgaaaatggtgtttcacgttcattcaataaaaaataacaaccatagtgtacacagagactgatagtgaaataaaggaaaaaaaaactataatctgttaaattcagataatatctattatttttttgttttgttgaaaaatcaaatctctagtaacattaatgagtatgaatcgtgtctggtagttggtacgaatcgagatctcatcaatgggttttttaagctgctttgagacgtgcgtaacacgaagttgtccactatgacttgctcttgtacttataagttaaaataatgatgcagcagaaaacaattactattttgtgagacacgtatatcccaacaaaacaatatgtcgtagaacgtgctaattaattagtgaatacctacgtgtcacgatctcatgagattggtgtattactgagaactaacgatctcatgagattggtgtattactgagaactaatcactaataaacgtgaatctcgtgacacatattatcattatgcctatatatacgtacataaaacaagacattattacaaacacaaaatatagaaaaagaaataatgtattcagaggaaaagaaaagcagaaattatggttcaatctttgtctactgcttcttctgtttcgtactcattgtggaggttgcaagattcgcaaaaccttatatcaaccttcaaaacctaattgagacggaagcagtagtagaagaaggtttcatggcggtggggaactcagggaatcttccgtgtggctcgtcaaaacctagctctgcctctgttcgtgctcatgatgaacagaagctctcgcaagcagtaacaacagatacgagaactcgtcctccaaattcgtactgcgtgaagttccagtcttttgtcactatggcaaagcaggtcaaagaaaacggtggcaagtatgagtcacgtcctttctccgtcggtggatacaattggtacgtacgcgttgacttccatttcaaaaatgttgagaaaccataccttatacatagaagatatacatttttttttgtcaaagggtattcatttatatactagtgttttgatcatctccactttctatgtgaaagattttaacttattgctctgaatctcacccaaattttaatttgtatataatttgacatatttctacttaaaatgttataaggacgctcctaatctacccagtcatatacattccaacggactcgggtgggtacgtttcgatttacgtaagagtcgataactcaagcctcatcaccaatccaaaagatgtgtatgcagagatcacattcctcgcttataaaagcagtacagacaagtaccaaataagccagggtactaattaactaatctagagcaagtaaatatatatgtttaaatcttttgtggtttgttcagactagttatttaagtttgatccgtttgcagagactgaggcccagcgatttcatttgtttaaacaacagtggggacttttacaatttctaccaatttactattttgaaaatccggcatatggatactttttcgagggcgaaagcgttgtgtttggcgttgacatcaacattgttaaaccctttgaaaattgggaagtgttctctaatgaacaaaacattcgtgaccctattttcgaatggagactcaccaaattctctacacgttttcttgactcttacacttctgattccttttcttccggaggaagaaactggtacgtgtgactttcttcctcttgtatatatataacaatacgtacaagatgtgttagtttaataatatgatggttttttacattgaagggcattgaaagtgtatccaaatggagttggaaatgctacgggtaattcgttgtcactctatttgttgagtgatcagtcaaatgataagggttatgtggaagctaagttacgagttattgaccagatccaatccaacaatttcgagaaaaaaggtttgatatctactttgtcaactactactactaatttaaagctaattaattataattaatgagcctttaaaaaataaaaataacttttgatttcttcctatatacacagtggcggcatggcccaatgcaacggagaatggatggggtttcgacaggtttctatcatttgcagatatcaaaaacacatcaaaaggtttcctagtcaacgatactctcaaacttgaagtccagatcttgtccttctcgaaaaccgactactactctcatcaatcgtctcttaatgttttaacgggagatagtacttaggtgactaatcgtcgctagtgtaattttacaactggctactatcactttgcttcattgtgttttttgtttctgttcaataataatgagttcgagctttcctatgtcaaacttgatcaatctgatttcacatattgaataccaaattggataggatgaaagaggcagtccctaggatgtttttttttttttttggatttaaagattgggtacgtaatccattcacatttccttttataattgtccacttcttaatcgtttagtcgatcgtctacggcttcaataattgtagttttgtccttagtaattgattattcttttcacttcgtttttcgtccactaatacaattactacaatgttgttcttctccataaacattatctacatcgattcctctctattgcttgtagttgtacagttgtctactgcgcttaaactttttgttcacttttcatttatgttcccgtcctcggcttcaactactgtacttttgaagatttgttagatatactaggaacatgaactgctactaaaaacttgtccacggttccatcttcgtggacatctgtattttgtttacttcgtttctcgtcgactgctacaactacagtattgttgtccatcatcccttctccgatacattatctacatccatctttcttcgtttctcgtcgactcctacatgtttgggtgacaaatcatcaagtgataaattattattgtattaaaagcaaccatttttattgtataacaaccatcataactttctttctgtccacatttaatgtgccacgccacaccatcatcttatctagacgtcaactgcttttggcagaggtgtcagcctcattgggcgaaatgttttgtttccctccataaccaattaaaggtagtttagacatcttctcctttgtcaaaagctgactcattgcacaattttaaagatataaaaaatagcattgccgacaaaatatttatacaaatatggcacaattggcaaaattcccttaaaaaacataaatagtacttaacaagattatatcacttgatgatttgtcacccaaacattttctaaaaattcttgatctgaattttcggatataaacttggagccaaaattggttcgcggatccgagtagaggcttggcgataaacaagttactttccgctgagatgagttcgagttgaatttttccattagggagagtccattcgaacccttggagaagcctggctaacgacatgatggtcatagatgtcccaatcttagtggttgggcagctacggtgaccggtgccgaatgtaacgaaccgcatgtccggctccaacagagtcaaacccagtgagttcttgacatggccatcgaggtgtctctctgtcttgaacatgttaggctcatcccatattttaggattccgaccaagccccaaacggctcacaagaatttgactacctatcgttacaatcatacaaataccccacgtcatataatgttagacagtaaataccatcttggaatagatgacatttaattctttgactagattttatgagaattaattaatatcgaagatagagtgactatcccgcattttcaaatgttctttttttttcatatttcactactactttgtgcatgcatgcatgtcttacgtcagaaatgcctctcttgttttataacttatatagtgtacaattacgtcagcaatttattgtttaaaattaatcattactatttagcttttctctgacaagataatagtgctaatttattttttccaatatctataaaaattgtgaaatcttgagtttcaaactcatcaaccctgaaagtctaacatatattcacggatctacaattcttctatatgattgagttttacccgagaggatagtatcttctcgggctacatgatatggcatgaacacacactacaacaaaaacgttattttacatcatttattataaatattgacattagttataaatgatgttaaataattttaaataattttgcatcatttaaataagtaacttaataattggtgatgtaaataatttatgcaaataatttatatcagtttattactaattgatgttaatatttaaaatatttacatcgattactataattgatatcaatatgtatcaattgctaaaagatgattttaacttttacttcaatttatttaagtgatgttaatatttgtttcggttaaaataagtgattttaaaaataataatatatttacagaataataatttttagaataacaaataattatttaaaaaaatatattttctaattattcttttatttgtttcatttttaatatatataataaatcatggtggatattttctcccaaaatcactcgttgcaatatcaactaaaatcttttcaagattttataaaatacattttttaagaataataaattttataacaaaaataataataattgggtgttcttcatgtttaaacacattccttcagtttcatacttcttccttccagtaattgtgttctttttggaacttctatttctttttttttttatatcatctctcttccattgtggaatcaagatcatgctgacttgagatcccttgaatcattatcccacttaagttttttctctacaaaatgaaaaagagattaattgtttgaaaatttatagaatttttacgtcggaattagaataagcatttgtaattgtattgaacataaaataatagaatacctttactttatgcttctccaatctgtgtaggaaacacagtcctaatgattagcaatgcatatctgtattaattatgcagtgttcttctgtgttcatgacagatttataaaaatagaagaaaagaaaaaacctgagtgattgttaggacttaggagagaaagatagaacgatagagaattaaaaagtacagatgtgtgaaggtgaagaatggtatgagagttatgagatttcaaaaactgatttgcagatatcataagaacgtcttttggagatgacatagcaaaaaagatcgtgaacgtaaaaataggattgtgattaaggaaataaatttatttaattttgctgattttgaggagaaaaagaaattaagaataatgataaatttaagaatattatttatctatggaaataacaattccgtgtcatttataacaataaattatttaattcagttagttttttttctaataataagttcttagcatcactttctattgatctatattttgtatcatttttaaaaatgatgttaataaaaataagggaatacaccggttatcttagttgatgtaaatacatatttttgtatctattttctgaagtgatgcaaactaatacaaatttgtatcaatttgattaaactgacactaaacaaactaattaacaaatcacttattagaattgatgttgaattatttattttgtgtcatttgcttataagtaatttaaactagtatcatttatacttctgattctaattaattgatgtaatccatcactttttttgtagtgacattagctgggtgcagccgaaaagattttttttttttggtaaaaaccgaaaagattctttgctacaagctttgatgtagttgagttgtggtatgtttttgattcttgcacaagtctattttgtccagttcatttgtggctttctcaagaatctctggatgattcatcatcggcgctatcgtccactccacgttattcatcgtattgtcagtggttgcaatatttgaagttggattgttttatgagatattaatgttataaatattatattttggaatactttttgaaatgtatttggttcacttttagggatgaatttttttattcaccccgttttttaactaattagaatatgtcactttaaagaaaaatcaaattcatttaattgtaaaatatgatatgcaacaaaaacgaagttatatatcatctatccgattggagccatcctgcatccaaaacttgagttaggtttataacggttaaattgtcgattttaatcacaaaaaaggattatggtttagattttgtaacaaataagatatatgtcggtattagtttaccaaaaactagttacagtttagattttacaactaaatgagttatgaattttgtttattagatagtaaattctgattagttaaaattaaaaattatttaaaatttaacattaaaataaaataaaaagttacaaccacaaggaaaattacacaaaatttattacggtcaaggttttaatgaagtggagagatgatataaaagcacacatgcatgaattgataaaataaaaacgtagatggtatgtactagtatttaacaagattatatcacttcatgatttatcaccccaaatacttctagagattctagatctggattttcggatataaacttggagccaacctaggtttcgcgcatgcgagtagaggcttggccataaacaagttactctccgccgaaatgagctccactgaacttttaccaatagggagagtccattcgaacccttggataagcctggctaacaacatgatggtcatagatgtcccaatcttagtgcccggacagctacgccgaccggtgccgaatgtaacgaatcgcatgtccggttccatcaaagtcacgcccaatgacttctcgacatggccatcaaggtatctttctggcttgaacgcgttaggctcgtcccatattttaggattccgaccaagccccaaacgactcacaagaatttgactgcctatcattgcaaatttgaaatcatacaaatgccaatgttagactaaaccattttagaataaatgacacaattatttgacttgctagctagatgcctcatgcctagatccaattacaatctaatatccaagataaagttaatcaaccgccgttcctatgttagttggggtatttttttaccaaaataaaaaattagttgtttaaattaaaagttaaacattcgctgcattttcaaatattcttgttatcatgcagtactatacaagttgtccatacatgtcttacgtcagaaattaatgcctctctcgttttataattattttaaaatgtaagattacgtcagctatttaatgtttaatttattcatagttgaataattatttatttgattaggtaattgatttttatattgctaacttttttttcaatatctataatatttgagctacttcgaactcatcaaccctatatcagtgacttttttacctttggggacaaaataacccgcgagggtagtatcttctcttgcaacatgatggggcatgaacacattagctgggtgaagccgaaaagattctttgctacatgctttgatgtagttgagttgtgatatgtctgattcttgcacaagtctgtctttaccaactattatgtccagttcatttgtggctttctcaagaatctctgggtgatttaacatctccgcgatcgtccactccacgttattcatcgtattgtcaattgttgcaagattgatttcctacatacaagataatatatgcgtaagagattaatttaaaccatgctaggatctcgagatgaatttagaaggaatcgatagtaatataaaattgaaaagtctatcaattttcagaaaacaaaattatattttgtgtgtaacaattctatgtgtgaacatcactaaccttgcattgagccctaatctcatcaaatgtgaacaaatgcattccttgatcatcttttaacgtgataaggatatcgagccagtcttcttccatttgttttccacctttcttcctccataaatgtattctttcttggatgatggggtcattacatatattgattatatgaaccgcttctcttacttctgtctccgctttatctacgttccatcctctaagaaaagggatgtaattcgttaagttaaagctgaaaaaacaatcaagagcaaggtatattgcgtccatatgctctttctcttttggcccgagaccgccgttctctaccacttcatcaaaatgcctctgaccaaacatcatcctcatcatcacggcgtggcaataagttaatatcgtatctctcacgttaataggcttcctcactgaccctagttggcatagattgtagacatatgtgacgatattatccgcttctatgtttctataaccgagggttttgctcaatgttgtcggggacataagtttggtggtcatcactttctttaccagcttccagttctctccgtaggaagagaaagaaatgttcttatagccatggcttatgagatggctcgcgtatgactctgacctatctgcgagaacctcatccttttccctaagcacttcacgggcaatcttgcttgaggtcacggtgatgacatggaaacgggcaaagcggtagcaagctatatccgtctgcagttcttccatgacgcggtggatccacaagtgagccggccggttgatgatcatttggagcatgttcccaacgattggccatccccgtggtccgggaggaagctgaccttttggtttcatgaatcttgaaaaacgtctagcaagagccaggaccagcgtaatggaaattaaaacaagagtgaaactggatggattcgtgataatagtcatggtcaaaaagttttttttgggagttgaaaagaaatctcccttttaagatagtagtagagaaatcttactacaaaatgagtagtaagaacgtttccatagctatctatttatacattttaagtttcatatataaccgtataaaatagtgttggtgtaggaaaaccaacattttcagtttcatatataaccgtataaaatattgttggtgtaggaaaaccattattcattaatcaagaaaccctaatataaaagattgaccgaagtagctattagcagcaaataattgtgttacggtcattttgtatgatagatatatgtgtcctattatgcggtcattgttctcatttatgcaagagatcggttatggtgaatttgatgaagttgggaagcatcgaagaaaagaataatattggaacaaatcgattatagtaaagttttctcttactaaatgcgtcccttatacaattaggaaaaaatgatttttttttttttttcataccgtattctctctagtcacttgtgtagagttcctctatccatacatattcctttttagtaaatgtaagatgacattcaaaaataatattaaagcacgcgtgacataaacattcatgaattcattattaaaagctaagttggtttttgagataccaaaccaaaagaaattaagttcccagaaataaccattatattgtcttaatctctctacttagtatcatagcattaatcttatagttttaaataacgaattggtgcccaaaaaattataatatcgaattggtgccctacaagggttttatccatttgtataaatatttttgttttcttttctttcagaaatgtgctttatttctttctatgattcgatttcaccattgctttaatgtcttttgtacacctcctaccccttttattagctcgcttgaatttttagtttttcatgcgtcaaaatttttattccgagagttttccttttcctcgattttagccgtgagaagtcagagtaatcttatgtacgtgatgacaattaatatacttcataacagattaacaagaacatttatgtaagtgatggattatggatacatatgtttcttggtatgtagactcatttgcttcatgtcaaattgcaaacttattttagaatcttagttagggacatattcaatattttcttagtcaatatgaaaataataaaagaatagttattgtaaaacatttttagttgtctaaatgatacctattgttagacatatagacagaatgagtatagtactatagttaattaatgaattttttttttatgaagtccattactggttatagattcatataaaaagcccatataaatctagatatgttttgctaaagtgatttatagtataggattaatgaaaatatatggaagtcttgcaaaattcagttttaaaagctgactagatagatgggaagtcattttatatgatttcgttagattttcacgtatcatcactttggttctaaaattaataagattttaacattttttttttaaattacagacatgatctaaaaattgaagtaatgtaatttaatttaaactaccaattgaatttaaagatataagtttattcttcatttacgttcgtctagtaaattattcaattttattaatgaataaaaagacttagttgactatatatattatggtttatttttgccttcttggtagtagtttaactgtttaaggtttcgtcggcttgtttgtatcttcttattagtgcaaattctctattgtttatagtataatatgactaatatttaaattgactaactatggtttacttttataaattgttataaacttgtagcggtgtttctcttgattagtcaattgtatttgtagtgaattc

(The sequence listing continues in the following parts.)

1-3. (canceled)

4. A method of identifying a nucleic acid molecule associated with a phenotypic trait of interest comprising:
(A) screening a mapping population of Arabidopsis plants to determine the linkage of said phenotypic trait with a collection of polymorphisms, wherein said polymorphisms are distributed throughout the genome of said mapping population of Arabidopsis plants wherein at least one of the polymorphisms is selected from Table A;
(B) calculating the linkage of each of said polymorphisms to said phenotypic trait; and,
(C) isolating said nucleic acid molecule associated with said phenotypic trait based on its linkage to one or more of said polymorphisms,
and wherein said collection of polymorphisms is designed from features of polymorphisms listed in Table A and recorded on computer readable medium.
